United States Patent Application Publication US 2007/0067865 A1 - sequence listing, part 6

SEQ ID NO: 20815 - DNA, 388 bp, Glycine max
gacaaaatggcgccattggagtcactggagaaagaggatccactcattgactctaatgttcaaagcttctgcgcctcccacggccattttctctgttgaagattttcttctgcacgatctcgacgcattactttcctttacggataatcattccacttcacagaccctgaagcagggaattgaccagctgatctcaataatagacgctcttcatccaccattgctaaacggcttgcagctcttggaagatgctcagcgtaataaacatgttttgtccactggatgtgaagggattgatgcattgctcagaggtggattacgtgaagggcaattaactgaacttgttgggtcatcctcgtctggaaagacacaggcatgcctactgtct

SEQ ID NO: 20816 - DNA, 325 bp, Glycine max
taattacttacttggagggttttagagagaaatggcttcgtcttgttctagctttatgatcactttggccgttttggtccttttgttggggactagtagtgccaatgccaatccaacacttcacacaaacttctactacagttcttgcccaaaactctttgacactgtgaaacgcacagtggaatcggccatatcaaaggagacccgcatgggtgcttctctcctacgtttgttcttccacgattgctttgtcaatgggtgtgatgggtcaattctacttgatgacacatcaagcttcaccggagagaaaaacgcatgacctaac

SEQ ID NO: 20817 - DNA, 377 bp, Glycine max
ccttatttctctcttgcaaccagagcatgcacatcagaaaccatgcgttttattacgcttttgtcccttccgtctttcttaattcacatgtcactgcccttcttagtcgtctgcagcaacaacaacaacgtttctgagttggccttgtcgtgtccatggctgtgtccaacggcgtcgaagctgtgttagagtttctaaggaagaatggattgtcggaagctgagtccgctctccgagaagacatcatcgagaacaccgacctcggaacctttgactacgagaagttcttcttccccatggtcccgccgccgccgccggtcagagtccgatctttctcccggccgtcggggctctccgccgccggcaactgctccata

SEQ ID NO: 20818 - DNA, 636 bp, Glycine max
aagaggtcgacgacgcatgcagcacgaccacagcttcgaaattcgcttcgagccaaactattttttctaacacttttcctcgctctcttcttcgttccgccggagaaatcagaacccaccggcggcatcacacgacgagccacttcacagtaaaccctaaacacttaacagagaaagagagactcacgttgatactctagaaagttcactatgggaaactgcaacgcctgtgcgaaagctgatgtcgtagaagacagcaccaacaacaggaacaagaagtctaatgaaacgaaccgcggtggtaggaagaaagagcagaaccagaaaaaaccgaacccgttctcagacgaaccggcccggtcggcggctccgatccgggtcttgaaggacgtgattccaatgagccaccggacgcgcataagcgacaagtacatactgggccgggaactgggccggggcgagttcggaatcacctacctctgcacggaccgggagaccaaggaagcccttgcctgcaagtcgatctcgaagcggaagctccggactgccgtggacatcgacgacgtgcggcgcgaggtcgccatcatgtccacgctgccggagcaccccaacgtcgtgaagctgaggcgacttacg

SEQ ID NO: 20819 - DNA, 576 bp, Glycine max
aaatcaattactattagggttagcccttcctcttcttcccctcaccgcatcgtcttcctcttcactggatcaatattcctcccgctgtgcttgaattggataatcaaccttaaagctatatgttctgaggttgatgtgttacgtataatcttgttactgttctgagcgtatggaggggtgatacctgattgatctgggatgttgcgtagtaatctattctgattgattatgcatatctggaatgagttcaatggtcatattcttttattaatactgtgaactgtgctttatactttagtactggaaagaaggtacaaccaccagaggatttcctgtatccatgctgtcagagagcatgcgtggaatctgtacatcgggtaatgcccctgtcgagattttctgccgaggcattcggtgtggtgacgatatgtttagtagccatcttgattcttcttgggtcgatgtgcattgcttactcattttacttccgctctcggattcatagtcaaggtttggttcagctcaattattttagtggtccttggatcatcagaatcacattcatcctattttcaa

SEQ ID NO: 20820 - DNA, 643 bp, Glycine max
gagagagactactcacctttaggatacttgtgaatgtgtcttttgtttttgatatagcttcaatttgtttctcctttgtccttaaataattttgatatctgttgctttcagcatacagtgaagcccggctcttacacatggatacatcacaggccaccacctcaacgtagacagaaccattttgatgtgcatgacatgttggacatgctccaggatgttgacttaacaagtgcagaatatttttccatcatgaggggctcggacctttttgatgatatggatccattcgagatgatggatatatctcataggcttgctggtgactcaggtccttgtttaggtccttttgattctgatgaggaggacttggatatttttcagatggctgcattgtcggaagcgcttgcttctggtgtggatgattttggtcccgaagatattggtaatgaagatttcaatcctatggaggctgccttgttaccaatgatgatgcattctaatatggaagatgaagatgatgatgaggaagaagaatacagtgatgaagactactagattttcttagttcatataaatcccgtctataaaccagttattgaggtagtttctttggcagtatggtatcctatcattttgctttgac

SEQ ID NO: 20821 - DNA, 489 bp, Glycine max
gctttctgtttatcctgtatccgcaattggcgtaatagtgctgccccaacatctggaatggacatcggtaatgctggcactgctaatacagtcagaacctgtcctgtttgtcgcaaactatcatattttgtcatttccaagtggtatttggtattctactaaggaagaaaagcaggaaaattatcgacaactacaaggcaaactgcaaactaattgattgcaagcattttaactttggaaatgggaattgtccatttggggctagttgcttctacaagcatacagtgaagcccggctcttacacatggatacatcacaggccaccacctcaacgtagacagaaccattttgatgtgcatgacatgttgaacatgctccaggatgttgacttaacaagtgcagaatatttttccatcatgagggactcggacctttatgatgatatggatccattcgagatgatggtatctgataggcttgctggtgatt

SEQ ID NO: 20822 - DNA, 282 bp, Glycine max
atttttgctacttggaatggagttcttgaggacatgagtgatgtaaaggaattggttcctgagctattttacctacctgaggtcctcacaactgacgattcttttgattttggcacaacacaaatgggaggaaagcttgatactgtaaagcttcctgcttgggctgaaaatccaattgattttattcacaagcaccggaaggctctagagagcgagtatgtatctgctcatttgcatgagtggattgacctcatatttgggtataagcaacgaggcaaggaa

SEQ ID NO: 20823 - DNA, 808 bp, Glycine max
  unsure (1)..(808): unsure at all n locations
agagaacgagaaaatgacatcgagaaagcaatgctggaggctgagagggaaagggaaagagaaaaggataggatggctgttgatagagcaactttagaggctcgtgatagggcatatgctgaatcttgtgaaagggctgcatttgaaagagcaactgtggaagcacggtacaaggcactggctgaggccagggaaagacttgagaaggcatgtgctgaggccagggataagtcaaacattgatgaagaaactatagaggcaagactgaaagcagaacgcgctgctgtagaaagagcaactgcagaggctcaagaccgagctatggaaaaattaaagaatgaaaggactgcatttgagtccagagaatggttagcgagatctgtatctgacaatttttgcggaagaccagactcttcatcctccgatatgctggatcctcagtttcagaacttaagctcttccacaggttccagacatccatattcactttatggtgctgcctctttttctgagagatcagaaagagaaggtgaatcagctcagaggtgtagagctagactggagaggcatcgccgaacagctgagcgtgcagcgaaagctttggcagataagaacatgcgtgaccttctagctcagaaggagcaagctgaaagatatagactgtcagagactctggatgctgaagtaaggaggtggtcaggtgganaagaaggaaacttgcgtgccttactttctaccttgcaatatatccttgtgcctgattctggatgcagcaatcccattgaccgaggtcattactactgctgct

SEQ ID NO: 20824 - DNA, 865 bp, Glycine max
ttgacgcgtgggctcattttcatacactttattcgtttcttaatttcctactcttctcacctgagaatttaatttgtcatttagacatggagcttagttttaagcaccaacttggccttgtttgtgtcataatgctctttcctgcactgtgtttctgccaggaatatactaaatccagagcaaccttttatggtacctctgatggctatgggactccaaccggagcttgtggctttggtgaatatggaagagcgatgaattggtatgatggaagagtcgcaggggtgtctgatctatggaggaatggagctggctgtggaacatgttatcaggtaaggtgcctagtaccagaattatgtgatacgaatggagcatacctggtggcaacagaccaaggttatggagacagaacagactttgtcatgagcccacgcgccttcttgaaattgggacgtgatgaatattcatctgaagagcttaagaaatacggcacagtggatattgaatacaaaagggttccatgcacatacaccggcaatgtcttgttccacatcaaggaaactagcaccaaccctggttactttgctttggtcattctcaatgtaaatggaatacacgacgtcactgctgttgaattgtatcagatgggacaatggaagtcacttaacaggaactatggagcagtgtttgactttcctaacccaccaagtggcgaaatccggttaaggtttagggtgagtggcatgtctgattgggtggaccccatgattgtcatacccagtaactggcagcctggaaatacttatgccaccaaggttcagcttaaatagaaagaatcccaggaacagattacaaataataggca

SEQ ID NO: 20825 - DNA, 506 bp, Glycine max
gattactcgtttccagcgttaacaaccgattgcgaccaactttacactttctgaggaaattagggtttaatgggccccactcgctcacgtgtcagacctcatggcttctcgtttccagcgtggaggacacccttttgcccaagattgagtttttgaagggcttggggttcactcacgaagaggtggctaacatggtcgtgaggtcacctgggttgttgactcttagtgtggagaagaatttgaggcccaaggtggagtttttcttgagggagatgaatggggatgttgctgagctcaagaggtttccgcagtatttttcttttagcttggaacggaggattaagccgcggtacgggatgctgagacgggttggcgtgtcgatggatttggaagatatgttgaaggttagtgatggcgggtttaaggctaggttgcttgatttgaggtttaagaaacttgagataggagtaggacaacatttgtagtagtaggttaccgaggagtag

SEQ ID NO: 20826 - DNA, 583 bp, Glycine max
ggaagaagaaaatatccattagaaaaagaccgtagactttggccattttttcactccacacggagccaaagccaaatccaaagccaacaacaacgccaccaactcaacaacaggaaagtcctcataaaccccataacccaaaccaaaacccattgaactccttctctttccctctgtctctctctctctctcacacacaaagaggccatgggttacttggacgatgatcatgatcatgacacattccacgaccacaacgacttcaacagaaggatactcatcatggctatagtttccttatcagtggtcttggttcttgtctttgcacttcacctctacgcaagggttttcctccgccgccaaactcgccgcagagccgccatataccaactcagcctcaacgtggcacaagcacacgccgagccacacaacaacacagggctgaaccctgccctcatcaccacccttcccaccttccccttcaaacaaaaccaacaccatgattctgctgagtgtgccgtgtgcttgagcgttctagaagacggagaacacgtgaggcttcttcccaattgcaaacacagct

SEQ ID NO: 20827 - DNA, 1279 bp, Glycine max
agaagttggtggatgttgtagctactcacacggtggagaccaaatattattgattagacattcacaacttacaatcttattgtgggctaataaggggcgaacactcgcccacagtctattacatggcgagagctacactcgtcacatccaaaactctaacaagcactgatatctttcactacagtaactcccaacaatctgggtctggcccaattcctagtggcccaaccactcaaatcgattggtcaatcaaacaagctcgttcaataaggacaaacttgacagcgagtggaccaaggccaaatccacaaggctcctaccactatggattaataaacattagtaggacaattaccttggtgagctcaacagcacaagtgaacaagaaacaaagatacgcagtgaacagtgtttcattcacacctgctgacactcctttgaagctagcagattactttaacattggagggattttccaagttggaagcatcccagatagcccttctggtagacccatgtatcttgacacctcagtcatgggtgccgactttcgagccttcgtcgaggtcgtgtttcagaaccatgaaaacatcatccagagctggcacattgatgggtactcattttgggttgtaggaatggacggtggtgtgtggacgcctaatagtcgtaaccaatacaacctcagagatgcagtatcgaggagcacaacacaggtatatcctaagtcatggaccgcaatttacatggcattagataatgtgggtatgtggaacatgaggagtgaattttgggcacgccaataccttggacaacaattctatttgagagtgtattcaccagttggatccattagggatgaatatccaattcccaagaatgctcttctttgtggcaaagctgcaggcaggacaaccaggtgatctctatgagaatcaaatccctcataacaaagatgtttatcaacaacctagctatgtagggaccaacttggtcccattctttacaaattcgtctaccatttctttgtattactaccaaatcaccatcttgttgtcataataattaatttgtcaccattgatttattttttcaaataaatttatttttatgatgtcttagcaaatttctgttctagtttatcataataaaatgacacaacttatttgatccatctacaattctacatgtgtacccttaagtgaatttgaagtgttgtgtttgcatttgaagcgttgtactgttgtttgacccgataattcaacatgtatttgagaac

SEQ ID NO: 20828 - DNA, 358 bp, Glycine max
atcggatatcacaagcttagctccatcttcaccttcaaggtcaccaaagcgccctgtgtactatgtgcaaagtccttcaagggattctcatgatggggacaagtcatcctcaatgcaggcaactccaatatcaaacagtcctatggagtctccctcacatccttcgtttgggcgtcactcgaggaactcttctgcgagccgcttttcggggattttccggtcatcttctggaaggaaagggagtaggaagaggaatgataaggggtggcctgagtgtgatgtaattctggaagaagggtcttatcatgagtttcaggacaagggtttcacaaggcgcttccaggctttgattgctgtc

SEQ ID NO: 20829 - DNA, 489 bp, Glycine max
ctgctctaaacctctgttttggtgctatgaaattgcatgttggggactggttgtactatatggtggtactgccttcttcttgaggagaaaggcagccacaattcttgacgagggaaattttagtggtcgaaatctagggttggaaatgctggaagcgagccccctggaagtcacaccagaggtggaaaggcgtgttaatgaagggtttaaggcatggatgggtccatcccttctttcttctgatgaagaagacgaacctaacagctatgatgaggcacctcattcagcacgtactaactcaaacaggcaaagactctgaactggataaattcagtgtgaagagcctcgcatcatcttttccagcctttcatgccttgaataatgctgtatggtttggaaatcagttttggacaaaaaatgttgacacgtatcatatgacaaaaacaaatgttgattaaagaagtatggatttgatgctcaactttgaac

SEQ ID NO: 20830 - DNA, 677 bp, Glycine max
ccgatttctaagaaggatccaccttttgttcccactttcctaagtttccttctcgctcccgtctctgaaatctcgagggtttcatcgttgctgaatcaacaattcggaaccagttagcaatgttcagattctggggatcacaagagcaacaatcgcaggatggttcttcgcagtcacagtcgtggtatccgccatcggtggtgagttcacctacttcatcgaggcctgttacaccgactgcatcttcttcttcattatcgcagaggccttcgtctcatgttccaccttccgaagctgctgcagttattgccgttttgaaggacaagagtgttgatgagttgcggaagcttttatctgacaaagatgcgtatcaacagtttttgcattcgcttgatcaggtcaagattcaaaataatctgaaagatgaactttgcaaggagaatttacagcttgcagaggaaaatcttcaaaaggaacctcgcatcatggaacttaggaatcaatgtagaataattcggacaaccgagttagctgctgctaaggagaaactaaatgagcttgagaagcagaaagaagacatgttgaaattgaattccgcagcatcccttctccaaaggattcaagagtctgtgaataagaccgacgaggaatctgaaaacttgcaccacaatctcctt

SEQ ID NO: 20831 - DNA, 399 bp, Glycine max
actcgagccaattcggctcaaggttcaacttgtgagggggatcaaaacattcctagattggaatatggcaaaacttggttgttctagtcgtaggaaagcaattgaggagctccttagagggcgtgattgtgccaaacaacttaggagtgtcatcaatgggagttgtgaagatggatcatcaacaaccccatcatttgctgaacaacttgtgaaggaggtgctcatgtccttcaccaactccctctcgttcttgaagaacaaccccacttctgaatcccatgatgtttccaatgttcaagtttgtgaatctcccaagtctgaggactcccaagagagcaattgcaagagctcatattaagacgtgagggtgctacagagagagaactgacaacatgggga

SEQ ID NO: 20832 - DNA, 393 bp, Glycine max
cgggaatccatccattccaatccatcatctccctacaacgaagacagggagggaatgaacgaacctaagaacagatctcactttatgtccttttcaattcacatacacagaccaacccctaaatctccataacacattcattctctctttctctctaactctctggataagatcttcagatacagagggaccccacttcctccattaacataataacaatatccataacttctcaataccaaaactcagaagaacccatatgatctgggttgttcccgtgatgaagacgaatcctcgtgtctttggaggactatgctttggtctgatcctcctccccgcggcgcctgattctgggtgtgagccaaaaagctttcttttttttcgctccattac

SEQ ID NO: 20833 - DNA, 912 bp, Glycine max
ggaacatttttatggcccattagtgcatggacggagtatcaattggattaagcgccttgagactgcagaagatgctgccaaagggattgaatatattcacacgggttgtgttcctgtcgttatccatagagacttaaaaagcagcaacattcttctcgacaagcacatgagagccaaggtttcagattttggtctctcaaaacttgctgtggatggagcttcccatgtttcaagcatagttcgtgggacagtaggatatttggatcctgagtactatatttcccagcagcttactgacaagagtgatatttatagttttggtgtaattcttcttgaactcatatctggtcaagaagcaatatcgaatgaaagctttggtgtaaattgccgaaacatagtccaatgggcaaaattacacattgagagtggagatatacagggtattatcgatcccttgttgcggaatgactatgaccttcaatcgatgtggaaaatagcagagaaagcattcatgtgtgttcagccccacggacatatgcgaccatcaatttcagaagctctaaaggagatccaagatgcaatatctattgagagacaggcagaagcattaagagaaggcaactcagatgacatgtcaaaacattcttttcattcttccatgaacatggggtcaatggatctaggtggagctgagagttacctgtcaattgatgaatcaattgcacagcctacagcaagatagatatctcttgtaaacaaaagcaaaattttctctctttcttttcttcctctgattttatttttttctctcattacttcttttgtatgtggaggaggccttgttcatatgtggtttaatgattggttcccctcccaaacaaatgaacagtatatatgtatgtatttggagtt

SEQ ID NO: 20834 - DNA, 393 bp, Glycine max
acatggcacgcgtccgtaagttcggaattcgttaaccccgtcgctcagtaattgtacccggataggcggctaagaataataatctgagacgaccaacctcagcctcttaccatgagtaagctacaaagtgatgcactgagagaggcaatttcccaggtggtgagtaattcaaaggagaaaaatcgtaaattcaccgagactattgagctgcaaattggattgaagaactatgatcctcagaaagataagcgtttcagtggttctgttaagcttccgcatattcctcgccctaagatgaaaatctgcatgctcggtgatgctcagcacgttgaaaggcggaaaaaattggctgactacatgatgtgaacactgagaactcataaaacaaaaact

SEQ ID NO: 20835 - DNA, 683 bp, Glycine max
ggaagcaatgcacctatttctgttaatacccagctaattaatgttgctggccaaaccagtccgttagctcctcaatttcaacaacagactttcatatctcaaggactgttttaccctaatgtaagtcggccaaatgtggggtcacctcgatatgagcaatcaccttttgcccagagcacaggtccttcttggaatggccaggttgcgcaacagcaacagcctccttcaccagtttatggtacagcaagtggtggatcatttccgccacctccctgggaagcgcaacctacagataataatagtccagtagcaggcagtcaatacccacaaccactgcaagtgtctcaaatgattatgacgagtatacagagtggtacacatcctcagggacctcaagcaatggggcatgaccaggctgttggaatgtatatgcagccacatgctggccatatgtcaaccatcaataaccatgttcaaagcaatcaattaggcttgtacccgcagcatattcagggtgttgctggttcctatgtggatatggtttcacatcaaatgcatacagtcctgtggcttccatgtatcctcaacagatgtatggcaaccaattcggaggatatggctatggtcagcaaccaagggttcagtatgttgagcagcaaatgtatggtttatctgtcagagat

SEQ ID NO: 20836 - DNA, 504 bp, Glycine max
ggggacaacaagtccactgctgagtcactttgccgcaagataggtgcttttgatcaattgatagattttgctgaacattcttacactgcttctgagtttgaagaacttccagcactgcaacaaactatagcattgcaacgtatggcactttttaccagggttgagccttctcataaaaggatgctggttgaagcattacagcaccagaatgaagtggttgcaatgacgggtgatggagttaatgatgcacctgcactaaagaaggcagatataggaattgctatgggttcagggacagctgttgctaagagtgcttcagacatggtgctggctgatgacaactttgcctcaattgttgcggctgtggcagagggaagagctatatacaataatacaaaacagtttattcgattcatgatttcttccaatattggtgaagtagtctgtatatttgtggctgcggtgcttggaataccggatactctggcccctgtccagttgctt

SEQ ID NO: 20837 - DNA, 867 bp, Glycine max
aagagctttggccgcccaaggcccccgtccgtaggctcggaattcggttcggggcatttaacatattacaggccataacattgagaaaatacccagcaaagatgtcgctggccacttgggtttgctttgtaggagcacttcaaagctctattgttgcaatcttcgcagaacgccaccaccctcatgcttggtcccttggttgggatacacgactctttgctcctgcttacgcgggaatagttacatctggagttcagtattacatacaaggcatggtctcaaaaattatgggcccagttattgtgactgcttttgagcccctgcgtatgatcattgttacggccttggcctgcatcatcttatccgagcaactcttccttggaagtattattggagcaatagttgtggttcttgggctttatctagttgcgtggggaaaagctaaagaacgtagaggtctgatgacaccgtcctctgcagaaaataactttccagaagaccaacgacagctaccggtcacagctccaaggaatgatagcattaacaataataataaggcttaattagtccatcgccatgatgaaaaaagtgatgtggaaggcacagtatatcaagaagagaaagtcagctgaatgtaagtctaggcctctgctatgtttaattagacattgttgtagcattccatacaaatgatctaaggtcaatgtcatgcacattactaataccatgaaattggtgggataagtggcatgacgattgatgaaattcatcatatatataattaattagtggtcactttgagctgcatcattgttctggatttgaatgaacaaatgtgcttccgagtcatcatatagtaattcactc

SEQ ID NO: 20838 - DNA, 625 bp, Glycine max
gtgaaaggatagagcgaaacgcatcgcactttatcgtcgttcgatggtgatgatggtgacggagggaaacgacagcagctgcggcagcggagtgcagcaccatacgatgtcgtcctcgtcctcgccggcgcagagccggcagcagcggcagaaggtggaagtgtacaatgagattctccgccgcttgaaggattccggccacgaagaagctatgcaacctggcttccacgatcagctttgggctcactgcaatcgcctccctacacggtatgcgctggatgtgaatggggaaagggcggcagatgttctcatgcacaagagattgctgcatttggcgcatgatcctgctaataggccttcaattgaagttcgattagttcaggtttatcccataaccgatggaaactcagctgacacttttgaatcagatgatcctgggatagaatctggacaaagttcttcaaagtactcaagcagacagagtatacatccacctcctgcttttggttcttctcctaatcttgaagcactggctcttgaagcaaataattctgaagaagacatagaagaggaacaatctgtacatgccaatgttcaatattcacggcccatgcatgaaatcacc

SEQ ID NO: 20839 - DNA, 617 bp, Glycine max
cccacgcgttcgaaaccatttcattccaattctccacactcaaactgtaccaaacacacagaaacacaaactaactccaattctcatcctccttgcaacttgcactcccagtggtctctctcttgagaagagacctctgttggatgctagctgtgttaccttccttcacttcagccgagtgattttaagcactttccttctcctttggctagtcatgtcatcagcacctatgaccaacaacaacaacaacaaggttcaaagccaaggcctatcatctttttcttcttcttcttcctatgtgagaatagaggaagagatcatgaagcaaggcatcatcaccatattgaacacaaacacaccttcttctctgagaagaactctctccgcagacatgtcctcaaagaactactggctctctcagaacattgctccctcagaagaacaagacttgcatgcaaaaaccattgctccctcagaagaagatgaagaggccaacaacaacaacaaggagcttgaagaagaagatgaagctgaaagagagaggcttgagatttggagctccatccagcggaacaagaaggaggagcaagagaaatcaagagcctttgacacgtgga

SEQ ID NO: 20840 - DNA, 400 bp, Glycine max
atggcattccataccctctcaacttaagaacagtggttggactaagtggttggcttcccggatcaaggagcttaaggaacaagatagaagtgtcacatgaggcaagaaggcgagcagcttcattacccattttgctgtgccatggaatcagtgatgatgtagtcctttgcaaatacggagaaaaatctgctcaatccttatgttcagcagggtttcgatatgttgcattcaaatcctatgatgggcttggtcattacacggttcctagagagatggatgaggtttgcacttggtttagttcaagattgggacttgatgggtcctcgtaagtgacataattagtatcagtcagggcatgggcgtagaaggtatatggaacaataacagggaaagtggggag

SEQ ID NO: 20841 - DNA, 368 bp, Glycine max
tgaacaacttgggattttcaaatatggagggctacgtcattggggtaagaataggaacttggcatttgaaggagccatcaagaagtacaaaaatgcagggagatttttaagggttaaagagaagtatgatttacaagggcttttctcaagtacatggacagaccaaatgcttgggctaaaggatggagtgacaatattgaaggatgggtgtgcattagaaggtttatgcatttgctcacaggatagtcattgcaatccaagcaaagattactattgtaaaccaggcacagtttacaaggacgcacgggtttgtcactcatttgaaatccaaatgagaccaaattttacagaaattaaaggacattttt

SEQ ID NO: 20842 - DNA, 409 bp, Glycine max
gtgttcttttcatgcgctcatataatatctaatctagagacacgctaccaccgacaaaaccttctcctttttaccattctaatggctaggctttttcacatcacactttatttgtgttgtgtgtcgcgcgcgcgcgcgtgtgtgtgtgaatttgtgaagtgagttggagatagagacaacggtttaagatggctgtggtgagtcctatgcctgcaacaacacataggatgggttcagtgaggtcactttctgaggctggtggaaaatttttggaagagcctaatccaagtgtggttgatcagccagtctatgttgctgtgacaaaagacgtgtcggagagcagattagatctgatatgggcaatacaaaactccggaggaaagagaatatgcattctatatgtgcatgt

SEQ ID NO: 20843 - DNA, 455 bp, Glycine max
ctttgttgttcagttcttatggttttcttgtgaattgttaaagaccaattagcatggccagtattctgtgtccttctttaaccatagtcacgtcctatgcattcagcaatgaaccaaaacttgtctctaaattcactgcagtaacaggaaactcttactcaccactatggctttcttgcacacgccctggaaatccagctagaaaccattttcagctcaaatcctcaaatgggcttccgcaaaatgctgtttcttctaatgacggtttagctggaagttcattggccaaagaagatggccagccccaaccacttgaaggaccatttccctttccagattcagaatataccggatccaaccttagtataactgttgctggagcttctggagaccttgctaaaaagaagatttttccagcactctttgctcttttttatgaagattggctacctgag

SEQ ID NO: 20844 - DNA, 1182 bp, Glycine max
  unsure (1)..(1182): unsure at all n locations
gaggatctgagtcatctaagtctcactggtcttcagggcctttccatagtaaaaagaagcctgcttcaacataccatggttttaattaccatgcagaggccgcgaagatgccacatgcaggtgagctgccatattgggggcaatttaaaagtgctaagaaggaagctggcagtagcatttcatccctttcaactttcattgaacatcatggatcattggatcctccaggaatagaatcaggaaaacattggtgggagatttctcataatgctaaaccattttctacacatcttaataatattcctaatcatatttattatccatttgatcctcttgttgcccatcctgagcatgtgtttgataacaactgggttcacgattctgccagagatggatttaatggaaaaactgtggatggccctattgtgacaatcacagatgaagccaaagaggaaattctgaggaaattcagaagttctaaacaatttgacactgttgaagacatttcagaccatcactnttttcgcagtaattcttcaatgcatcagcctnccaagaattgngctaaataaatccaggaagagtggaggattttggagaaggatttgccagcttcaatatttgtccgagtttttgagtcaaggatggatcttttaagggctgtgattattggagcagaagggactccttatcatgatggcctttcctttttggatgtttccttgcccagtgcctatcccaatgtaccgccgaaagtccactaccactctggaggtcttcggctcaacccaaatctgtatgcttgtggcaaagtatgccttagtctacttaacacctggtccggcagcaaaaatgagaagtgggttccaggcatgtcaacaattctccaggttctggtatctatacaaggtctaatcctgaatactaagccttactttaatgaacctggatatgcacacatgagtggttcagcaaatggtgaaaagatgtcttttcagtataatgaggacacattcattctatcattgaggacaatgatgtatatgatacgaaagcctccaaagaatttcgaggaccttgttaaggggcatttctgcaaccgagctagcgatattctggtggcatgtaaggcatacatggaaggtgctcaagttgggtgtttggtcaaaggaggggttcagg

SEQ ID NO: 20845 - DNA, 378 bp, Glycine max
aatgagcgtcaacctttgaaaacatcccaatcctcatctgttgactttatggacctttctcagcagccatcagctgcaacctcaagtgagaagtcactggagttgtctgtcccagaaaatgaaggatgggcaacatttgatatgcctcagcacacatctactgcacaagtagaaattcaaccagcagtacaggaaaaatttgatccatttttgaacttaaatgcaaatacgctatggccatgttttgaaacttctagtgctagcgctctttcttcagttacatctaatttatggcgtgatgtcacatggaccagagaagaacaagtttctgttacggcatcaaactctcaatcatggagtgcatttaaggatcctgct

SEQ ID NO: 20846 - DNA, 435 bp, Glycine max
agttagtgagtgagtccacccaaatgctggtaattcttggactcattggtggaagtgtgtccatgaagaacgtagtagccagtaacaccgtaatgtctcatctctctcactcgtgacactttcttcatccctaacccattgtcatgagtgccctcaatttgaacgcatggccacgccccagatccagatccagatcccgatccccaacctttcacgccgtcaataagttacccttcttcaccgttaccaaacggagagcattctcgctctctgcggtgctcacggtcgagacggaagagaagccaccaatcttcgacttcaagaactacatgctttccaaagcgtccgcggtcaacaaggccctcgacgcctccgtttcgctccgcgagcccaagaagatccacgaggcgattgcggtactcgctcctcgcggcg

SEQ ID NO: 20847 - DNA, 507 bp, Glycine max
ccaaggcgtccgaccacctttaatttttaatcatcacttcccacttacgctcggtaatgtctcatttctcacgcatcaacccctaataataatcccccaaacagaacctttcccacccaatccaaacacagccctaaacccccccaccatcatcatgagtgccgtgaatttgaacacatggccacgccccagcttcattttgaaccaaaccgccacaagaagatccagatcctccccaacctctcatttctttcacggcgtcaataagttaccgtcacccatttcctccctcaccgttgccaaacgctcatttacgctctcggcggtgctgacgaaagaggacaccgtggagacggaagagaagccaccgattttcgacttcaagaactacatggtttccaaagcgagcgcggtgaacaaggccctcgacgacgccgtttcgctccgcgagccgcagaagatccacgaggcgatgcggtactcgctcctcgccggcggcaagcgcgt

SEQ ID NO: 20848 - DNA, 448 bp, Glycine max
gggcgttgttggtcggacgcgaccgagggcggtggcgccgcccaggccgatggtgccaaaaagagaggtgatggcgaaaaaggtggcgttttgtttccggttaagcgaagtagtgctgtgtctgatttcgttttcggttatggccgcggataagacccgtggttggagcggtgattcttttgaccgctacaaggaatacaggtattgtttgtctgtgaatgttatcgcatttgtatacgctgcgtttcaagcgggtgatctggcgtatcaggtagtaacggggagacgcataatcaatcaccacctgcgttaccactttgatttcttcatggatcaggttttggcgtatcttttggtatcggctgcatcatctgctgctacacgcgttgatgactggcaatcgaattggggaaaagatgatttcacagagatggcgagtgcttcaatt

SEQ ID NO: 20849 - DNA, 892 bp, Glycine max
cttgtgctccaaagcacctttaaccgcgttggtggtagatgtttttgcatttcaggctttggaatatgcaaaggagttcaatgccttgtcctacttttactttcctagttcagctatgatattgtcactgcttatgcacgcgccgaaacttgatgaggaagtttcaggtgagtacaaggacttaactgaacctataaggttaccaggttgtgtaccggtcatgggggttgatcttccggatccggcccaagatcgatcgagcgaagtatacaatcattttcttgaacgtgccaaagcaatggctacagctgatggaatcttgatcaacaccttcttagaaatggaaccaggcgctataagagcgttgcaagagtttgaaaatgggaagatcagattgtacccagttggacccattacacaaaaaggagcaagcaatgaggctgatgagtctgataagtgtttgagatggttggacaagcagccaccttgttcagtgttgtatgtttcttttggaagtggtggaacactctctcagaaccaaatcaatgagttagcttcgggtttggaattgagtggtcaaaggttcttgtgggttttgagagcaccaagtaattcagctagtgctgcttaccttgaggcttcaaaggaggaccctttgcaattcttaccaagcgggtttttggaaaggacaaaggagaaaggtttggttgtgccttcatgggcacctcaggttcaggtccttggtcacaattcagttggggggttcctgagccattgtggttggaactcgacattggagagtgtgcaagagggagtgcctataatagcatggccactctttgctgagcagagaatgaatgcagttatgttaaccgatggacttaaagtggcg

SEQ ID NO: 20850 - DNA, 867 bp, Glycine max
gctttgtctctatgctgcagacttttgttattgcgaggagactttagcagagtttctttcaaaggccactggaactgctgtcgagtgggtccaaatgcctgggatgaagcctggtccggattccattggaatcgttgctatttctcacggttgccctggagtggctgcacgtgcttgcggccttgtgggtctagaacctaccagggttgccgaaatcctcaaagataggctctcatggtttcgtgattgccgaactgtggatgttctaaatgtgatgtccactggaaatggtggaactattgagctgctttacatgcagttgtatgcgccaacaactttggcacctggtcgtgacttctggttgctgcgttacacatcacttttggaggacggtagttttgtggtctgtgaaagatcacttaacaacactcagaatggtcctgctatgcccccagtgcagcattttgttagagcagacatgctgccaagcgggtatttgataagaccctgcgaaggagggggatccattattcatattgtcgatcatatggttctagagccctggagtgtacctgaagttttgcgcccactgtatgagtcatcaatgctgctagctcaaaggacaactatggcggccttacgtcatttgaggcaaatttctcaagaggtttctcagccaagtgtaactggatggggaagaaggcctgcagctttgcgtgcactgagtcagagattgagcaagggctttaatgaagcagtcaatgggtttgcagatgatggctggtccatgttagagagtgatggcattgatgatgtcacccttcttgtgaattcctcacctagcaagatgatgggagttagccttgt

SEQ ID NO: 20851 - DNA, 389 bp, Glycine max
gcgcttcctcccaacgggaaaatcgccaaggacgccaaggaaaccgtgcaggaatgcgtctccgagttcatcagcttcgtcaccagcgaagcgagcgataagtgtcagagagagaagaggaagtccgcccgcggcgacgatttgctttgggctatgaccactttacgtctcgagccgtatattgatccgctcaaggtttacctcgccgcttacagagagattgagggtgattcaaagggttcggccaagggtggagatgcatctgctaagagagatgtttatcagagtcctaatggccaggttgagaatgttgctcatcaaggttctttctcacaaggtgttaattatacgaattcttagccccaggctcaacatatgatagttccgat

SEQ ID NO: 20852 - DNA, 465 bp, Glycine max
cagttttggtgcgggttatggcaaattctacacacgttattccgatgtattttctttgcatgatttcccccccccccccagctgtgaaatttatttggtttgcaaatgtgtataattttacctcaattatgtcttaggattgactttttcaatttgttcacccctttttttctgggaggtggtagaccggagctgcatggtctttgtaccgttgtcttagattttcattttggtcgttgggagagttacataatttttgttttctggtcctgtatccagtcaacatacatctaggagagcatgttgtatctttcctattttattggcttattcatcatgtataaacattatgtgaaaattttgctactggatgccaaaatgacatgtaattttggatgaattcagtaaaaaaaatggaggttaatattgctggtgaaaaaaaaaaaaaaataaaaacaaaagggc

SEQ ID NO: 20853 - DNA, 1030 bp, Glycine max
cgaaaagatggcaaatggattgcaatgataccctgcaccaactctacaaatatgaataataataataagaagaagaagaaaacagccgcatccataaaaggggtactttatgctggttggttctttccccgcttttatattcctaattatttcccatgtcactatgttgcgcaatgaaagataattaatatcaccacactttgtccacattctcattctcctcactcccatcatcttttccaatggcctccaacggcgacgccgttcatccccacccttccaaaaagatcaaactcttcagcaattccattaactcaactaattcctcgtttatcacccatgccgagatcgaatcggaattctcccaccaccaccccacggtggcgcgcctcaacaacggcgccttcgggtgctgcccggcttccgtgatcgccgtgcagcgcgagtggcagatgaagaacctccggcaaccggaccacttctacttcaacgacctcaagaagggactccttcactcccgcaccatcatcaagaacctcgtcaacgccgaacacgtggacgagatctccctcgtcgacaacgcctccaccgccaccgccatcgtcctccagcaagccgcctgggccttccaggaagcaaaattccagaaaggcgacgtggtcctcgtgctccactacgcctacggcgccgtcaagaaagccatcgaggcctacgtggtgcgcgccggaggcaccgttatcgaagtccccctccccttccccgtcacctccaacgacgacgtagtcaacgaattccgaaaagcccttgagaggggcaagtcccgaggcaacagaattcgcttagcggttatcgaccacgtgacttccatgcccagcgtggtcatccccgttaaggacttggttaaaatctgcagagaggagggtgtggagcaggtattcgtggacgcggcacactcgattgggtgcacgcgcgtggacatgcaggagatcggagcggacttctacaccagcaacttgcacaagtggttctt

SEQ ID NO: 20854 - DNA, 394 bp, Glycine max
gtggagtagtgagttgaggcatggaaggagaacacgacgactcacagaagctttcgttgttttacgaatccggtatatactacttcgatgattcaaacgccgttttcgtcgaccccgttcgcgttctcaatcgttcctaccaccgtttcaccgtttctccttctacctactattcccgtttcttcaaatccccaacaacccccaactccgtctcctccaccgttagttcctctctcagaaaacggaaacggaaacccaaagagcctccacctctgtacgaatgagaactaattgctctacagcgtcaccaggaagcgaggcctttgttgttggcggcacacgagtgcttgctgaaatcaactgagctgctgaatgttttgaaaactatacagag

SEQ ID NO: 20855 - DNA, 429 bp, Glycine max
ggcacactcactcactggtcattttatgttttttctctctaccctcattcattctcagtctcaattttgttcaacactctcagagccctcttctgctcccaacgcatatgcataccgcacaatcaccaccaccacccttcgagtaatatggagatcacgagcagccatagcagcggcagcatgatgtggtttttcaaagataagggctttgatgacaacagtgcgcaaggaatgttccgaaagtgccggcgcctcgagggtgtgcatcaggaaagagcaagtgagaattgggactatttgagaagcattggcattgaggaaaggaagctgccctcaattgtttcgaaatgccccaaaattcttgcactagatctttatgggaagattgtgcccactgttgagtgtctcaggacattaggaacaaaacct

SEQ ID NO: 20856 - DNA, 719 bp, Glycine max
catataagagttctcatattctcaatcttattacaagcttgtgcctgcttctttgttccctaggttcgtaccttacattgctgctattgacacaagggtgtgttgttttgtttttatcatcattgagaactaattaaggtacgtgtaaatgggtaagaagcttgatgctctccttggtagaaccttcaaggctgcaaagttcaaggctattgttaaccttgccatctcgcgccttgccgttctcaagaaccagcgccaggctcgccttagacaggcccgttctgatatccttgaactcctccaaattggtcaccttgaacgtgcttcgcttcgagttgagcatgtgatgaaggatcagaacatgttggatgtgtatgtcaggattgaaggatactgcaacctcttgattgagagggtccatctcatcgagcaagagagagaatgtcctgaggaactgaaggaggcagcatcgggattactctatgcagcttcaaggtgtggagattttcccgagattcaagagattcgtgcaattttgacatcacggtttggcaaggagtttgctgctcgatctattgagttgaggaacaactgtggagtccatcctcagatgacacagaaattgtcaacaaggatgccaagcctggaaagcagaatgaaggtactcaaagacattgcttctgagaatggtattgttctgcagcttgaagaaacttctg

SEQ ID NO: 20857 - DNA, 274 bp, Glycine max
cgggaactccgatcgaactcgactcgaatcggcgcgtcagaacatgttcgatgtgtatgtcaggattgaaggatactgcagcctcttgattgagagggtccatctcatcgagcaagagaggttggtttactcgtaattttgtttggtgaaaaattggttttcggttttgtgtttaaaatgatgggtttggtcttcttgttacagagaatgtcctgaggaactgaaggaggcagcatcgggattactctatgcaccttcaaggtgtggcgatttt

SEQ ID NO: 20858 - DNA, 495 bp, Glycine max
gccgaggcaaagttgttgcagccaaaagatgagagctggtctgaatgtgctcacaaaggatatgcagtaaagcctcagaagggtgatgccttgttgttcttcagtctccatctggatgcaagtacagatactaagagcttgcatggaagctgtccagtcattgagggcgagaagtggtctgcaaccaagtggattcacgtgagtgactttgaaaaaccattcaagcaagtggataatggagagtgtgttgatgagaatgagaattgccctaggtgggctaaagtaggtgaatgtgacaagaatccactttatatggttggtggtgaaggagtaaaaggaagctgtatgaagagttgcaatgtctgctcttcttagggcgtctattaccctttctttgctctgaaatgcatgtagagtcataatacgtcgtcaaatatattgtatataacattcatttttgttgaacttcaatatggaactctgccagtacattgc

SEQ ID NO: 20859 - DNA, 476 bp, Glycine max
ggctcttcttcccttcgcctctttttgttcttcttcttcttcaatatttcggagcaactctacatatctttagcctcctcttatatatttcggaagttggtttctgctggaaattttgcaaacaaattcatatactgaaaggactttatgactagggagttctatacaaccagaatcggaatggatctgagcactattgaattggcgaagggagcacgagaagctccagagaactctttacatcattattaagcagtcttatcaaaggtttctttccaagagatgttataagatataattggtaaaattaagtttattgaaagattttgcgcaactttgcctgggatatagtgaaaatggacagatcagatacatcaggctttgtaagtggtggaagctgtatattggaatttgtttttctagccttaaagttctggtagttatgtgagtattgtagcagcaagtggtgaactgtt

SEQ ID NO: 20860 - DNA, 459 bp, Glycine max
tatttattagcgtggctttattacgtaacgagtttctctctgtctggctcttcttcccttcgcctcttcttgttcttcttcttcttcaatattgcggagcaactctacatatctttagcctcctcttatatatttcggaagttggtttctgctggaaattttgcaaacaaattcatatactgaaaggactttatgactagggagttctatacaaccagaatcgcaatggatctgagcactattgaattggcgaagggctaatgaagcttaatggtttattcacagggagcacgagaagctccagagaactctttacatcattattaagcagtcttatcaaaggtttctttccaagagatgttataagatataattggtaaaattaagtttattgaaagattttgcgaaactttgcctgggatatagtgaaaatggacagatcagatacatcaggctttg

SEQ ID NO: 20861 - DNA, 452 bp, Glycine max
gagaaccttaacgttggacttcccgtggcttgcaaataaagaggctaagagtgtgtagtagtgtttgttatgatgatgatgattggtggttgtaaagaaatgggtaattggaagaaaaaatgcagagagttggggaggccaagagaggtcttggacctcctcaccatcacaatcctcagcctcctcctccctttgtctttcttactcttagccactctctccggtgcccaatactaccttcaagccctcacttattattcctcacaaccctttccctatcttttccaccttgccctcaacatcaacccatgtattctttattttctcgtgtccattgtgagcgtggggaccctgatccaggggctgatgggtaaaatcacactcttgagcgagttaccctccaagtcctcgcgtatctccacagcgcggattttgctatgcgcctttcaagt

SEQ ID NO: 20862 - DNA, 882 bp, Glycine max
ctcaatctttccgaaggatggagtgagcggaaagggcatttgggtcagattgaactgaataataggaaacacacaggtggagtggcgagcggaatttgatatgttataaaaaaatactatcaggaaaggggtgttttcgattcgatcaactcactcacgggcacgcctttcattccattccgatgcgatgacgacgatgagttccctctccctctctcttgactggcacaatgaatcctaccctgcctatcatgatttctaccttctccccattttcgctctcttcttcccctcccttcgcttctttctcgaccgattcatattcgagaaagtggctagacgattgatttttggaaaggggcatgcggcgctggactaccagtctgacgagagaagaaaaaagattagcaaatttaaggaatcagcctggaaatgtgtttattatctttccgccgagattcttgctttgtctgtaacatacgatgaaccatggtttacaaatactagaaacttttgggtgggcccagggacccaggtctggccagatcaaaagatcaagttgaaattgaaggcagtctatatgtacgctgctggattttactcatactccatttttgctttgatattttgggaaacgaggcgctccgactttggagtgtccatgagtcatcatgttgctactgtaattctcattgttctgtcttacattttcaggtttgcacgtgttggatcagtggttttagcacttcatgatgctagcgatgtgtttctggagatagggaaaatgtccaaatacagtggtgctgaaactatggctagctttgcttttattctatttggtttatcttggatcatattgcgtctcatttactacccattctg

SEQ ID NO: 20863 - DNA, 451 bp, Glycine max
cagtggttgtcatgaggatgaaattggtattacagcagtcacagctccagaacagcaaagagaaggggaaattccgatgttggatatgatatcccaaaatataagctctctggttgttggtgatgaagttttaaccccagaaattgaggaggatgatttgatatcactggaaggtgatccaattattgatagctcttcactttcagtagccagtgaacatagtagtatttgtggagatgagttcatcagttctgaggtttcttcagatttagggacaacaagttccaaagacataggaaaccgcatctccactgtcaaaattgcagccagggctactgatttgagtatgtcaaatgtagaggcagatgtggcagtgagccttgaagagacaggagttagatctggctcaaagcctactacaggtgtttttcaccaactaactctggaaaga

SEQ ID NO: 20864 - DNA, 566 bp, Glycine max
ctcaatgaatgcctatgtcagaactgctaaatacatgatgggtgcacataatgaattataagtattgatattttctcatgtttgatagagcatatgcagcaagcacatctaggaaatatggctgagaatccaattcgtgtaacgatgattccatggtctgcctttggccacttgataccatttttcaaactttccatagccttagccaaagctggtgttcatgtctccttcatatccactcccaaaaacattcaaaggcttcccaaaattccttcgactttatctcatttggttcattttgtggaacttcctttaccatcattggacaatgatatcttgccagaaggtgctgaggccaccgtggacattccatttgaaaaacatgagtacttaaaggcagcattagataagctccaagatgctgtgaagcaatttgtggccaatcagttaccagattggataatctgtgatttcaatcctcactgggttgtagacattgcccaagagtttcaggtaaagttaatcttattttctattttatctgctactggaacaacattcatagt

SEQ ID NO: 20865 - DNA, 651 bp, Glycine max
cctatcgcgttcggtctccatcagtcttctaattttccagtcaagtgccctacactacatcacatcaaattagtagtaatattcaagaaagatgatggaaattgcgaaccactactacttgcctgaacttggaattgaggatccaaccttgtttgatcaatacccgatggattcatttgcatgtccactcgatgactttgacttcgagtctttctccgggtccccagagagcaactcctcttatcagttcaactccgaaagcacaccaaattgtttccctgctgaaagtcctgatcagtcttttgtccctgcaagaccaaccaagaggctcaagacattcaatacctccaacacttgtgccagtgacataatttcccacaaggtttctgcctcttcatcctcccaagttatttcctttgaccacttcaatgccccatcagatgcttcttccctgcaatttcatcgaaacctggacttcgatgtgaagccgaaaatcgagaaagcgtctagtgggaacatggattttgcagctttcgtttctcacggttcgtatgtggacaaaacattcctaagttctgatacgaatcaggttggaataacctctaggaacccaatccaagctcaagagcacgtaatagctgaaagaaaacg

SEQ ID NO: 20866 - DNA, 364 bp, Glycine max
ctcaaagagcatcaaatcatgttgggggaaaataccatcacagtcgttcagacagtgcacctacaaggagtctagcttcatttgctcaagattataggaaactggcaattgattgcctcaaggttttacgcatagagatgcaattggagacagtattccatatgcaggaaatggcaaatacagaatacttggatgaccaagatgctgaagagccggatgacttcatcatttcgctcactgcacagataacacgaagagatgaggaaatggctccttttatttcaaatgcaaagcggaattatatatttggtggaatttgtggggttgcagcaaatgcatctgttaaggctttggcagatatgaa

SEQ ID NO: 20867 - DNA, 541 bp, Glycine max
ggaggctgatgggcttgagtgcttgcacttgaaagattgtgcactcgagttttttgaactcattggcaaggggaccttgaagcattttaagattgatgatgttagtgttatacatcttgatattggtgagacagttgagaatcttgagactgtggatatcagcaacttcccaattatatggccaaagttttaccagatgatttcaagatcgtcgaatttgaagaggcttcggctttgggatgtaatgtttgatgatgaggatgaggttgtggatttggaaacaatcgcgacttgctttccctacctgagccatttatctctgagttatgatgtgagggatggagtgctttactatggtttacaaggctcttcctatctggagagtgttgttgtcttggagcttggctggactgtgatcaatgatcttttctcccactgggttgagggtctgctcaagcgttgccccaatctgaagaagttggtcattcatgggattgtttctgaggctaagtctcatgaagaatgccagatgttagccaat

SEQ ID NO: 20868 - DNA, 815 bp, Glycine max
cttggtccgcagcttggtcagcttaagaatttgcagtatttggaactttacagcaataacattactggccctattccaagtgacctggggaatcttactaacttggtgagcttggatctgtacctgaatcatttcactggcccaatcccagattcattgggcaagttgtcaaaattgcgtttccttcggcttaacaacaacagcttgtcgggtcctatccccatgtcactgaccaatattacagctctccaagttctggatttgtctaataatcatctatcgggagtggttcccgataatggctccttctcattattcactcctatcagttttgcaaacaacatggatctatgtggacctgtcactgggcacccttgtccaggctctcctccattttctcctcctcccccttttgtccctccacctccaatttctgccccagggggtaatggtgccactggagcaatagccggaggtgttgccgctggtgctgctctattatttgctgcacctgcaattgcatttgcctggtggcgtcgaaggaaaccacaagaatttttctttgatgtgcctgctgaagaggatcctgaagtccatctgggacagcttaagacgttctcactacgagaactgcaagttgcaacagatagtttcagtaataagaacattcttgggaggggaggatttggtaaggtgtacaaaggacgtttggcagatggttcattggtggctgtgaaaagattgaaagaggaacgcacaccaggtggggagcttcagtttcagactgaagtagagatgattagcatggctgtgca

SEQ ID NO: 20869 - DNA, 358 bp, Glycine max
ttgaacactttaaatggtcccataccgactactttgggcaaacttgcaaaactacgtttcctgcgtctcaataataatagcgtgacaggaggcatacccatgtctttgacaaatgtttcttcactgcaagttcttgatctctcaaataaccagctaaaaggggaagtcccagtgaatggttcatttcctttatttacccccatcagttatcaaaacaatcctggcttgatacaaccaaaatacccccccttctcctgtttctccaacaccaccagcagcttcttcaggtaacagtaatactggagctattgctggaggagttgctgctggtgctgctctgttgtttgcagccctgcaa

SEQ ID NO: 20870 - DNA, 142 bp, Glycine max
cttactttacttggttgctcattcttgttgtccacaggtcataaaaaagcgatgtaaatcatgaaaaccgtacaaaaatatacacgtaggtatgtgtagatatattattctcttgtaatatcgtggatggatgattggttgt

SEQ ID NO: 20871 - DNA, 960 bp, Glycine max
atcaccttcttctcttctctgcttttccactccttctcctcactcacccctcccttttatttccattgttattctgcctaagcagtttcttccaaacttccttttacatttccaatttctctattctatcaaaagggtttgaactttgaagggaaaggaagaaagatatgatgacgaaccaaaatgtggtgactcatgaggttattaacacgttgattgccgtggcagcttccatttcaaactcaaccgcgttgccaagtgcaacagtgccagaatccatggctgtgcttggtgggttttgggggctgccccataataaaaatcttgtgaaaaggttggaaggagccaaagttagtgcatggattgattcaatgagagcttcttccccaactcgtgccaaatcagaaagccaagaaaaaagatcttggattctttatcacccttcagctctgaacacctttgaacagatagtatatagtgccaaaggaaagcaaattgtagtttttcttgactacgatggaactctctctccaattgttgcagatccgaataaggctttcatgactagaaagatgagagcaacactaaagggtatagcaagacattttcccacagcaatcgtgactggaaggtgcagagacaaggtatataactttgtaaaattggcagaactttactatgccggaagccatggcatggacatcacgggtccaacaaaaagtccaaagtccaaggcaaggtaataataataaagcagtgctgttccaacccgcgagtcaattcctgccaatgatcgatgaggtgtacaagatcttgttagaaaaaacaaagactgtcccaggggctaatgttgagaacaataagttttgcttgtccgtgcactttcgttgtgttgacgaaaagagttgggcagcgttggcggagaaagttagattggtgctcaatgattacccacaactt

SEQ ID NO: 20872 - DNA, 407 bp, Glycine max
ctccgccatcaccgccgatccaaacttctccgcagtgctcgccaccgccatctcctccatcataggcagtgctcataattcaaacaacaacaacagcaacaacaacacaagccggactaccattagcagcttttcaggaaactgaacattttctttttgggttcaattttttggttaatattgttattattccttaaactttttatttttgtacatgggtactataagggaaaatgaaaccataaatgttcatattctttttagtccatgtcttgggagggatatatatgatatattagatcagaaaaaaatgttttttgcatcaatctctctttgaataattaatatcgttgtatatttgatgaaaaaagccctctacggagtcacttgacacaatgtccttaaga

SEQ ID NO: 20873 - DNA, 426 bp, Glycine max
aagttactcaccttcaccttcaccttcaactgccaactgcaaacatctaactactttcaggttcacttagccgagaatcagagactaatcactagagataccgagacctacttttcctcacatcaccaccaacatgcgttccagcaacggtacatcaagcagcagggcctccaacggtaacacagggcgccaccctgtttaccgtggagtgaggcgtaggagtagtggtaaatgggtttctgaaatccgtgagcccaaaaaacctaacaggatttggttagggacatttgccacccctgaaatggctgctattgcctatgacgtggcagcgcttgctcttaagggtaaggatgctgagctcaacttccctaactcggcttcctccctccctatccctgcatcatctgcagctcacgacattcagat

SEQ ID NO: 20874 - DNA, 296 bp, Glycine max
ctcaccttcaccttcaactgccaactgcaaatatctatcttctttcgggttcacttgaccgagagtaagagactaatccctcgagatactgatactgaaacctatcgttcttcacatcataaccatgcgttccagcaacggtgcatcaagcagcagagcctccaatgctaacactgggcgccaccctgtgtaccgtggagtgaggcgtaggagtagtggcaaatgggtttctgaaatccgtgaacccaaaaaacctaacaggatttggttagggaatttgccacacctgaaatggc

SEQ ID NO: 20875 - DNA, 525 bp, Glycine max
aaaaaacatgaacgatcgatgagatatttcgaaatatagtgttggacacccagttagcaattagcatagctatgactgtgattttaccaaccccgaccaaaaatctcataaatttcgcggtcagcattttctgctacggttttgcattcctaaccttgaactttaggtctcattgttgaatttttcattttcagctttcaccacaaccctttgaagctctgcatcctctaatggctctctccacaacatttatgcccccttcatccccaaaattgaacctttactccaaaattcgaagacccttttaccctcactctgtcagattccttaaccccctaaagattcgggcttcaactactctggattattccaacgtctctacgaacgacaaatccccccctttgaagactagcaattggcaatggaaattcaaggacaaccttataaacatttattatgaggagcatgtaaaggagagtccggagccttcccaaaatatcttgatgatgccaaccatttctgatg

SEQ ID NO: 20876 - DNA, 377 bp, Glycine max
gatagatgagatatttcgaaacacagtgtcggacacctagttagttagcatagctgtgactgtgattttaccaaccccgaccaaaaatctcaccaagttcgcggtcagcattttctgctacggttgtgttcctaatcctaaccttgaactttaggtctcattgttgaattcttcattttcagctttcaccactatcccttctaatggctctctccgcaacatttatgcctccttcatccccaaaattgaacctttattccaaaattcgtagacccttttaccctcactctgtcagactccttaagcccgtaaagatttgggcttcaactactctggattattccaacgtctctaccaacgacaaatcctcccctttg

SEQ ID NO: 20877 - DNA, 425 bp, Glycine max
tatcgagcgattcggctcgagcaatcatcctgcaaattgacaaaaaaactcaacatgttactacaagtgcccttcgacattctctacaggatagactaagcgagggttcatctggtaggagccgtgatgaaatatatctcaaactacgtaccagtactgcgcctccattgaaattgattgacttgcctggattggaccagcggatagtggatgacaaaatgatcagtgaatatgttgagcacaatgatgctattttgctgctagtagtccctgctgctcaggcgccagaaatttcaacatcacgagcccttagagtagcaaaggagtatgacgcagaatccaccagaactgttggcgttatcagtaaaattgatcaagcttcttcggaaccaaaagcccttgcagcggtgcaggctctcctattg

SEQ ID NO: 20878 - DNA, 438 bp, Glycine max
gacacagttgactcaagtctcattggatatgcctggcacctttggagtgagcagagagtaatggagcttgttgatccttcccttggtgattcaattcctaagactaaagcgttgaggttcatacaaatagggatgttatgcgtgcaagattcagcatctcgtagaccaaacatgtcatctgtgttgttgatgctgggaagtgaatcaacagctctacctttgcctaagcaacctttgctcactacttccatgaggatacttgatgatggagaatcttatagcgaaggccttgatgtgtcaaatgatttgacagtttcaatggtgacaacagggagaatagaagtgttaattacattttttggtttttcccattctgtttagctttgtttagactcttttcaatctacgtaagttcacagcaaaaagttttccttttaa

SEQ ID NO: 20879 - DNA, 611 bp, Glycine max
  unsure (1)..(611): unsure at all n locations
gggtatgggtattttgaaccttagccgaaacgggttttcgggtaccatacccgatgtttttgggtcgggttcttattttatggtacttgatttgtcgttcaataacttttcgggtcggatacctggttcgttatccgcatccaagttcatggggcatttggatctgagctacaaccacttatgtggaaccatcccaattgggtctccgtttgaacaccttgatgcggcgtcgtttagtaacaatgattgtttgtgtggaaaccccttgaaggcttgttgatgggtgacccgaataagtacgtattgggttgttgtcggtgaatattccaagatataatgatttggttatagtgaaggagcccaagtgtgattttcatttgatgtgatagtattttgtcatgtgaattgtgatgtaatataatatatttagggcaagtgttgaaatggacaaaaagttatgagggtgctcctggtggctgtgcatataagtgagcataggtcaagagagttctgaatatgctagtgttgcatgtgggctttcggagttgcatgtgagttaagagctggactacgntgaaagattgtgataaaaaaaaaaaaaaaggggcggc

SEQ ID NO: 20880 - DNA, 669 bp, Glycine max
tttttctttcattttcccaccacccaaacaaaccttttccttttccatctgctttctcttcgcctttattgattctttttactttcactcttgttccttttaaattcctcgcgacacaaaccaatgtaaacggaaaacgcagaatcgcaactcacgagagtcacatctacgccatgaacaaatcgcagtcgaagaactccaagtcctcgactcagttcgactcgccgctcagcttctactccccgatgcacggggacggtaccgagtcgccggagtaccggtcgccggaaaactggccggagaagcgcgacaactccatggccatcgtgaccgccggcaagctcaagcagttcacgccggagaagcgcgcagagcaccggaagccgccggaaaatccgccgtcgacggcggtgatggtgttcaacgcctcgtcggcggaggaggctcagaggccggcggcgaaggcggctccggtgatcggaggagaacggagatcgatgtcggcggcgacggacgagacggttagcaaggcggcgctagggttccggctgagcgaggttgtcgtgtgtctgatttcgttttctgttatggccgcagataagacgcaaggttggagtggtgattcatttgatcgctataaagaatataggtattgtttatctgtgaatg

SEQ ID NO: 20881 - DNA, 411 bp, Glycine max
ctttctttcattttcccaccacccaaacaaaccttttccttttccatctgttttctcttcgcctttattgtttttttttctttcactcttgttccttttaaattcctcgcgacacaaaccaatgcaaacggaaaacgcagaatcgcaactcacgagagtcacacctccgccatgaacaaatcgcagtcgaagaactccgagtcgtcgactcagttcgactcgccgcactgggacggcaccgagtcgccggaaaaatcgccggagaagcgcgacaactccgtggccatcgtgaccgttggcaagctcaagcagttcacaccggagaagcgcgcagagcaccgggaaccgccggaaaatccgccgtcggcgacggtggtgatgttcaacgaccaggcggcggaggaggatcag

SEQ ID NO: 20882 - DNA, 391 bp, Glycine max
ctctaccattcccacaaaagtcttaaacccattttccatttctacaaaccctatctctcttcttacctaatacatacaaatatctcaccaagtaagttttccaaccttcctcaagtacgtatatatctctatacaaacactttgggagcaaagtatagctatgagattgtagattactatataatcataaagaaccatttcaagtttgaattcattcattttattcttttctcaattcatcaacaatgacccttatgaaaaccctatggaaatcaatcttcccccgttgttacaagggtgaatatcccttccaaagccaaagaaagtggtggctacaaagccaaattcttcacacagaatttctgtgacggatttgagttatccaagcacg

SEQ ID NO: 20883 - DNA, 1314 bp, Glycine max
gtagccggtagcattttcagcgagatttagctgtatgcgcgtgaaaagcacgcaggaaggagcccgtgacggttctgatcaatcgctgtgcagtggtaacctgctttgtgatgtggtggaaggatcttcttccgtcttggttctcgaatcccgagccctgcactgctgcttggaccatcatcacctcagcatggctatagctataatctagaggcaatgaatccttctctcacttcttcttcctcaaccttgtcgtcttcttcttcgtcctggttctccggaatcgttcgagccggccgttccaacagtgtcaaaatgtccaataactccgccgttgcaccctcctccgacactgccggccccgtcgttcgcaaaaatcagttccgaggggttcttttcaagtacggtcccaatcctattcaggttgcatttaagactggtgattataagcggcaagtcatttttattggtggattgaccgatggttttcttgctacttcatacttggaacctctggcaattgctctggaccatgagaattggtcattagttcaattccttatgtcatcttcatacagtggatatggcacctccagcttgcaacaagatgctaaggagctggatcagctgattaattatgtaattaacaaccaagactctgaaggtgtggcattacttgggcatagtactggctgtcaggatattgtgcattacatgcgcacaaattttgcttgctcccgagctgttcgtgctgccatctttcaggctccagtcagtgatccggaatatcaagctacactccctcatacagcttctatgattgacttggctgctaagatgataagtgaaggccgaggtctagagttaatgccaagggaagcagatcctagtgccccaataactgcctatagggaaaattccattgaacagtgctctggattcaaaaggaaaatgcaattgagagctgagaataaagaaatcagaggagataaactccacgaccctgtggcaggaggcacccaaaactgccaaattgatttcctacctctcatttcctccctagtcccttgaatccccccactcaacctctaactttaccccaatgctttcatcacttcttaccatgtattcatgtttgttacaacatatgtaaatccctttttgcccttaccaatgtttgagtttctacataattcctagtttactttttttagttgatcccttcaaagaatggtgttgtgtgcatatttgtcagcaacccagaaacagagaaagataaataatacttttgtactgtatattgaattgaattac

SEQ ID NO: 20884 - DNA, 322 bp, Glycine max
cggctcgagtgcgaacagtttgcagcatagcactatctcgaaattgttcattttcctctaatctatggatcccgaaacagcgttagaacttgtcaagcacggtgtcactctcctcttactcgatgttcctcagtacacccttgtcgccgtcgatactcagatgttctctgtggggcctgcttttaagggtattaagatgattcctccaggcgttcattttgtgtattatagttcatcaagcagggatgggaaggagttctcatcaattattggattttttattgatgctggcccttcagaggtaattgttcgtaaatgggat

SEQ ID NO: 20885 - DNA, 410 bp, Glycine max
gcatttaccatttacaaatgtcttctccactggaaatcatttgaggctgaaagaacaagtgtatttgatcgccttatccagatgattggttctgcaattgagaatcaagatgacaatgatcttatggcctattggctgtcaaatttgtctgcactattgtttttgctccagcaaagtctaaaatccggtggtgcagctgatgccactcctgtaaaaaaaccaccaaatccgacatccctctttggaagaatgactatgggttttcgttcatctccttcttctgccaaccttcctaccccaccattggacgttgtacgcaaagtagaagctaaatatcctgctttgcttttcaagcaacagctcacagcctatgtggagaaaatatacggtatccttcgggacaacttgaa

SEQ ID NO: 20886 - DNA, 182 bp, Glycine max
tagaggcatagtaaggcatatatattttgttcagtgtgaacagttttccaaatgatagtttggataagtattttgtttctatttatatcttctgagaaaaatctttgtgcgttctagcttaagattttcgaaacttctatgcatcctcttctatttgaatgtgatgtttgctaattatggtt

SEQ ID NO: 20887 - DNA, 424 bp, Glycine max
aataaacttatatattcattccgataaagtaaacgtagaagaaaacattttatcatctaatctgaaattgtgctctcaattgaagcaatggaagtaacagctgctccagtgccttatgtccaagaaattgcaaaggaggcattgaccatagtgcctgagcgttatgttcgaccagttcatgaacgtcctatattatctaactctacacctttacctgaaattcctgtcattgacttgagcaaattgttgtctcaagaccacaaggagcatgaactcgacaggcttcactatgcatgcaaagaatggggtttctttcagctaattaatcacggagtggactcttcattggtggaaaaagtgaagagaggtgctcaaggattattcgatcttccaatggaagagaagaaaaagtttgggcagagag

SEQ ID NO: 20888 - DNA, 579 bp, Glycine max
cagcaaaggcccttggtgcagttggatttgttctttgtgttgaaaacatttccctaggaacaaaatttaatccagttcctgttggccttcctgggattctcatcatagatgtcagcaattcaaaggaactgatagattattataatatcactacaccaagagactggactgggcgtgtaaagagtttcgaaggtaaaggtaaaatcggtgatggtttgatgcctattctgcataaatctgcaccacaggtagcattattctctgctcgagggccaaatataaaggacttcagcttccaagaggcagatcttctcaaaccagatatattagctcctggttcattgatttgggctgcttggtgtccaaatggaactgatgagccaaattatgttggtgaagcgtttgccatgatatctggaaccagcatggctgcaccacatatagctggaattgctgctcttataaagcagaagcatcctcattggagccctgcagccattaaatcagccttgatgacaacatcgaccactctagacagagcagggaatcctcttctagcccagcaaacttctgaatcag

SEQ ID NO: 20889 - DNA, 642 bp, Glycine max
tccacgcgtccgcccacgcgtccgggaaaggcctggcgttgcagctaatgcaactttgtcggagcaagatactaggaaggggtggtctagtggatctcagcttcctccagtagatgattcttctgccatagcagaagatgcatttgcctcttcgacttttcgtcgcacacccccgggtcaggtacctggatcccaaaatcaaatcaatcatagcctgggctcctctcaacctcatgatgcttggaagatttcacatcatccgtctaacatttttagtaatagggggcgagcaaggaatcttatgatccctcctatggacaacattcgcaatacagataataacccgtattgggttcgaccatcaatgtcgaggatggaagctcggccatcagttttgccagcaccttttgaaatgaggccttctgtaaatgtgaatgtaactagaccgcccatcataaatccaataaatccattgcaaaaacatgttaggagtcagttcaatgcaataaatactagtaatcctattgcaaaccatgtaaataaatcttcatttatgccaaaacagtcatttgacagtgttgagaacaaggatgcaagtatttcaaagatacatcagttgcctaatcagcttcctggagtaat

SEQ ID NO: 20890 - DNA, 370 bp, Glycine max
ttttaatggtgttatcaggtctttgagaagcttggaccaagcttatttgattttctaaagagaaataaatactgcccattccctgtggatcttgttcgggaatttggacgtcagcttttggaatctgtagcatatatgcatgaactacgcctaatccacactgacctaaagccagaaaatatacttcttgtttcctctgaatatgtaaagctccctagctataagagaatttcctcagatgaaatgcaattcaggtgcttgcccaagtctagtgctattaagctgattgattttggtagtactgcatatgataatcagaatcatagctccattgtttctacaaggcattacagagcttccgcgattattc

SEQ ID NO: 20891 - DNA, 362 bp, Glycine max
ggctgagacgaaccagacccaacaaacgtgattaccgagttgttatagctgttgatgattcacatagtatgtcagagaatggctgtggtgacgttgctattgaggctttggttacagtatgtcgtgctgtttcgcaattggaaatgggcagcttggctgttgctagttttggaacgaagggaaacatcaagttattgcacgactttgacaggccctttaccggagagtctggtgtcaagatgatctccaatttgacattcaagcaagaaaatactattgcggatgagccagttgttgacctgttgaagtacttgactaacaagctagatactgcagttgcaaaagctcgacttccatctgga

SEQ ID NO: 20892 - DNA, 448 bp, Glycine max
ttcaaagttagcattgcagtacagcttgttaaataaggcaatcacatcagtgcttgtaggcatgaagtctgttgaacaggtggaggaaaatgttgctgccgcaagagaacttgcaacttctggaattgatgaagagactctgtctgaagtcgaagctattctgaagcctgttaaaaaccagtcgtggccaagtggaatccagcagagctgatgtttattgtaccacctggtattacctatggagacatccattcctggtgttgacaatgttcttcactcaaataatccgattcaataagagaaattgctttgaaagtattaggatccactgtctcaataatttttgtttgtaatctagagtgtccaataatacatttctcactagaatgctattcatcttcggcttctggagagtaagagcctgtcttctaggtgaacccgtaaatag

SEQ ID NO: 20893 - DNA, 365 bp, Glycine max
  unsure (1)..(365): unsure at all n locations
cacgcagtctcgcctcgcgcagtctcttctccgttttcaaacttcattagcacacagacacagcttccgccaccactcggacatggcgagcgagggcggcaacaagagcttcgcgcggcgtgatcgtctccgcgagatcgaatcgaaggtccagaaatggtgggaagagaaagatgtcttcagagccgaaccgggcgagaagcccccttcttcgcccggcgagaaattcttcggcaacttccccttcccttacatgaacggctacctccacctcggccacgccttctccctctccaaactcgagttcgccgccgnctaccaccgnctatgcggcgccaacgtnctcctccccttcgccttgcact

SEQ ID NO: 20894 - DNA, 401 bp, Glycine max
attaacattctcaaaagaactaatctctctctctctctcatttgacatggctgcttccaactcgaccctccactcacccaccactcccaacaccaccttcgtccaagccaacccttccaacttccgcgccgtcgtccagaagctcaccggcgcctccgatgacccctccgcccataaactccccctcactctccccacgcgcctcgcggcagcagcagtcccaccgccccgcctccgccggcgaggtgatcggccccaagaagccgaacttcaagctccacgagcgccgcaacgccgccgccaagaggctggagctccccatcgacacagccatgagcatgatgatgatgagcgtctcgcccacgtcctcgctggttcgaagcagaacaacgacgacaacg

SEQ ID NO: 20895 - DNA, 381 bp, Glycine max
ccagtattggagatggcagccacataactgcaatttgaagagatggaacgtgaaagaaatgtgggagaagttgagaggtaaaaggctaatgtttgttggagattcactaaatagagggcaatggatatctatggtatgtttgttacaatcagtaattcctgctgataagagatcaatgtcaccaaatgcccatctcaccattttcagagcagaggagtacaatgcgactgtggaatttctctgggctcctcttcttgctgaatctaattctgatgatccagtaaatcacagactagatgaacggataattcgtcctgatacggttcttagacatgcatcactgtgggaaaatgctgatatacttgtttttaacacatactt

SEQ ID NO: 20896 - DNA, 523 bp, Glycine max
tcttactccatcatgtaccctaaacaacctctgtacgctgtcctttgtgtctttggctgcacttgttatgtccatgatcttacaccaggtaaagataagctttttgctaggtccttgaagtgtcttttccttggttactctcgtcttcaaaaaggttattgttgttttttcctcaacttcaacagtatattgcctttgcttatgctaccttctttgagactactatgggttgtcgttggatttatacaatgaagatcagaccaaatggtagtattgatcgctataaggctcacttggtggacaaaggatacactcagatttttggccctgactacagggacaccttttccccaatggccacaattgctcatgtccatcctcttcttgctatggctgccattcaacattggtctcttcaccagctaggcataaaaaatgccttcttgcatggtgagttgcaagaattttatatgtctcaaactccaggttttatagtttcaggtgactctcggttaatttgttg

SEQ ID NO: 20897 - DNA, 500 bp, Glycine max
ctcatcagtagcctctactccacctagatcttgtatttggtttgtatgggagtatgtttgaagctatagcgcctgtggttgtacacctgtatttctgtgcagtgtgttttgtgattttgttttagaataaactgcaaaattgatcttccaaagattatggcatcacctcattaatgtttttaagatttttgttatcaaattagtcccacaaatatctaaaatgttcccacatttgttcacatagaggactaaagaagtggtaacacaaaataatttagtatttgatttgtatctctgtgggattgatttgttgaccaaaatctttggaggaccagttcaaggacttactctatcgatttatactttcagtttcaggcagtcaagtaatactgtatattctgttgtctatattgtggatcatgcataactaaactatcaagtatccctgtatatacaagttgtctaaattgtgaaagttacatatacaagaaatttcctaa

SEQ ID NO: 20898 - DNA, 492 bp, Glycine max
gcagcatagccacgttgtggcggccacgcgccaaacctgaaaaagaggaaatgctgtaatatcccaaaacaacgggacagagatagtttatcttcgatggcttccaaggcgatgagcgtggcagcggagaagatagcgacggcggcgcgacgccaagccgtgtcgctaacggacgccgccgcctcgcgaatacggcagctgctacagcagcgtcagaggcccttcttgaagctgggagtcaaggctcgcggctgcaacggcttatcctacaccctcaattacgcagatgaaaaagggaagtttgatgagttggttgaggataagggtgttaagatattgattgatccaaaggcccttatgcatgtcattggaactaaaatggattttgtagatgacaaactaagatcggaatttattttcgtcaatccaaattctaaaggtcagtgtggttgtggtgaatctttcatgacaacaggcagtagtggatcttct

SEQ ID NO: 20899 - DNA, 564 bp, Glycine max
cggacgcgtgggcggacgcgtgggcggacgcgtgggaaattattgaatcctttcattcattcccaattccatggcaccttttctcattaatcacctctttgttttccttttttgtcttcgagccataaacacactttccaccactgtttccatctctgaaacttccaattccaaccaaacacttatctgtgtcctgcaacatccaaaccaacaaggacaatcaaatctcaactgtaccagcttccctcaggctcaggctattacacttgatgtcaatcccaatgtttcttactctcagattgtgggcggcaacgggttcgtgtgtgctttaggaccgttgtcttcttccatctccgtcatgggctgttggagattctctgccaatgctacatacaatgttccgtacaaacgcatctaccgtggacccatcgtggaagatatcgacagtggcaactctcacgtttgcggtcttgtaagaaaaggaaataagaacaatagccttgagctggagtgttggcaatggcatgggttcaattcaagcatgtccatgcccatgtcaagcgt

SEQ ID NO: 20900 - DNA, 1328 bp, Glycine max
gtcaactgattcctagcaaacatgctcgagagcttaactttgacatggaggatttggacataccatggagtgatcttgtcctaagagagaaaatagggtcaggttcttttggaactgtacatcgtgctgagtggaatggctcggacgttgctgtgaaaattttgatggaacaggattttcttgctgagcgcttcaaggaattcctaagggaggttgcaataatgaaacgtttacggcatccaaacattgttttgtttatgggggcagtcactcagcctcctaacttatcaattgtcacagaatatttatcaaggttgtactcctctacatgttcctcatctttttccctcaaagagggaagtttttcaaggctatggataataggatattttgaccttgagattctaagagttcttgacctaagtgcaggggtagcttatataggctgttgcataggtctggtgccaaagaagtattggatgagcggcgtaggcttggtatggcttatgacgtggcaaaggggatgaattatcttcataaacgtaatccccccattgttcatagagatctgaaatctccaaaccttcttgttgacaagaaatatacagtgaaggtttgtgattttgggctttcacgtctgaaggccaatacgtttctctcatccaagtcagctgctgggactcctgagtggatggctccagaggttcttcgtgatgagccatcgaatgagaagtctgatgtttacagctttggtgtaatcttatgggagcttgcaacattgcaacagccatggattaatttaaatccagcacagggtgtggcagctgttggctttaaggggaaaaggctagagatcccacatgatgtgaatcctcaagtagctgcactaattgatgcttgctgggcgaatgagccttggaaacgtccttccggtgccagtattatggattctttgaggccattgctcaaaccccctacacctcaacctggtcgtccgagcatgccattactgacctgaatggttggaacgccaaggtgcttttcgtgcacatatgacaggattctattggtctttgatgtctaacaagatttcactgctttagttgtccctagagtcaattgtatatttctttaattcaggtttaaggaatactgatttccaacgcagagcatggatactccctctttattgttccaaacaaaattatttgattaggtgatcttgtatttttaccgagaaatgtttcactttttcttctttcataattttgtatgtaaaaaaacattcccattgtaattacattcagttaatgataagcagctttgcc

SEQ ID NO: 20901 - DNA, 653 bp, Glycine max
aaatcctgcaggtggccaaagtaacatcttatttggtgaagcacccgttgagaagacggcaaagaagatacataaccagaagttcgcggagctgacaggcaataatattttccaaggagatgttcctccaggctcagctgagaagcctctgagcagggctaagctcagagaaatgactggcagtgacatatttgctgatggaaagacagaaatcaaagaccctgtgcgaggtgcccggaaaccccctggtggagagagcagcattgccttggtttaagttatttttaacttacaaaaaatactagcaatatattctctaatatattttttctgacatactttctattgatagaaattcgcgtgagtcttgctaaaaatgtgagtctcatccacaaacaagtgaaactcacatgaatttcagtcaatgaaagaaagcagataaaaaaatgtattggaaaatgtgttgttagctttcctctttaacttatccccctttgacttaggcattctataaattcgtctgaacttccatgtttttctgtagaagggtcagtgtgttcgattatcagcattgtaagtttcaactttcaatgaacgtggcataacctttacatttgaatgatgaaacgcggtttttgtgttcatttatgcct

SEQ ID NO: 20902 - DNA, 483 bp, Glycine max
ctccaagtttccaacaaaaaaaaaacatgagaaggagccttgtgtttcaacagcaatactatgctgatgatggcacatggatggagactcatcaggctcagcaacatggctatgccttccacgaagagtcgtcttggagctctgataacaactacggccacaagcgattcccagcagccatgcacatgaacaagcttggtgcttttgctgtggactctgatctctcaatgtcaaaacagaagcataccaagttaggaggagccatgcgcatgaacaggcttgctgcttttgctatggactctgacatctcaatgtcaaagcaaaggcatggcaagttaggaagaggcatgcacatgaacatgaacatgcttggtgattttgctatggactctgagatgttaatgtcaaagcagaagcatggcaagttaggaggaagctccggcaataatatttttcaagaaggcatgcacagtgaccatggct

SEQ ID NO: 20903 - DNA, 531 bp, Glycine max
gatcagagtacatcctaaaagccttggagaaaactgcaagtggttggagatgtttgaagagaccgatgttgtaatgttctcagttgccttatctgactatgatgagtacactacagacagtaaaggagtttctaccaacaaaatgttggtagctaagaatctctttgaaaacataatttctcatcgaagcttccataacaaaaaatttctcctagtattgactaaatttgatctgcttgaggagaagattgaacacattcctctagcacaatgtgaatggtttagcgacttccaaccatttatcagtcccaatcagaagaaaggctgtagcaatggcaataataactcttcattagcacaatgtgcttttcaatacattgctgtcaagtttaagagattgttcctttccatcactggccgaattctctttgtttcactggttaatggattggaacctgatactattgatgaagctctcagatatggaagggaggttatggagtgggaaaaatgggatccctctattgtaac

SEQ ID NO: 20904 - DNA, 1075 bp, Glycine max
cacgttgaggttacagaacaacgcactctccggccacgtccccgacctttccgcttccctccttaatctcaccgtactcaacgtcaccaacaacgaactccgcggccacgtccccgattccatgctcaccaaattccgcaatgtaagcttctccggaaaccacgccctctgtgggtccaccccgctacccaaatgctccgaaacagagccagacacagagactaccacgataaccgttcctgcaaaaccgagctccttcccgcaaacaagtagcgtaaccgttcctgacactccgagaaagaaagggttgagcgccggtgtcatcgtggcgatcgtggtggcggtttgcgtggcggtgctggtggcgacgtcgttcgcggtggcgcattgttgcgcagaggatccacctctggttcggtggtggggagcgagaccgcgaagagaaaaagtgggagtagttctgggagcgagaagaaggtgtatgggaacggtggaaacttggatagagatagtgatgggacgaacactgagacggaacgaagcaagcttgtgtttttcgataggaggaaccagtttgagttggaggatctgcttcgagcttcggcggagatgctcggaaaaggaagcttgggaacggtttacagagcggtgctcgatgacggctgcaccgtggctgtgaagagactcaaagacgctaacccctgcgagaggaacgagtttgaacagtacatggatgttgtagggaagctcaagcaccccaacattgttagactcagagcttattattacgctaaggaagaaaagcttcttgtctatgattatctccccaatggaagcttgcatgctcttcttcatgggaaccggggaccaggaaggattccgttagattggaccacgagaataagcttgatgttaggtgcagctagaggtttggcacggattcaggcggagtatagcgcatcagagatacctcacgggaacgtgaaatcttcccacgtgcttcttgacaaaaaccgcgtcgctttaatatctgactttggcctttcgctgcttttaaaccctgttcacgggattg

SEQ ID NO: 20905 - DNA, 390 bp, Glycine max
aaaaagcaagagttaccactcagtctgtactatccacttacggttcccaacatatgaacaacaacgccgccatgtagaacacaaccgcttcctttttcttcttcagaaactcttctctttctcattttcctcttctttgaattcaaagggctctagatggatacagctgaccaaagaaaaggcaagtatgctcctaccagggatacagagaacccactgttgggaaaatttgacaagccgcttccatgttttggctgtggaattggatggttctctcttctgctaggatttgtttgcccgccgatgtggtattatgctacaattctctatttcggaaattactatcataaggatccgagagagcgggctgggcttgctgcttctgcaatt

SEQ ID NO: 20906 - DNA, 994 bp, Glycine max
  unsure (1)..(994): unsure at all n locations
ctgcaaacaacatctatggcctttgtttcactacatgcttccactgaacatacgacttgtgcggtcgntttgataggtccctgtggcaagcttatctctctgttcacaagatatttgcggataagtgatggaagtcattagccctgatgatgactttgtgtgggttcatgactaccatctgatggtacttcctacatttttgagaaagagatttaacagggtgaggctaggattcttcctccatagtccatttccttcgtctgagatataccgaacccttcctgttagggatgaacttcttagagctcttctgaattctgaccttattgggtttcatacttttgattatgccaggcatttcctctcctgttgcagcagaatgcttgggatttcttaccaatccaagcgtggctacattggccttgagtactatggaagaacagtaagcattaagattcttcctgttggtattcatataggtcagctccaatctgtcatgagtcatcccgagacagaaagcaaggttgcagagttaaaaaaacagttcagagatcaaactgtgctgctcggggtggatgacatggatatcttcaaaggaatcagcttaaaacttttggccatggaacaattgcttttacaacatcctgataagaggggcagagttgttctggtccaaattgctaaccctgcaagaggccgtggaaaggatgtgcaggaggtacaaagtgaaacttatgccacggtgaagaggataaataatgcatttggaaggcctggatacacacctgtagtcttgattgatacaccacttcagagttatgagcgaattgcttattatgtgattgcagaatgttgccttgttacagcagtgagagatgggatgaaccttataccctatgaatatatcatttgtagacaaggaaatgagaagatagatgagattttagggacagacctgcttactcaaaagaagagtatgctggtggtgtctgag

SEQ ID NO: 20907 - DNA, 989 bp, Glycine max
tttacattcatctcaagccatttgtctctcacatcaattcatgcttctcctctctttttgaacacacaacaaaaccagcgttaccaacagatccaattctaatcctttgaaattcactaaccccctatttctattctctcttagttccagtttttcactttgctagtgtcttctgcatttgcttccacagttgcttcgccaggaagaaataacaaaaggaaacaccttcttgcttttcctacctgattgtaaagaatctctcttttctcatttgggacatccctgttcactttctgcatcaactcgctgttggattttaatatttatctctgctatcaatattattaaggtctcacttctgggattctgaattctatgccccttggaccaaagtttcgtaagttctttgttgttgtgcatttcttttctttttttttttatccgtgggaatggaagaatgacaggaggtttacaataactcgtgcatccttcttaaccaacttaactagactcccttgacatttctttctagtttctcatttccatttctttagtgtaaggggattttttgttgtaaagtatggaattcgagacttcatatccaacttgttttatgtcaaattcaagttggttttctcaagaaggccaattcacagaatggacaagagaagagaataagaaatttgaaagtgcccttgccatatatgataaggataccccagacagatggctgagggttgcagccatgctccctggaaaaactgtctatgatgtgatcaaacaatacagagaattggaagaagatgtttgtgaaatagcagcagggaggagttccagttcctggatatcctacctcttctttaacattggagatggttgacaaccaatgttatgatgcatgcagaaagaagcctgcaactctcaggagttctgatcaggagaggaagaaaggggttccttggacagaagaggaacatagacgttttctt

SEQ ID NO: 20908 - DNA, 567 bp, Glycine max
gttgaatgagaatcctcctctttgcatgtcgtaatcgatcgcatcaacatttcaattctctttcctttccttttcctccttttctcgatctctccgtcggtcatcatcatcagacccaaacaaattctctacgcagatcgaatcaaagctcctccatccaattccgagatgagcactggcgaccttctcagcatcgaacctctcgaacttaagttcttctttgagctcaagaagcagatatcatgctctcttatattgtcaaataagaccgatagctatatagctttcaaggtgaaaacaaccaatcccaagaagtattgtgttcgtccaaacaccggagtagtcatgccacaatctacatgtgatgttattgttaccatgcaagcgcaaaaggatgctccggctgatatgcaatgcaaggacaagtttcttcttcaaagcgtaaaagtagatgatggaaccaccgcaaaggatatcacagcagaaatgttcaacaaggaagcagggcacgtggttgaggaatgtaaattgagagtggtgtatgtctctcctactcaacctccatct

SEQ ID NO: 20909 - DNA, 563 bp, Glycine max
  unsure (1)..(563): unsure at all n locations
gttcggctcgagggaaatttagttcaaggaactggtgtgagtgctgggacctatgagcatacttccatttcacaagaggctttaaaacccgaaccccctgaaattgctcaggaaaatcagtattcatttccatcacattctcatggttttaattatgaaaatgcccaacagccggaggtcccatttcctgtttcacagaccagctcacagaatcagaatcttgctcccttctctggtgtaatgcaggcacatacaaattctttgcccagtgctctgttgtcttcaccagttcaaacagcaagagaagatatcccatacttacccttccctgcaacacaatcgatgcctacaaaatatagtgacattgcttcttcaattggtggttccaccataaccatgtcagaggctctaagggctagcggcatttctgcacctcaacctaatgcacaaaccctgtctggtgcaggtgttgccactggacccacacttnctcagcaccttgctatgcatccctactcccaacctagtcttcctctgggacattttgctaacatgattagcta

SEQ ID NO: 20910 - DNA, 445 bp, Glycine max
cccacgcgtccggtccctcaccggtgtttctgagtcctgggaaagattttctcccttctacgtctttgcttcccctatgttcctgcaacagatgatcaactccaatttccgcgaacgataaatcaaaatggcacctttctttgttctgtttctattagcctcttcattgactcaagggtatgctcaatttcaaccaaaaaacgaagcttttatatccttgttgattacccaaaatggccttgactttgtgaaggagttgctggtgaacaaggcaatttcctcactggtctcacttcgattgccgaatattgaaaagactgcgaaaatcccagttgtgggtaatgtctacatggtgctctccaacatcacaatttatcatattgatgttccttcctcgcatgtcaagccaggggagacaggaatttccattatagcttctggggtt

SEQ ID NO: 20911 - DNA, 301 bp, Glycine max
gttgctactgcccttgccaagcaggacaaagaagaagtacagcatcacatatctgtcctgctttttattgggttatcttgtggcgttgggatgcttttgttctcaaggctatttggtgcatcactaataactgctttcactgggccaaagaatgcacacgtagtacctgcagctagcaattatgtgaagattcgaggcttggcatggcctgctttacttgttggatgggttgctcagagtgcaaggtgcaaatattcttggtatgaaagattccttgggacccttgaaagctttagctgct

SEQ ID NO: 20912 - DNA, 769 bp, Glycine max
aggtatgccacaggcagaagaactaaaagcccagtcaaagtaaaaagtaaagcagaaaatggcggcatctctgagatgcagaaacagctcctccctcctcctaactcgcttcctcaactcagcgagtctgaaggtggttgcaaaccgtagcctacgaagaactgcgagctcacccggacaaaccctacacttcaacggcggttttcatccatggctttttgggatcctccagaaactggagatctttctctcgcaacctcttggcttctctctccaactcctctccctcttccaattggaggacggtgatgttggacatgaggaaccacgggaaatcgacggagagggaactgaatccgcctcataatatggaaaatgcggccaaagatttggtcgatttggtgaaggctgaaggctggtcttggcctgaggttgtcatagggcattccatgggtggaaaggtggctttgcagtttgctgagagttgtagccgtggtgactatggccattctgctctgttgcctaaacagctctgggtattggactctgtccctggagaagtgaaccaagacaacagtaatgatgaagtccgaaatgttttagcaaccttgcaaagtttaccatcccaattctcatctcggaaagtggcttgtgggtcatctgatgggacttggttaccctaaggcactgtcagactggataggcaccaacctgaaaaaagttggtgatcatgagacatggatatttgatattcaaaatgctaaggaga

SEQ ID NO: 20913 - DNA, 338 bp, Glycine max
ctctttctcttccgaaccaaaaaaggagagagattctaatttctaaaatctaaaccatcatgaagaacacaaacaccaacacgaaactgatcctcctccatccttatatccaaaaacaaggaagctccaatcgcttgtggcttctagcattggtatcaatcctcaccctcgcttttcttgttaccctcatttccacaagagaatccaccttcatcaccactgcaacttcttctgtgactccctcttcaaataatgctccagtttctggttttggaagtgctcctttgccagccacagtgatcaacactctcctacactatgcatcaaaatccaatgac

SEQ ID NO: 20914 - DNA, 458 bp, Glycine max
  unsure (1)..(458): unsure at all n locations
tgcacgcgcacgtaagctcggaatccggctcgagcagcagagacagactcanctctttcacacaacgnagatacttngggagagagagagagaaagagattggctgtgctctgctactatggcgagcaacagagagagagaagaatcgctgacattcacaatcccttcgtcctcttcccattcttcccccatcaccgtctccgaccaactcgacagttacctcgccgaccccagaagcgcctccggaagcttccagaacgacggccttctctccgccggagaagccgccgccgccgccgatcccgacttcggtttctcccgccccgatttccgccagagcccccttgtcggcaccgtcgagttctaccgacgccacgtcttcctttgctacaagaacccccgcgtttgccaccgcgcatagaaaccgcccagtttgatcgcttgccgaggttgcttca

SEQ ID NO: 20915 - DNA, 582 bp, Glycine max
ctcgagccgttcgaagtgcgcgaagaactcgggttgctacaacatccagagatattgtagctgcgaatgaactgtctgtggcttccaactcattagctcacgcatcagtccaccatatatatcacttggaggaggctgatgagtttgcagatgaacatgttaccagggctccaaaaaatgggtgtggcattccttggaattggtcccgttctcctcctagaggtaaaacattccttgacctggctggaagaagtttgtcttgtggtttatctgactcaaggttgaagaaagggacatttactgccaatggaagaaatatttctgagatgcctgtggcatctgagcgctcaagctcatgtacgaagtctgatgcagaggcactgcctttactagttgaggcttctggatctcatgcaagcactgaaaatgcttgttgggatcatgactactctggggaactaggtctttttggtgataatttattcaagcatgatgttgattctgacctcgcttcagaagctagatctggtgatcagcgtaagttgagagggaatcgtcacagtagacaccaaagtttaacac

SEQ ID NO: 20916 - DNA, 412 bp, Glycine max
agaagagctatgaccgcgcatggcccccgtccgtaagttcggaattcggttcgaggacctcgtttaaaaagctagatctggtgatcagcgtaggttgagagggaatcgtcacagtagacaccaaagtttaacacaaaagtatatgcctcaaaccttcagagatatgattgggcagaatttagtggcacaagctctttccaatgcagttatgaagaggaaagttgggttgttgtatgtgttttatggcccccatggcactggaaaaacttcctgtgctcgcatatttgccagagctctgaactgtaattcttcagaacacccaaaaccttgtggtttttgcaattattgcgtagcacatgatatgggcaagagtagaaatataagggaagttggtccagttagtaattttgac

SEQ ID NO: 20917 - DNA, 614 bp, Glycine max
cccacgcgtccgcccacgcgtccgcccccgcgattcttctaagctctactaaaaaaagatacatagaaacaatcgaaattatttattattattaaagcaacatggttttgtcatggacaaaagggagagtgttccggcgtgccagaaagggtaaggagttgaaatattctggtggcgacatggagatagagattgcgatccccacccacttccggtgcccggtaaccttggacatgatgaaggaccccgtgaccgtttccacgggcataacctatgaccgcgacagcatcgagaagtggatcgagtccgggaaccgcacgtgcccggtcaccaaaaccgagctgaccagcctcgacgacatgatcccgaaccacgccatccgtaggatgatccaggactggtgcgtggagcaccgctcccacggcatcgaacggatccccactcctcgtatccccgtcaccccgtacgaggttgctgacacgtgtacgaggatcttgtcggcggcgcaacacggggacgagaacaagtgcgtggacttggtgagcaacattcaagcgtggggaagggccagtgagagcactaagagatgcatagtttctaacggtgctgcttta

SEQ ID NO: 20918 - DNA, 529 bp, Glycine max
gagccgattcggctcgagattttatttcacatttttccctttgtatatggtagttgatttctttttccttttttgtgtaggaagaagatcctggttggtattcaagagcatctaactccgttctagaccctgttgttgatgtgcaaatgaatcacaattccaaagttgagccagtaattgagaatgcaaacgcgtatccagagataaaaaccatttccactgaaaatggaagtcatgttggaactcaggataaggatgttgtcattgaaggctttggctcagttggagtatatgaccaatgggttgcacctccagtgtctggtcaacgtccaaaagccagatatgagcatggagctgcagtcgtgcaagataaattgtacatatatgtggaaaccacaatgggcggtaccctaatgatctccacgttctagaaatttgaagaaggacttctgggaagaatatagaacttgaggttgttgaatctactacctcatcctcaataacattcctttgggcgggacattctttg

SEQ ID NO: 20919 - DNA, 1656 bp, Glycine max
gttccctggttcatccatttaatgtgaaccaaacaaaatcacaaagcgtttttgcgttcttcatcttcttctacctttcgccaattcaggaatccccaaaaccctagatcgaacgctgccactaccgtttcgcgattctcggtggtggaaaatttccggtctctgttccgaaattcgaatatctgcgatttttcctttctctcgctctgatttcgtttgcagtttctagggtttctgtgtttctgatttggtatttcggaaatgggaagcagaaaggaagaagagaggaacgagaaaattatcagaggtctcatgaagcttccgccgaatcgaagatgtatcaactgcaacagcttgggaccacaatatgtatgtacgagtttttggactttcatttgtatgacatgcagtggaatacatcgtgaatttactcatcgtgtgaagtctgtgtcaatggcaaagctcacttcacaagaagttgatgctcttcaaaatggaggtaaccagagtgcaagggaattatatttgaaaaattgggacttccagagacagcggctgccagataacagcaatgttgataaaataagggaatttataaggagtgtgtatgtggatggaagatatgctgggacgaagtcttcggaaaagcctccaagagatgcacagagtcctggaattcatgaagatgagattaggcgtgccagttcttatcattcatattctcaaagtcctccatatgattatcaatatgaggatcggcggtatggaaaacaagtagctgcactgaccaggaagcctggttcagataaagctcgctatgaagggaagatgtctagtattatctacagtcctggccgcttcagtgatcacgcgtatgatgacagatttgcgaatgagggatctggtccacgaatttccgacttttctgtgtctagtggtggcgaacaattcaaatccgatgttcagtctcccaactttcataaggatatcaagattagcagtccatcctatcagcggcgttctggttctggttctagttcaagtgaagatgtgtggtatcaagcaagaaatgcatctttggaaactaatgccaatgccaagagagatgcagatggaattcgtcctccacagagaactgtgtcagcacaatcaagagacaacaaatttccatccttgagatcttataattctggcagtttagttgattttttctcagaaccagtccaagcttcagaaccacttcagaataaagcatttggcattcccagaccacctggtcctacaagatctgttagcatggacctctccaaggcaccactggaatcagcttcatctgttgatctttttcagttaccagcagcaccatctcaagctccaacattggatttgtttcaatcatctctttcatcggcagatccatctttcaacgagaatcaacttagtcaaacatcccatcttgcatctattgattttttttccgatttttctccgcagccttctactgtaacctcagatgggaaggcactggaattatctgtccctaaaaatgaaggatgggcaacttttgatatgcctcagagaacctcctctactgcacaagtggaaattccaaccactgtaccctcaaatgctaaatctttagaagaaaatttgatc

SEQ ID NO: 20920 - DNA, 360 bp, Glycine max
ggctcgtctttctttctgctttgtccaataactcagaacatgcccacttggtggggtaaaaagtccagcaagagcaaggaccaacaaccgcaagaagaccaccaccacccccctcatggcggaggaggaggcgccgccaccagtgtccttaacttcaatttcaacaagctcaacaagcccaggcccgacaggccctccaagagcttcgacgacgtcgtcagaaactcccctcgctgcagccgcgatttcagttcctccgccgccgccgccgtcgaccaaggcctccccttgcctcgcccctctgtctcctccacgcaaagcttcggcatcgagcaaggccttgttttcggatctggctct

SEQ ID NO: 20921 - DNA, 511 bp, Glycine max
atttctcttgaagcctctccaatttgccttcacttcttaataataataataatattaattcctcttttcttgtaccaaaccaaattgatattttgaactcaatggaaggtagcacaacaagctctgaactccctcctggctttaggtttcacccaacggacgaggaactgattgtgtattacctttgtaaccaagccacctcaaagccatgccctgcatctatcatcccagaagtggatctctataagtttgatccttgggaattgccagataaaacagaatttggagaaaatgaatggtatttctttagtccaagagacaggaagtacccaaatggggtgaggcctaaccgagcaactgtgtctgggtattggaaggctactggcacagacaaggcaatctatagtggatctaagaatgttggggtgaagaaatctttagtcttttacaagggtaggccaccaaagggtgccaagactgattggatcatgcatgagtatcgattggctga

SEQ ID NO: 20922 - DNA, 356 bp, Glycine max
ctaaggaccttctccaagtccaccccaattcctatgcattggttgttagcactgagaacatcactttgaattggtactctgggaatgaccgatcgaagcttgtttccaattgtttgttccgtatgggaggggctgccattctgctttcaaacaaaggctctgataggcgaagatcaaaataccagctggttgacaccgttcgcactaataagggttctgatgacaagtgctttggctgcgttgtccaagaggaagattccaatggcaagattggtgtcactttgtcaaaagatttgatggcagttgctggcgatgctttgaaaaccaacatcaccacattggggcctcttgtcctt

SEQ ID NO: 20923 - DNA, 489 bp, Glycine max
agagaacgaacatcaagcttcagaccagagccccaatcagcaaattcaagcagtactagtaccaataggcaactaaattcccctttccaaccctaatttttcttcttaattaattccatttaagtcctttaatatgcagaccctcaccccaccgtaccccaaccctctcaactatctcacgcgggcgcgtcactcggtcattcgggtcgctccgacccgtttcacagtcaaatgcggttacggcttcgaatccgcgagtttctcgcagggactcggcgcgagccgagccgattggcaaagctcgtgcgccatcttagccagtaaggtcgtatcgcagcgggaagattctcccgccgacggggacgacaacgacaacaacgtcggcgacgtgaacggccacaacgccgccgtaacgaatctaaatatcgtacctgtcaaagtgatggtgaaaacatcaagccgattccgcgaagccactcacgatcttcg

SEQ ID NO: 20924 - DNA, 531 bp, Glycine max
gtgctaataacttaatcccaatggaaattgctctaaagattgctgaaaagataaaagcaaacgagagatttgcagtgtatgttgttattccaatgtggccagaaggtgttccaacaggggctgccacacaaaggattctattttggcagaataaaacaatgcaaatgatgtatgagacaatttacaaggctttggttgaggcagggcttgaagctgcattttctccacaagattatttgaactttttctgtcttggtaatcgagaggccatgaatttgtatgataatgccggtgtgactggagctcctcccccagcaaatagtccacaagcagccagccgaaatagccaacgcttcatgatttatgttcattcaaaaggcatgatagttgatgatgaatatgtgatattggggtctgcaaacatcaaccaacgctccatggaaggaacaagggacagtgagattgcaatgggagcttatcaacctcatcatacgtgggcaagaaacaatctaatcacatggacaaatccat

SEQ ID NO: 20925 - DNA, 457 bp, Glycine max
ctttaaagcaagtaaagagagccaaaaagaaaagggaaagttggttgagctacgacgttataagatatatagtgtaaccacgtcgccaaagttcgagagaaaccctctttcgtttcggtaaagggaactaatcgcttttgtcttgtgttatatatgttgctgttgttacaatgatcttctctaagtttaggtaatcaagaaagaaacgagattgctagctagagattgtgttggatctcaaagggtagagaagagaagagaaacgagaaagaaagaaagaaaagataatcaagaaatgatgtcaacaactaatgttaaccatagcttgtttgaagaacaagatcagatccctacgcagatggggctgttcaatattattcctttcccaccaaaccaaacctacccacctttgggttgtcaaacagtaactttgaaatccatcagtgcaatagctcct

SEQ ID NO: 20926 - DNA, 285 bp, Glycine max
ttatctagttaatgaatctccacacgagacgtgaaagaatttattagaaattgacatatattctttaaagcaagtaaagacagccaaaaagaaaagggaaagttggttgaactacgtcgttataagacatacttccagatcatggtgtaacctcgtcgccaaagttcgagagaaaccctctttcgtttcggtaaagggaactaaccacttttgtcttgttattgttacaatgatcttctcttagtttaagtaagggagatagcccttctgagagtgtgttggatc

SEQ ID NO: 20927 - DNA, 529 bp, Glycine max
cttcgttcgagttattattttgggcagagagagagagagaaagaagagagatttgaattgagtggtattccaacgtcgaaagcagagaggagaaacaataaggtttctcctaaagtgctctgttttgttttctctctctctgtctatatgtgactccgccctcaacactctgacctgtggtgtccctcatgtgacaattcgggagctgcaaggtttcggtcttgggttggaatattgggagaacccctccttcgaaaaatcaaggaaaacgaagaagctcgttgattggagaagttggtttaatggctaaagtttgttggccatattttgatcctgagtatgagaacttcagcaatagaatgaaccctccaagggtctctgtggacaatgctagttgccatgattgtacactgatcaagtttgatagtattaacaaacctggaattctgctggaagtggtgcaaatcctgacagaccttgacttcataattaccaaagcttacatatcgtctgatggtggatggtttat

SEQ ID NO: 20928 - DNA, 687 bp, Glycine max
cgtcatgtgcacgcgcacatcatctcattatgcttctgggataatttttgttaaacttgttgatcagttggacgaaggaaaaatttcatggaaaaggttcagctccaaggtaaaaaagcttcacacagaccggattggtgctccatatccaagggagactggagaatttccaaaactggaggaaagtttttatgcaaatcctctaccaggatgtatttgtgaaacaagatagtagtagagactcccctgaagattgtctgtcttatgatggcactgcaaatgctatcaaaagacattgtggctgtgctgcgatatttttttaatccttctgccttgaggagatagcaatgtgctgggctatctggtaaggtgctattgattgtctgactgttgggataaggtgacaaatgaccaaggtgggggcaagaaactgagattcctagctacaatattaaaatttaaaggatcaagcacgggcaggcctgagtataccactgtcaatacaatagaaattaaacaccttgcgtttttaagcaaacctcatctctaacctcacttttgaatgatttctttctttctttcttgattaaattttattcattacttgtaccaatagcaaggggtgggcctgaataccctgtattcttattgtacaataagatgaaaataaaaatctagtttttattg

SEQ ID NO: 20929 - DNA, 492 bp, Glycine max
  unsure (1)..(492): unsure at all n locations
gggccccattgtgcacagttcacacctaacacaaacccacttcctctcttttccggcggcttttccggccaccatgctcctccgcctccaccacccaacctccctcgcctagatctactcagatcacaatcccaaatctctcaaatccggcgtcgtcgttttagctcaccttatataaaaaaagcagaaaggatgtcgtttcctctataattcgcttactcgcgctgtgtgctgtgtttctttctaacattcgtgttcgcgtgtgtgcgtttctttttttgttcctttgttcttttcggagcttctttgatttttccggcgagaagaggatgacgtccgtcgcgaggcagccaacgtggaaggagcgggagaacaacaagaggcgagagaggaggaggagagccatcgcgggcgaagatcttctccggcctgcgaatgtacggcaactacaagctccncaaacactgcgacaacaaacaagttctcaaggct

SEQ ID NO: 20930 - DNA, 424 bp, Glycine max
agaagtatcatgacggcccatgcacccctaccttaggttcgcaacccgctttggccgctaggctttttctgcttcaccgccttcggttgcgtagcttccaagggttcaccgtcgcggcgcccaagggccaccgtctctggtgcagtgccacgtcagcaccggaggaagcagcttccaacgcggaggtggatgaccccgagtggaggaagaaagaagagaagatcgtgagggacgttgagccaatcgtttcgttaaccatgcaaattctctactcatcaaggtacatgaatggggagatactgactatggaggatgaaagagccgtggtagagaacattctcatttaccatccggattatgaagataagataggaagtgggctgaactccattatggttgatcaacatcccctatatctattccc

SEQ ID NO: 20931 - DNA, 371 bp, Glycine max
gctgtctttcactaaaaaccaaacccacccctcattttccattctctctattttctctcctctatctaaacttaacttccattccagtataagcagataggcagatacatcgtattcacgtgggtctgcatgcccctaacaaaactctccttccactctccattcataccctgccccctccttaccctaatttaacatcacacatccaatacatttcgtttacccacgctcccccctctctctctctctctacactatcatactaccactcagctcaaaaaacaaaatatatatatatatatcttttccttttaattttataattttggtgaaaatagcaagagagaaagggttggaattggaaatatctt

SEQ ID NO: 20932 - DNA, 555 bp, Glycine max
tacagtagctaccaacatcaccatttatgcaacccactgtctatcctcatctgatagcatagcatataatagactctgactcactccctatcattttcatcctgcttgaacaaccaaaaagagttccactctccgaaaagtgaaaacactttcatggagattaacttagattattccaagatgctctttttactcctccttggttccacttcattgatttttttcttcccacaattggcttctgctgccactcccaagctcaacactcaagaggtgaaggcattgaaggagatagggagcaagattgggaagaaagactgggactttggggtggatccttgcagtggaaaaggaaattggaatgtgtctgatgctaggaaaggctttgagagttctgtcatatgtgattgttccttcgatcacaattcttcttgccatgtcgtaagcatatccttgaaggctcagaatctgtctggtagtctctcaccagatttttccaagcttcatcatctccaagaattagatcttagtcgtaacatcatcactggggctata

SEQ ID NO: 20933 - DNA, 462 bp, Glycine max
tttttagactgtcttgaaaaattttcagggcctttagttctatgattaggctgttcaacttacattagtatgccttacatgatagtatagtgattcggttgacagtgttgtttcttatcttatatgttgacagaagaagtcttctactccttacgttcctcaaaactcaaccccatgtgcaactttatttgtagctaatctggggtcgtcttgtaatgaacaagagctaatccaagtgttttctagataccctgggtttttgaaactgaagatgcagagcacgtacggggctccagttgcatttgttgatttccaggatgttggtagctcaactgacgctctaaacagtctgcaaggcacaattcttcactcctcacaatctggcgagggaatgcgtgtagaatatgctaaatcgcgtatgggcatgcggaagaagcccaatagataataacgagaatcact

SEQ ID NO: 20934 - DNA, 381 bp, Glycine max
catccaccatcaaccaatcatggatcgggttgatttgttttatggttgttggattttttgcagtatctgcttgttcttaaatgatttaatacaaagatcaatcttcggtttgagcttaatcaaacttaaactttctcgtccttccccagaaatctactgtgtgaaaattgaatacagttctctcccataaatttagtgtgtttacattaattggaattcggtgcagtgttttaatttgtttattgttattttatttatttatttatcttctatatgtttctttaaaactatttttcatttttaatataatccatagtattataaaaatcatctatccacaaaccacgtgtcaacatattatcaattttatatgggatataa

SEQ ID NO: 20935 - DNA, 353 bp, Glycine max
gtggattctcttttggatttccgctcacaggtatgggcaatagcatttttaatgagatgctcattagatatagctatgaaaaattactgcgccaggctagagctccaagcatgtttttacaatccttcaaaaattttgtttctttgtgtgtgtatggtgatgataacttaattagtgtccatgaatatgtcaagccttactttagtggttctaaatcgaaaagctttctagctgcccataatatcaccattactgatggcatcgacaaaactagtgcaactttgcaatttagaaagttagcagattgggattttctcaagagaaactttttgcacatgtctaatgttttgtgg

SEQ ID NO: 20936 - DNA, 404 bp, Glycine max
ggttgctcctttctctctcttttatcttctgtctccctttcttctccttcgctttgatccaaattttaatccttttttcatttgctcaattatttgcaccgatattcttcttcttcttcttccccttttgcttcggtttaagtttcaagttttaatcaaagaaagaaaatagtgtttcaagattcaaactttttcgtattgggttctcttttctctttgagtttttttgcttttctttctgggctttctgttttcatggtggatacggatgggtttggaactgggggcgatgttgggggaactcccaagacaggggatcttaggcaactgggaaatgttcccacagtttttgatgcatcacagtatgcatttttcggttcagacactgctgttcaagaagttga

SEQ ID NO: 20937 - DNA, 411 bp, Glycine max
gaaaatagagagtggactcctttgtcgaccatggcatctaacataccagaaagaagcaattggcccacatctggtacttccatgcatgttccaaggaatcaaatatctggttttgaaactgcccagacaagtggatcagattctccattacccatagctccggtgcttttaggtcctggttctcgccaaagagagaattctggggttgttccatttacattttatcctactgggccacctgttccctttgttacaatgcttcctttatataattttccaactgagtcttctgacacttcaacaagcaacttcaatctggaagaaggggcagataacagtgattcaagtcagaattttgattcatctgacggatatgaacaccctgaggtgtcaagcccttccaattctatg

SEQ ID NO: 20938 - DNA, 371 bp, Glycine max
ctcgagccgtccgtcgccggctaagctcgcaaacgtaaacgaacttgagttggaacttctccgacgagtacaaccaattggtctcaaaccctatcgccttttgcttcaattcaccgcattctcgaatttccccttctctgtgacgcgtggcaaaaattttccccttaatttcttttctttaggagagaacatggcatcgaaaagggaaagggaagcgagtgatagagtagaggatgaaggggttgataatgagtcgaaaaggcagaggctggatgaggattcttccccctctcctcctcctgtgtccattgcaaatcctctttctgggttggccaataattatgctgacattgatgaggaggaagattatg

SEQ ID NO: 20939 - DNA, 413 bp, Glycine max
ctcttgaagccttttcttcttcgatctctttgatctaattcattgcaagagaggaaaatatgaagcaggattcggttcaggcaccaaattgcgacgatttccgacatgtatcttcaaccgccaagttcaaacgccaagacgcaccaaattggaaagcttaccggccactcgtcaatagcatttctcctatgtcagtggtgcgcttcattatcagagctctatcatttgtctgtgaggtgctactcttgctgcttgcagtcgcaactcgtcttgtcaagatcatcggtgttgctctaacagcttatggaggatcaggtaagaagaaagtcaacagcagcaagcagggaagagatcatctgagccataaagaaggcactaccaacatacacaacatgcacaaaggggatcaaagc

SEQ ID NO: 20940 - DNA, 445 bp, Glycine max
gcaagggtctctcctcccattgcagacaggttcctgaacatttgagagttgtctatttatgctaccaatgtcgagtgaaacttaaggtatgatttttgacgttggcgggctaaagccagtgcaaatatatctcaaacaaatgagttcacccttacaacctttgtatattcctgtaaggtgaattttggcatcatttttaacacgtagccagcctgttatttaactcataattcactcatccaaagccccaggggagataaaaagataaagaaaaatccccagtagtgcttctccccatctacatataaactggtagttgaatttgttgtatattgactattatttcagtcatgatgtggctgtttgcaaatgtaatttggtatatagttgttgtatacattaacgattctgtgaaatgtacacggctctgctatatgttcccccc

SEQ ID NO: 20941 - DNA, 485 bp, Glycine max
gcgacctaccatggattggcccacaagattaagaattgctttaggatctgctaagggactggcgtatcttcatgaagattgtcatcctaagatcatccatcgtgatatcaaagctgccaacatccttctggattttaagtttgaagcaaaggttgcagatttcggtcttgcaaagttttcttctgatgtcaatactcatgtttctactcgagtgatggggacttttgggtatttggctccagaatatgcttctagtggaaaactgacagacaaatcagatgttttctcctacggagtcatgctcctcgagttaataaccggacgacggcctgtcgataaaaatcaaactttcatggaggatagtttggtagactgggctaggcctttgctcacacgagctttggaagaggatgattttgattctattattgacccaaggctccagaatgactatgagcccaatgcgattgcacgagtggttggtt

SEQ ID NO: 20942 - DNA, 794 bp, Glycine max
cctacgcgtccggatccttcttcagaaatcaaaatccttcttcgttaaggaagacccagaagcagagggtacaccacatataatccaattttcatcgtcattgatgcacacttaccccacccttctcttttttctttgttctatttaaataaataaaaaaattgaaaccttaaattcctagctgtcttcaatatcgtaaaactcactctgcaatcatcgattttgttttcctgtgatttagggtttgattctgatcgaaacccgcgccatggccatgttcgattccatcttcaacaaaggttttaaggctgccaaatgtaaaacattgctgaagctgacaattccgcgtataaagctgctaagaaacagacgagagattcagttgaagaacatgcggcgtgagattgccaagctacttgagactggacaagaagccacggctcgaattagggtagaacatattataagagaggagaacatgatggctgctcaagaaatcattgaactcttttgcgaacttattgcggtccgccttccaataattgaatctcaaagggaatgcccccttgacttgaaggaagccatatccagtgtatgttttgctgcaccaaggtgtgcagatttgcctgagttgttgcaggttcagatgctatttgctgccaaatatgggaaggaatttttatctgctgcaactgagctcaggccagactgtggtgttaatcgccagttaatagagctgctttcaattcgtgctccttcaccagaaaagaaactgaaccttctaaaagaaattg

SEQ ID NO: 20943 - DNA, 320 bp, Glycine max
cgatccttcttcagaaatcaaaatccttcttcgttaaggaagacccagaagcagaggggtttgattctgatcgaaacccgcgccatggccatgttcgattccatcttcaacaaaggttttaaggctgccaaatgtaaaacattgctgaagctgacaattccgcgtataaagctgctaagaaacagtcgagagattcagttgaagaacatgcggcgtgagattgccaagctacttgagactggacaagacgccacagctcgaattagggtagaacatataataagagaggagaacatgatggctgctcaagaaatcattga

SEQ ID NO: 20944 - DNA, 412 bp, Glycine max
atttttctttgttctgtttaaataaaaaaagaaaatttaaaccttaaatttcctagctgtcttcaatatcgtgaaactcactcttcaatcatcgattttctggtttctgggtttttattttcctgtgatttagggtctgattctgatcgaaacccgcgccatggccatgttcgattccatcttcaacaaaggatataaggctgccaaatgtaaaacactgctgaagttgacaattccacgtataaagcttcataaactgagttctttaaaaagcatgaagatttattgaatggccccacccaattcgttagtgggtctaagttgccccttcctgacgaaaaacacaatgaagagatgcactccactcatgatgcacccagtaaagaacaacctgattctgattctggctccg

SEQ ID NO: 20945 - DNA, 374 bp, Glycine max
caactgcaacacttaaaggctctcaatttatcagggaatagactctcaggtgaaattccttcacttctcaaggaaagatcaaataatggttcacttttgctgagtgtggatggaaatctggatctctgccgggagggcccatgtgaagaggataaaatgaatattgccccacttgttgcaggcattctttcagttgtagtctttttcattgtattgggtattgtactgaatatcatttggagaaggagatgcaacagaaaaccagctccgatgctagctgtgagattaaatgaagaggttgtgctgaagacaaacaatacacagttcacatactctcagatatcgactattaccaataacttcgacaaaatgat

SEQ ID NO: 20946 - DNA, 368 bp, Glycine max
gatgttgttgtgtgcagtgccgtctctgcctaatatgttttggaagaaagaagaaagagtcagtgcgttgcgcgtgtaatggaagctgagcggaagcgcttgaagccacgccttgagcgtcggaacgctatgaagaacatcgactaccaattgaaggacgaggacgcagacgcagacgcagacgcagcttatttgaatcaacggagtttccgagtcaaaggaatcgacggcgaattcgaccgcatccttcgcagcctgggcctctctgggcccgaggactttgccatccctgctgcagcctgggaagaagcccgggcccataaagcccgcagcagcgtccaaccgagagaggggggaataaagggtgt

SEQ ID NO: 20947 - DNA, 393 bp, Glycine max
attcttcgcttcatccaccttccaaactcgaacgaccatctcctcaccgtcgtgtctctccgccgctgccaccacacctccggcatccccaacagagtgatggaagacaaagtgaaattggctcattacaaagtcgggtctttgccaactctattttatgttcctgacttcatcacagacagtgaccaaagccttctactcaacaacatttatggagcccctgcatcaaagtggaagatattgaagaatagaaggctacaaaattggggtggtgttgtccatgagaagggccttctacctcaaattttgcctccatggttaacaaatctcacgcaaaaaatatatgaagaatctgggctattcccatcagcactcaatcatgttcttatcaat

SEQ ID NO: 20948 - DNA, 213 bp, Glycine max
atttatggagcccctgcatcaatgttgttgagtagaaggctttggtcactgtctgtgctgaagtcaggaacataaaatagagttggcaaagacccgactttgtaatgagccaatttcactttttcttcctgacttcatcacagacagtgaccaaagccttctactcaacaacatttatggagcccctgcatcaaagtggaagatattgaagaa

SEQ ID NO: 20949 - DNA, 612 bp, Glycine max
ataaatacaggtgctcaacccaatcgatggcccacatggttttctaaaggctggcaaagccttatatgtggttggtttggctcttgtggttgaaggagagattgttgttggtgttatgggctgccctaactgggaggaagacttatctgagaaatcctctactgagattgaggagggttgggattctcttggtggatcaggaactgtaatgattgctcataacggctgaggaacttggatgaaaagtttgaatagccaactcaaatcacctggtgtgtggaccagatgttttgttgatgggtctgacataatacataaagcacgcttctgtattccagatagtcaaacatgggaatcactgcccctgacttctttatttaatgccacaagcaatgctgacaatgtagggagcaaccaaattcttcttttgggggcatgttgtggaagtttatgcaagtatttgatggtggcctctggtagagcatctattttcattctccgagcaaaagagaagactattataaaggcatgggaccatgctgttggcattatatgtgttcatgaagctggtgggaaggtaacagactggaaaggcagcgacatagatcttgc

SEQ ID NO: 20950 - DNA, 435 bp, Glycine max
  unsure (1)..(435): unsure at all n locations
gtgagcttcaacaagttggttggagaactgcctgagtcattgggaagaatgaagaagttggagcagctgaatgtggcgaataacgagttgtctggtgagagtcctgagagtgtttgcatgtggccgaggttggagaatttcacgtactcttataactacttctgcagtgagtcaccaacgtgtctcaagttgaaggataaggatgataccaagaattgtattccttataggccattgcaaaggtcactggatgagtgtaaggctttttatgcacatcctgttcattgtagtgcctttggttgtgcatagacgccgccgtcaccttcttcttcttcggcgacgccgncaccggcaacttaccaccactatccctgaggagccatggcagaaatataagtttggaatatttaatttgcttttttttgttctgagttt

SEQ ID NO: 20951 - DNA, 761 bp, Glycine max
gcggtgtttctccgagttgcttcaattgaatggctcttcagcttccaccacttcctggccgtgccatgcgcttcaactcaagcgtgtgctcccttcctgcacgaaaatctagcacctttgccactctgtcacaaccccgaagcgactgggttgaagccactaacagtttcttcgaccaagacaaacgacccatcatgttatttgacggagtatgcaacttgtgcaacgggggtgtgaagttcgttcgtgataacgatcgaaataagacaattagatatgaacctcttcagagtgaaacgggtaaaatcttactcaggagatcaggaagagctcctgatgatatctcaagtgttgtacttgttgaaaaggaaagatcctatattaagtcagaagccgtgctgaagataatggaatatatagacttaccctttccacagctagcaattcttcttcaatttgtgcctctggttatcagagattttgtttatgacaatgttgcaaacaatcgttacctgatttttggtcgttcggaatcatgtgaaatatagcatcatcctggcatgagtactggaggtaacagtaatgtgctaagttcaaaaactgggcttctttatagtccaagtcatatcctgttctcaaatattttgaagattctgtgtactactgtatagaagctttacttgtcgttttatttgataagctcatagaagcagaggacatcatcaattcgtaataatattttctgtcccaaatgattttgc

SEQ ID NO: 20952 - DNA, 744 bp, Glycine max
gttagaaacctgagagatggctactcttcctcttctccgaccatgctgcttccttcccactcccaccctcaaaccctcactcacaagacccacacccttcttacctctcaaatcgaagaagaaccctcaaaacggcgccgttgggactcgcatgtcgaacaccgcaactccaccaccgacggagcggctaatctcaatcgcatcctacgcactcccattcttcaactccctccagtacggccgctacctcctggcgcagaaccctaccctcgccgtcctcttcgaccccatcgtgcccctcctcgccttctacagatccatcccttactcctccttcgtcgccttcttcgcgctctacttggggatcgtcagaaaccctagtttcccccgctacgtcaggttcaacgccatgcaggccgtcaccctggacgtcctcctcgtcctccccctcctcttccaccgcatcttctcccccgcccgcggcggccccatcctcgtctggtccagcaacgccattttcatcttcagcctcatctgcttcgtttacagtgttgcttcttgcgtcttgggacgcacgccgcacttgccttttgtcgccgacgctgcttctagccaaatttcattttcccttttctttgtgctttcttccttgtatgcatacaggttgcaatatgaattctaaagtaattattattgtaaaatgtatgtatttcaattaaatacaatctatcggtttatttttat

SEQ ID NO: 20953 - DNA, 586 bp, Glycine max
cggaaatgaaaataaaggtggtgatgtgatacttgatgtagagagaggagcatttgaatccacaacatctcatacagcagacgatgttccggctgaagatgctattataacagaaccacgaactctagtacaaaatggtgaacaaccaagagatgaagttggtgaaccccaaggatgggaaatacttaaaagcattgtctatggtggtttagttgagtcaattactagcctaggaattgtgtcatctgcagttagttcgggtgctaccccattgaatattatagcattgggatttgcaaatatcatcggtggacttttcatccttggtgataatcttattgacttgaaaaaagataactctggaggggatcaaacacaaacgaatgtgcaagatcggtatcaagaatcactagggcgcagagagaacttcttgcttcatgttgttgtagctgttttatcattcctgatatttggtgctttccctcttgttatctatggcctcttgatcaataagaattactacaccgaagttaagctcgccacagtagcagctacatctattgtatgcatcattctacttgctatt

SEQ ID NO: 20954 - DNA, 959 bp, Glycine max
gaaaaacagagaaagcgacagggcagagaaaaagaggttccaaagcagccaccataacagtgaatacacatagttacaaaacaagcataaggtaaaatttacctagaaaaaggtcttcgatctcgtggcataaacattaaacaaaagggtgttctatgtttttattattgcaattggggttaattgttttatagagatttccgcctgtttcaatccgtgtaccaaggtagccacttttttttcttttcttttgttttttctgttaacccagacacaggtgatagatcggtcataaaaaaatatattttgggacagaaaaatcttggccatagatttgtaatcttttcatctcaaaaaatttctcgtgctgttgtgtctctatatatactgtgtagctctatctctaacgttttctctctttttggtcagagggagagtggggtgtgtgtgtttttgttgggatttgtgaggaatccattgaaggaggaagagtgggagatttatgtcgtcttggttttatttggaagtagtgattggagctttgttgaagctcgggttcggttacgcttgtatttgctgcatgctactctggctggtgttgaattctgctgtttcgatgagtttgaggtcaaaaaggacatgttatggaattctggtttgttatggaggctttcagataaaaaaattctctgctttcttcctcctttggagagtggatctcacttgatgttcttgaaattatgagggattttttttttggtttattaaaaaaaattattttgttttgctgaacaatttttctgggtattttgaggggttttgacccaattttttttaccatggcggatcctcttaatcaatcgactcctaggactaaaaatatgttacacatgcgcaatccggttcttgtctcgctaatgacccggacactgcacatcttttgccttgatcctaatcct

SEQ ID NO: 20955 - DNA, 518 bp, Glycine max
atagaacatctcttgctcttcccactttctctctctaaagaatataatactcaaaattcatccatttttattttatttttcttaaaaaacaaagcgcgtatagtctcacgcgcccgacgatgggttttcccgtagggtacccggagctgctggttccgaaaatgttcctccacgcgctctccctcctcgcgtggctgcgctccctcgtcttcgccctcttccgcctcctccgcatctccgacctcctcgacaccgattccgccgcctctgaccttcctccgccgtcttcgccacgcgagccgactctcttcgccctcctcatccgcgagttcctccccgtggcggcgttccgcgacctggcagccgccgacggggatcctccgccgtcgggctgcgccgtgtgcctgagcgaattctcctcggaagaagaaatccggtgtatggcgaactgcaagcacattttccaccggtggtgcgtggaccgttgggtcgatcacgatcagaagacgtgtccgttg

SEQ ID NO: 20956 - DNA, 378 bp, Glycine max
tagaagaaaggtttagtaatacaaatacatctccggcgatggctgtttccacctttcaggcggcgccaccgaaacccacattgggttccagtcttcttagccgtcgtatgaaacacgttcccttctccttgtcatttttctccgctcctaagaccatctcttcttacagacccatcctacgcattcgcgccatcgacgcggcccagcccttcgactacgagtccagaatggcccaacagttccacgactcccagatgctgtagatcgccatcgtgggcttcggcaacttctggcagttcctggcccaaaccctcgtccgccagggccacaccgtcctggcccactcccgctccgaccactccctcgcggcccaacaac

SEQ ID NO: 20957 - DNA, 944 bp, Glycine max
cggcttgagctttaacgcgccaaattacaatcaccatgtcctcttcctcttcctccttcttccccgcccatatcaccaccgaccaagaattctccctcatcgttgccgccctcaccaacgtcgtctccggctctacctccagctcctccgtccctgaattccgcttcccgcactcctccccgcctctttcttccgccagccttatgccgccacccccgcctagcatccacacgtgtcgcgagtgcaacatcgcaggatgcctgggatgcaactttttccccgaggaacaaaggaagaaatacagaggagttaggcagaggccttcgggaaagtgggccgccgagattcgcgatcgtcatcgttcggcccgggtctggctcggtacattcgaaaccgccgaggacgccgcccgggcctatgacaaggcctcgttcgagttacgcggcccacgggccaagctcaatttccccttggtcgacgagtcgctcactctccagccggagatggctgcaacagaagagcagattaacaacgaggataatctcaatcaaggcatgggaatggactcgcacgaattctgggacaggatcaacgaagctgattttcatccgttcatgatgatgatggattttactggagattcttcagactctgctgccactgggtacactctcagttcctgaaattgatattcaattaaaccaaataattagttttgttaatgtgcgtttaacaattgtacaactcggctaagcgtatttgttaaattagcatttgctagctccactgcaatacattacactacatgtatttctgtaatatctttcttccgctaggtttttttcgtgaggaagttgctgcatagtacaaatcaagagttttaatgtttcatttcaccaccccaagagtatgctatgtataaagattagagtattattactgtt

SEQ ID NO: 20958 - DNA, 602 bp, Glycine max
gtgaaactatctttggagaccgcaacggcttcaggaacgaagcgatttggaagactgagtcagagactctgaatgaatcggttggagagataagtcataagagatccttgacagaatcccttgttcattccgaaaccgctacaaaatcatgggtggcaacggcaaacacaggtggaaattcagcttccaccgttccttcacccatcctcctcccaaggaattcacctgccccatttccggctcactaatgtccgaccctgtcgtcgtagctctcgggccaaaccttcgaacgactcgccgttcaactctgcaaagacctcaacttctcccccaagctagacgacggcacccgacccgacttctcaaccctaatccccaacctcgccatcaaaacgacaatcctccactggtgcgacaacgcccgcacccaacacccgcgccctcccgattacgcctccctccagcgcctcgtcttagaacaaaaagaaaatgaccgcgttagggtttccgaaatggagcttctcaacgccgtcgccgacctccctcccgtcatcttctcccacgccgccaccgagttaggcccccgagtcaaccacttcaac

SEQ ID NO: 20959 - DNA, 433 bp, Glycine max
cacgcgtacgtaatgctcggaattcggcttcccactcactgcacaacaattcgtatgggtggcaacggcaagcacaggtggaaattctccttccaccgttcctcatcccaaacctccaatcccgacccgaaccaagttcccaaggagttcacctgccccatttccggctcactaatgtccgaccctgtcgtcgtagcctcgggccaaaccttcgaacgcctcgccgttcaactctgcaaagacctcaacttctccccgaagctggacgacggcacccgacccgacttctccaccataatccccaacctcgccatcaaaacgacgatcctccactggtgcgacaattcccgcacccaacccccgctcccaccggattacgcctccctcgagcgccacgtcagagaagaaaaagaaaaacatgacctaattaggg

SEQ ID NO: 20960 - DNA, 798 bp, Glycine max
gctaaacgagtagagtgagtgggttttcgatctcaatactctctctctcctctcttcccattagggtttcttcctcaacccgatcccccatggccgacgaatctcaatattcggctaaccccgacagcacccctacccctccctccctcaagcgcaagtacaacgacgaccaccgccctactggattctccgacggccccgacccggcggcgccgccacccccctcctacaacaacgtccctcccccttcctccgccgcctccgacttcgagctcgccaaacagcgcgcccaagaagtcgccgctcgcctcctcagcggcgccgctcccctcgaccccaccaaacgccccaagcacgacaacaacggctcctccttcgactccatcgatgtgaagggtccatactcggtgccgtcgatttcgccgtccgcggtgtcgtactcgtaccagggtggtggtgcgagcaagaagattgacattcccaatgggagggttggtgttatcattggaaagggtggtgacaccatcaagtaccttcagctgcagtctggtgccaaaattcaagtcactcgtgatatggatgctgatccgaattcggctactaggactgttgagcttatgggttctcctgatgctattgccactgctgataagcttatcaacgtgttcttgccgaggctgaaactggaggttctggcattattgctcgacgagtggctggacaagctgggtctgatgagtatgtgtcaaagatccctaataacaaggttggtcttgtaattggtaaaggaggagaaac

SEQ ID NO: 20961 - DNA, 497 bp, Glycine max
ttttctcattggagggaaaacttccaattaaaaatttcggacagagaagaatatagcttcttcttccaccagtgaacaagtctagggttttagtctcttccttcagcttatttactggatcttttaaaaaagctgttcctggatgcaccgtgtcagggtagtctctatgaacctgtttttgctgctttgattactcccacggaaattaatcagctcgtcaaacattcttcttgaagtggacatgcaaactaagaaaaaaacctccaggcgaaatgccagtcaagagcgtggcagtcctaaagtttcaagagcaccgaggaaggtctctcaaaatggtcgagctgctgaaaagaaagtcacagacttaattacatcatctgctagaaagaataaatctcttagcacccttgagaataaagctagagagcctatccctcctacagatttgaataatggatatgagtttatggacagtgggacttctgatgcttgtttgg

SEQ ID NO: 20962 - DNA, 627 bp, Glycine max
gcttgtagtagtaaggttactaaattatgtgacttggggattgatgaccttgtttgttcggttggctgggctcagcgtggtacacaccttgctgttggaacaagcaatggtaaagttcagatttgggatgcatctcgatgcaagaagataagatctctggagggtcatcggttacgtgttggggccttggcttggagttcatctcttttgtcttctggtggcagggataagaatatttatcaaagagatatccgtgcacaagaagattttgtcagtaaattatcagggcacaaatcagaggtttgtggactgaagtgggcttatgataaccgtgagttggcatctggaggaaatgacaacagattgtttgtttggaatcaacactcaactcagcctgtcctaaagtactgtgagcatacagcagctgttaaagctattgcatggtctcctcatcttcatggacttcttgcatctgggggaggaactgcagaccgatgcatacgtttctggaatacaaccacaaactcacacttaagctgcatggacactggaagccaggtttgcaatcttgtctggtccaaaaatgtcaatgaactagtaagtacacatggctattcccaaaatcag

SEQ ID NO: 20963 - DNA, 725 bp, Glycine max
gcaagatctcttctttctctctctctctctccgagtctgttctgtagtgccacccacacccatcagggtttatgatcttttcctccaaatgctgaatcttccatctccatttttcacccgatttctttgccagggttccagaaatgtttaattttaaacaaagatgagtacgactgaattatctaatatgaagcaacctcctgttccgctggcaaccctgattggccaggagctacgaaatggaaaaattgaaaaaccttttgtgaagtatgggcaggctggcttggcaaagaaaggagaagattactttttaatcaagacagattgccagagagttcctggggattcatcaacactcttttctgtctttgcgatctttgatgggcacaacggtatatctgctgctatttttgcgaaggaaagcatactaagtaatgttttgagtgcaataccgcaagatatgggtagggatgagtggcttcaagctctgcctcgtgctctagttgttggttttgtaaaaactgacatagagtttcagaaaaaaggggaaacttcaggaacaacagctacatttgttctggttgatggatggactgttactgttgcatctgttggggattcccgttgcatattagatactcaaggaggtgttgtttctctcttgacagttgatcacagattggaagaaaatgcagaagagagggaacgcgttactgccagtggtg

SEQ ID NO: 20964 - DNA, 527 bp, Glycine max
gcggaatcttccatctccatttttcacccgatttctttgccagggttccagaaatgtttaattttaaacaaagatgagtacgactgaattatctaatatgaagcaacctcctgttccgctggcaaccctgattggccaggagctacgaaatggaaaaattgaaaaaccttttgtgaagtatgggcaggctggcttggcaaagaaaggagaagattactttttaatcaagacagattgccagagagttcctggggattcatcaacactcttttctgtctttgcgtgaacaagtggagcatcaatttattcccacaatggttacgatatccataaggacttcttgattggcagatctttgatgggcacaatggtatatctgctgctatttttgcgaaggaaagcatactaagtaatgttttgagtgcaataccacaagatatcagtagggatgagtggcttcaagctctgcctcgtgctctagttgttggttttgtaaaaactgacatagagtttcagaaaaaagggga

SEQ ID NO: 20965 - DNA, 834 bp, Glycine max
agcctgaggtggaagagctgctctggggtttttttggaggcaaaattcataatttcatttattgttaggaaaaacagaagtcccagtggtaagtaaagtatgtaaattgttgacagtaaatgagtgtggagtgtttaataacagaagaggaagagggtgttaggctaccctaggcaacgtcataatgaactttgcttatttattctctgagtgagactggtggcaacaatcaagaatggaagaagggaattgggttctcttcctaaccctggccatcagcctctgtgtctccggcgcattccaaatccaaaccgaaaccttgcccctccacaccctccctgagccacacatcctctcagaaaccctctcagaaccccaagaaactctctcgctctcacttcacctccacctccaccacatagacgccctctcctccaacaaaaccccagagcagctcttccacctcaggctccaacgcgacgccaagagagtcgaagccctcctcaaccaaatccatgcgcgcagatccgccggctccagtttcagcagctccatcatttcgggcctagcacaaggcagcggcgagtacttcacgcgcataggagttggcacacccgccagatacgtctacatggttttagacaccggaagcgacgtcgtttggctccaatgcgccccttgccgcaaatgctacacccaagccgaccccgtttttgaccccaccaaatcccgaacctacgccggaatcccctgcggggcccctctctgccgccgcttggactcccccggctgcaacaacaagaacaaggtttgccagtaccaggtttcctacgg

SEQ ID NO: 20966 - DNA, 577 bp, Glycine max
cctcgagccgaatcggctcgagttttggagttggtaactgggaagacccctcttgacccagactatggagaaaatgatctaaccaaatgggttcagtccacattagatcagaaaggactggatgaggtgattgatcccactttggatattcaatttagggaagaaatcagtaaggtactcagcgtggggcttcattgcactaactctcttcctataacccgcccttcaatgcgtggtgtggttaaaaagctgaaggaagtaactgaacttccaaaatccttaagtggaaaactctcttctccttattttcaggaagaggcttcggatattgatcatgagggaagcttagtttgagctagatgctgaaaatcataacagtcagcttcaattttcacttcagctttggtacttaaaatgttagtttttgcataggtaatagtaattgaagcagcaattgtaacaaaatagcaagaaactttccaatttcaatcgtgtctaatgaaattcacaatagaatatattatgttctactttgcattaaacccaagaaattgtaatatgccaatctttatccgtg

SEQ ID NO: 20967 - DNA, 721 bp, Glycine max
ggctgaagagctatttgaacttctcccaccctctaatatccaaaatttttaatcccaacgaatgtgcctgggcctatggcatgaacatttttgatttggaggcttggaggaagaccaatataagcaatgtttaccattattgggttgaacagaatatcaaatcagacctgagtttgttgcagctagggacattacctcctggattgatagcatttcatggttatgtccacactattgatcctttctggcacatgttgggattgggatatcaggaaaatacaagttttgctgatgctgagactgctggtgtcatccatttcaatggcagggcaaagccatggctagatatagcttttccccatctaaagccattgtggaccaagtacattgacttttcagattacttcataaagagttgtcacattagggcattgtaattttgatcatgaaaaaaagtggccattgttttttagtggaaggaatggtatttgcataccgaggcaagatgaaaatgataggacttcttcaaaagcatatacccatccaccactacaaggaagtgacaacccaccaatgatatggctactttgtgcagcctttgttttgattttcctttgtaaactcttcagctgaaattatttttctcttcaatccatattgtaagtatgacggtgtaacatccaatttttttaaaataaattaaaaagaatttttttatttt

SEQ ID NO: 20968 - DNA, 495 bp, Glycine max
aaaaaatctaaaactttcgttctagaaaaccagaccaaacttttctttctacggtggctccaatttggccttaacgaaacgaagaatctcgcatcgatcgcgattcgaacatcggaatctggaagcaagcgatgtcaacctcgagccagcaccagttccgatatacacaaaccccttccaaggtcctgcaccttcgcaacctcccctgggaatgctccgaggaggagctcagagagctctgcagacccttcggtaagatcgtcaacaccaagtgcaatgtcggcgccaatcgcaaccaggcttttgtcgaattcgcggatctaaatcaagccatttcgatggtttcatattatgcttcatcttcagaaccagctatggttcgtggtaaaactgtttacattcagtattctaatagacatgaaattgtcaacaacaaaagccctggagatattcctggaaatgtcttgctggtaactattgaaggtgtggaagctg

SEQ ID NO: 20969 - DNA, 527 bp, Glycine max
tgttggatgctaaactaaaattggtctcagtcacatatgtgctttaccaattctttctcccattcctttaacttcaattcggtgtgcccacttcttgtttcatctagtttgggttaaagtgtggtgtcggtttgcttatatgatgtgctggtagttcattggtgaaaatctcataggtatttaacctctcaaaattccaacacatcgatctcttcccatccaccaaaccaattttccaattcaagatgacacaacaaccggacttcagttggatggttcccattgaagtgatgctgggtgccctctaccacggacaagtccaagcctgcagcatctcaagcgtcacggacgagcttcgaagcccgaacgaggcggctttcaagccaaaggaggtctccataggacccttgcacagaggaaccacgaggcacgtgcagctaatggaagagacaaaatggcattacatgcgcgaatttctcgacagaagaagcacgcaggagcagaacagaagatcggagcggaggctc

SEQ ID NO: 20970 - DNA, 589 bp, Glycine max
cttttctcagagattattattattattattattcagatatcatttcctctttcttcttcttcttttttttcttcttttcccccccatgcagcctcttcgaagaaaaactcctctattcaccacctcagaaatgggggcaatgaagggtcgcaagaacaacaacctctccatcttcgtggtggtgttctccatcttcctctttgggctcttcatgtacaacgaggatgttaagtccattgccgagttcccattctcgagtcccaaagcgcatgagacacaagaaggaggagaacctaataaacatgttgattctgttcaagaagacaatgttgttgttgttcaaagggagagtgagaagaaggacgtggaagacagtgtcacagtgaaaatttcttctaagagtacttcaagggctcagctagagaagagtggtgctgaggatgaggattctgatgagcgtgttgatttgaaaactgttgtggagaaagagaagaagattgaaatgccacgtgcggaggaagaggaagaggtggaagaagaagaagaagatgagagagttgagttgcaaaagaagaggagaagttgagtt

SEQ ID NO: 20971 - DNA, 436 bp, Glycine max
cttttcccactgcctcatcaatcatcgtcaccaaacagacattcattcattccacgcgtccattctctctctaaatcgcattaccttcttctatctccttagttcccggcgagttcgtgcatcggagcctctaaatcgcattaacatcatcgaatcaaaccttccttctctttctcaactccagaatctcgtccttgtgagagaaaaaaaaaaagttagttagggttacgcacagttaattaattatttaataatagaaaaatgagctttcaggacatcgaggccggccggtccttcgctgcccgacgcaacctcatcaacggcaaacaagaccccacgcaggcggtggcttccggcatctttcagatcaacaccgccgtcttcacgttccagagactcgtcaacaccctaagaacccccaaggacacccccgagc

SEQ ID NO: 20972 - DNA, 615 bp, Glycine max
agcagcttcagatagggcccagaacatgtcctctcaaaagaccccaagatgtgattttcatctttctccactgcactaacgcattcttttctttcacctcttcttgtgtcttatttctacctattccaatttccagccaccatgtccggcgaaatgcataccgattccgcctcctcgtcacgagccgccgcaacctccgatcagcgtcatcagcagccggcggcggcccctctgagccggtacgaatcccagaaacggcgagactggaacaccttcggccagtacttgaagaaccagacacccccagtttcgctgtcacagtgcaacttcaaccacgtgcttgagttccttcgctaccttgaccaatttgggaagaccaaggtccacttgcacggttgcatcttttttgggcagcctgacccgcccgcaccctgcacctgtcctctcagacaggcttgggggagtcttgatgctctcatcggacggcttagggctgcctatgaagagcacggaggctccgccgaaactaatccctttggaagtggagctattcgcgtgtaccttcgcgaagtcaaggagtgtcaagcaaaggccagagggatcccatacatcaag

SEQ ID NO: 20973 - DNA, 677 bp, Glycine max
  unsure (1)..(677): unsure at all n locations
catgagcatgtattatcacatcaatgcgtatctgtcatctactactggtatgcaatatgcatgttatgttcaacttcaagtaccgctttccattattcctgattccatttccacccttgccaaactgcgggcacaagtcccaaggcaacccccatggtatatatagatttaacgccaggggtgaacatggaattggatcatgcagctgcttccagtttctctctctaaaactcgcaaaagcgaattactgaaaccctagcctctgtttctgtgtttatttacttcgattctacgcatcgaattcaattctctgtgatctgaacccgtgaaatcaatgtgcctctttcggaatcgcagagcgagcaacggtgaccgccatcatcatcgatgaagcgatcgggtcggtggcagaggactctgatcctcgctcttctctttctctccctcgttgctccgctcgtttacgtctctcacctcctcaacactctcacttccgacggacgacgagattttcttgatgatttatcgagttttacacataggtcagatcctttaaatgcaattgaacaggaaggtgctgaagaattagaagagccaaaggaaattgtttataaagaagaagattttgattcaacaaatagttacantttgcaaaagactaatgatactgcggcatc

SEQ ID NO: 20974 - DNA, 1132 bp, Glycine max
gtcttacctcttacctacgaacgaggcaaagaccttttcaaatggtcaaacgcaaaacctctccatgtcttaatcttaaataaacactctttcttcaattctttccaatttcaattccattcctttactttcatttcatcctccacaattttccaattccatttctctttcccaaattctccctaaacaagtaacaccaataaacacaagcttctctctttcagctcttggagggtttcaattctccattgtgatccctcatctgggtacctttcaaatttgaggcaccttcgatcctgtggtccaagtttgcagctttgactttttttctcaacatgggtgggagcgagagctcgaagggtgtggttatgggtcgtttggttgagtgcatcaaggagatttctgggttgccagagtgtcagaacttgtgcaagagggtgtatgggaatttggttcgcagggtgaagcttttgagtcctctctttgaggaattgaaggatggtgatgagtccctcagcgatgaacagcttcaaagctttgagtctctctttgttgctttggattcagctaagacccttttgaaggatgtgaaccaagggagtaagctttatcaggctttgcggaggaatgatacagcagataagttccaaaaagtaactgaaaaaattgaagctgcgctcagtgaaattccttactgcaaacttgagatatcagaggaagttccgagaacagattgaactggtgcatgctcaattcaaaagagccaaagctcaaacagaatttgctgatatacaactagacctagatatggcagtggcgcaaaaagaaaaggaccctgatcctgctgtactgaagagactttctgagaagttgcatctaaggacaataaatgacctaacgaaagagtctagtgaattacctgaattgttgatcacaagtggtggagaactacgcgactcttttgaaatgatcacatcccttctcagcaaactgagggaatgcgtgctcacagaaaatcctgaagttggcactggtgaatgtgaaaaattgtcagttaagcacaggtctcccgtgatcccagatgattttcgatgtcctatatctcttgaactaatgaaggatcctgtaatag

SEQ ID NO: 20975 - DNA, 402 bp, Glycine max
ttcaaaaccacttgtttgttgcactccgcctcttccggtgctttctcattctcatacgcacccagtcacccagctttccctttttcctattttttttctctttttttattaaaaaaataaaaatgttgaagctttcgtgcaatggcttggaccgggctcactccctggcccaatgcggcttcgcgggccggcccgcctgcgccgtccctcgccggaggaggagcggcgtctccggattccggttgccggaaggcaggtcgatccgggtgtccgcggcggtgtcggcaaaggacggcgcggtggcgacccgggtagaggcggatcccggtacgctggcggaccggctgagggtggggagcttgacggaggatgggttgtcttataaggagaagttcattgtga

SEQ ID NO: 20976 - DNA, 385 bp, Glycine max
atcaagaaggtgtacaaaatgtcctattcagctggaaacggatcctcggttcggctttcaacggagtcttgagtgctaccataatattcttcttctgcatcaacggaatggagaatcaagcattccgtaaagccggggaagttgctgatcttgaagttcttggtgccaccatgtacacttgtgttgtgtgggtggtgaattcccaaatggcattgtccattagttacttcacttacatacaacatttattcatatggggtggcattcttttctggtacatattcctcttagtgtatggcaccatggacccctctctatcaaccactgcctataaggtcttgattgaagcttgtgcaccagcaccatcttactggctcatcacttt

SEQ ID NO: 20977 - DNA, 791 bp, Glycine max
gcacgcgtccgtaagctcggaattatttaattacaactctgtatgtgaattctgcttgcagctgatggcgcaaattctgctccatgggactcttcatgccactatctatgaagtcgataagctcaaaattggtggaggcaactttttaaccaagatcgtacaaaacatcgaggagactgttggtattggaaaaggtgtcactaaactatatgcaaccattgatctagagaaggcacgagtggggaggaccagaattattgaaaaagagattaaaaatccaagatggtacgagtcctttcatatttattgtgcccatatggcatcaaacatcatatttacagtgaaagatgataatcctattggggcaaccttaattggaagagcatatgtgcctgttcaggagatcttgcatggtgaagaaatagatagatgggttgaaatattggatgagcataaaaatccaatacatggacattccaagatccatgtgaagttgcaatattttgatgtttcaaaagaccgcaactgggctctaggcattagaagtccaaaatttcctggagttccttatactttcttttcacaaagaagaggatgtaaggtttctctctaccaagatgctcatgtacctgacaattttgtccctaaaatacaacttagtgggggccagacttaccaagctcatagatgttgggaggatgtttttgatgcaatcactaaagcacaacacttaatatacattactggttggtctgtctatactgagattagtttggtaagggattctagga

SEQ ID NO: 20978 - DNA, 408 bp, Glycine max
tttctcgcttcagcataataatattatcgcctgcatccacagtaacagtacccctctcttcttcatcatttcatggaggattcttcagctggtgaagacaccaagacttgccctcgtggccactggagacccgctgaggatgaaaagcttagacaacttgttgaacaatatggtgcccaaaactggaattcaatcgctgaaaagctccaaggaagatcagggaaaagttgcagattaaggtggttcaatcagctggacccgagaatcaacagaaggccattcacggaagaggaagaagagaggctactcgcggcacatcgcattcacgggaacaagtgggcactcatagcgaggcttttccccggtcgaaccgataatgctgtgaagaatcactggcacgttataatg

SEQ ID NO: 20979 - DNA, 354 bp, Glycine max
tttttcgttcaggcaaaacctaaccacagagaataacgttggtgaaagaacgacgatgacggacgcagcgtccgattcacgaaacgatgcagccgtgcaagccaccaacgacgacgcttccgccagtaaattgtcatgtgtaaaaaagggatacatgaaagatgattatattcatttatttgtgagaaggcctgtgaggagatctccaatcattaatcgtggttactttgctcgttgggctgcatttcggaaacttctctatcagtttcttgatgttgagaaaaagacagatggagatgccccaattaagaagcagatattatcacttggagcaggctttgacacaacatattt

SEQ ID NO: 20980 - DNA, 380 bp, Glycine max
gcaattcctttatctttataagcaacttacacacacacacacacacatgtcaaacctaaacccaaatccaaaccatttcagaatatagcaattgataattaattgatccgaattgttgcggaaatctcaaacctaaatccaaaccatctcagaatattgcaattgataattaacagatccaaatggtggttttagcgagaaagaaacgagtcactgatccgttcgacgacgaagccaaagcacgtctcgtcggcggcggcgaccaccggcaattgagctacgtcagcagcgggagcgaacattccggcaacggcgacggacactcgccgtgtctctccgagctcgtgcatgatttcctcgaggacaatggcgactcggag

SEQ ID NO: 20981 - DNA, 427 bp, Glycine max
cgggtcgtcagagaaagtgaggcttttatttgattctaaaaatgagacgtgctcttgctttgcttcctcttctcttcctgtttgtagcgattggggaatcaagaaaagatggaggaaaatattggaaaatgaacacgagagatcatcagatgccgaaaaaatttaaggctctcctcaaccaaaactttgagatccaatctgaaaagattctcaaaaccaaggaacaaattcttgaaggttctaaacatgattgcgaaaaatctctcgttaagaatactcacaccaccatattagaagattttgaaccaatatcaagtgttccaattcccagaaatgatgacatttatgctaaggaagaaaataaagttgtaaaaaactttgaaccaagacctaatgtttcagcttatggtgacaatgatgttgatgc

SEQ ID NO: 20982 - DNA, 504 bp, Glycine max
aggtatgggattatcattctagaaactgtgtacagacgcttgaaggacatgaaaacaatgttacagcaatatgtgctcatcctgagcttcctataataataacagcttcagaggattctactgttaaaatatgggatgctgtcacttacaggcttcaaaccacgttgaactttggtctcaagagagtatggagtattggatacaagaaaggatcatctcagcttgcatttggttgtgaccaaggatttctaattgttaagatttcagaaggaagaccccaataagccaacatctggtagccagatgactagttatgatgagcttaactgcccagagaacatcatattctgccgttggttgtttatttctgagttgttactagttactagaataaattaatttagaatctacatattaccttatgtaatatattggtgtatgtacctgtgtgttcggattaatgtgttgccatttgagtgatatatataatatattttttttatc

SEQ ID NO: 20983 - DNA, 514 bp, Glycine max
ctccgtttctcactttctctctctgtaagttcgttctaacgcaagcgcaacgcaactcaaacgcacttccttccttcgccgcgtttcctattctcctcagatcactcccgctgtcccgcaccgttatctcgccgtcgccgtttcaaggaaaaaaggcattaaagaaaagattcccttggatcattcatggcatcaagatcatatgttaatctactagacttagctggaggtttactggatattcctcacatgccaagaactattccaaggattatgacagttcctggagttatttctgacctggatgtttatggtagatatgatgcggattctgatgttagctcttctggttatcgggagcggaaaatccttgtggcaaacatgttgccattgcaggccaaaagagatattgaaactggtaaatggtgtttcagtttggatgaggattctattctgttgcaattaaaagatggtttctcttctgacactgaggtgatctatgtgggatccctca

SEQ ID NO: 20984 - DNA, 377 bp, Glycine max
aaacaactctctttctctctctctctctctcagttctttgtaacgaaacgcaacgcaacgcaacgcaacgcaacacaaacgcacccttcctatactccgcagatcactctggcaccgttaattcggcgtcgccgtttcaaggaaaaaaggcattaaagaaaagattcccttggatcattcatggcatcaagatcatatgttaatctactagacttagctggaggtttactggatattcctcacacgccaccctctattccaaggattatgacagttcctggagttatttctgatctggatgtttgtggtagatatgatggggattctgatgttagctcttctggttatcgggagcggaaaatccttgtggcaaacat

SEQ ID NO: 20985 - DNA, 442 bp, Glycine max
atcactgatcctatactacgtcgttgccttcctggatcgaactgaaaccgagtgcttccaactccaagcttcaaggaccactaggatggtaaatgcactaactaggacgcggttacaagatggatatgtctcgtatccatgggagaggaggatgcaggagttgctatcagttcccaattctagcaattttctttcaatattacttcttcccaaagtttcagataggatagctgctcgctacaatgatgtggaggatacactagccagggcaaatacgtggctgaatgcagctcaagcttcaggtgtccctattgtctttatgaatgtccaaaccgagtccctacttactaagatctctggagagacagcttcttccactgtaaatgcaggcccattatccgacttatctaaccttgcaaatgcaagcctttatggctctaac

SEQ ID NO: 20986 - DNA, 492 bp, Glycine max
  unsure (1)..(492): unsure at all n locations
aaatattgaatgtcatggatccttggtcctacctagtttgtgtatgtgcatggattggttcattgagaagcataagagatttgaatgtaggatttcctgcatgttacttgaactcttcaccagcccacttctagtggcttagttaatttaagctgaacaatatcactttcaggatcgaagaaatagaaagagccgcactgcaagtatggaaattgaatctctgaaggatatttctggtccatctgatgctgaaaagttgaaggggggttctgaaggccatgaaccagagacaactcaagggtaggattgacaaccatacttgacttgacttaaccagcttgtacaattggctgtttcgatttccgtaaccaatcaaatactatatatgttcaaagtttgtattgagattttttttccacatccgagaagagaatcaaatctaagaggagaatcaagttggaggtagctcatttggacaatgaagcattntct

SEQ ID NO: 20987 - DNA, 480 bp, Glycine max
cggctcgagatttggttatgtggcaccggaatatgctaatacaggtttgttaaatgagaggagtgacatttacagctttggtgttctcctgcttgaagcagttactggaagggatcctgtggactactccgtccttctaacgaggtgaatcttgttgaatggctcaagatgatggtggggacaaggagaactgaggaagttgtcgactcaaggcttgaagtgaaaccatcaatacgtgctttaaagtgtgctcttctagttgctcttagatgtgttgatcccgaagcagaaaagaggcccaaaatgagtcaggttgtgaggatgcttgaagccgacgaatatccattccgagaggatcgaagaaatagaaagagccgcaccgcgagcatggaaattgaatctctgaaagatatttctggtccatctgatgctgaaaagttgaagggtgggcatgcaccagaaacaactcaagggtaggat

SEQ ID NO: 20988 - DNA, 1491 bp, Glycine max
caagagtactagaggagactgggtcgtgtttttcagaattttgaatactaatttgttttggtgtggggatgtgagaagaaggcacagggtgagggagaaagagggtggtagtttcctgggagaggactttttgcttcattttctgagaactgcttctaaaacttttacattatatttggcatcaagagagactgcatgaatattttaagcgagaggcttttgagggcgttggtagtaagaatggatatccatatccacatgctcctcacgtccatttcttgcttattctttatcactctgccgcagtccctctctcaaccaccatctgtcttcaattattcggcttgtaaggaatggccatacaactgtggaacactttccggcatcttctatccattctggggagagaaccgaccccctcattgtggtggcggcgaagcattcaggctgagctgccatgatgatattactactattctaattgcctcacataatttgatggtgaagaacatccacgacaccactcgaaccatgagagtagtgccaactgaccttgaccccaacgtttgttctctgcaatctaagaacatatatgatgacattcatgcgaaggccactcacttcctgtatcccaatccttcattgtacagcaacaacatatgcgaagggtttgaggtaatttatgatgtttctgaaaattgcacaaaatgcctgggaagtgaaggagagtgctggaaggaagaaattgatgaacatgatatagtttcatgctatttctgcccagatggatctcattccctacgctgttctcctccaaaaagaaatccgcggaagttgagactcattatatggtcttgcaagtgcactaatgggaggattcatgatatgcatcataatttgctgtactaaatctaagtcatccacacaagtaaaattctcgtttacgataaagaatggccaagatatagaatcattcttaaaaaaccatggagctctatcacagaagagatacaaattttcagaagttaagaaaatgaccaactccttcaaagttaaactaggtgaaggtggttttggtgcagtatacaaaggagagctactcagtggtgttcctgtggccgtaaagatattgaatgaatccaaaggaaatggtgaagacttcatcaatgaggttgctagcatcattagaacttctcatgtcaatgttgtcacacttgttggattctgtttggaaggacgcaagaaagctctcatttatgagtttatgcccaatggttcccttgacaagtttgtatacaaaaagggtctcgaaaccacttcatccttgagttgggataatttctggcaaattgccataggtatagcccgaggactagagtacttgcataggggttgcaacactcgaattttacattttgacataaagccacataacattcttttggatgagaatttctgccctaagatatcagattttgggcttgcaaagct

SEQ ID NO: 20989 - DNA, 583 bp, Glycine max
ttcagcttcactcaataaaccattttaaacaaaataatagtattgtatataacataaacgcaaacacggaatagaactcaaatttgcacttggctgctccaatcattgtctattttattttctctcttcgagaatgtgattgtttggggggcaaaaaagaagaagagaagcgcgtgatggagtgggtgaagatgaaggggtacgcgagagagttcatggttggagtggcggagatgacggtggagttcggaaaaggttgcagagacatagttaaacagagtctggtcaacgacgactcctacatcgtcaaaaacttcggaagagactcctacattggaaaaacagtgacagaacctttcgctaatcttttccagaaattgagtttcttcaacgagtacttgcccgaggataaagatcctcttcacgcttggtccgttattttcttcgtttccattctcgccttcttagctttgtatgcgaattttgaacgtgatgcgtacgcggcggccccggtgaagcatgtgtttgtgcatcctccgagtgctacttgcgtagtgcttcctgatggaaggtacatggcgta

SEQ ID NO: 20990 - DNA, 367 bp, Glycine max
ctacaaggcatctcgatgcctatcagtccaattctgtatcagatttcgtggaaaatgggagcccggatggccttgacttcgatggtgaaatgagactaaaacttcaagaattggagagggctttgctttctgatgaagaagaggaggagcaaggcatatttgagactgttcaaagcatggagattgatcctgacatggtcgagtgggccaatccgcttcaagatatgctgctccatgactcaccaaaggagtcctcatcctcagattcttccaatcttagcagcatcagtagcaccaccaaagacacatcacaaaactcaccccaaacccctaagcaactgctttatgattgtgctaggatactttc

SEQ ID NO: 20991 - DNA, 498 bp, Glycine max
ctcgagccgaatcggctcgagatttatctttcttttttccataaaactcacaaccaaatggagaaagcagaagaagaaagcgttgatttgggtgaaatatgtcttcggccccttcaagtctcagacctggatgatctgttggtgtggaccagtgatgaaaaggttgcggctttttgctcttgggatccttacagcagcaaagacgagggcattaacttcatccagaatatagcaagcaagtttctgtggtgcagagcaatatgcctcaaggatcgtgctattggctgtatttccctgtcctcgaattcagagcacgataaaagcaggagcagatccgcggaactagggtatgtgctgggttccaaatactggggcaaaggggttgccacggtggctgtgaaaaaagtggttaaggcttgctttgtctgagttgccacacttggagaggatcgaagctcttgttgatgtgttcaatgttgggtctcagagagtgctgga

SEQ ID NO: 20992 - DNA, 414 bp, Glycine max
ctcgagccgattcggctcgaggaagcaaccacgcatagcgcacacccaaatttcaattcccatatttcaaaacgacgatccctctcaggattaaacgacaactaatcatcttcccaatcaccgcaccgccacctcgtgatggcggcaccaccacctcctcctccttcgacgccgtcgtttttgtcgccgacgcagaggtacgcggcgggcgcattgtccggcctggcacttcacgaggcccacctcaaccaaaccaacccgttaccgttacccgcttcggaggactcgctctctgaggaacaacgaaccagcagtagcagtggctccagcagcgactccgtttcggaagacccggatctttgggtccacagcaattcgggtttgctccgccccgtttttaagtttctagatatt

SEQ ID NO: 20993 - DNA, 398 bp, Glycine max
gaaaggattgtcacatgcacttccctttactaacgtttcaacactagatcagctggaagatgttaaaagggtgttgtcatagtgtatatattgatagaaaaaagaagaagaaggaagtataatagaaaggaaaagggagggaggggggaaataaataaagaaagatgcaagagttgatatacaaagttggtgagggtgactaaatcagattcttgagtgtgtgattgggtcttttggaaggcatgattcgttcattcattcagtgagcattacttgtttatgtaaagctttttagatttggcctgggactcaaaatcacacattattgcaaatatttttgtttttggtgaaattcattattggaagtattattgcaaatatttatcgtattctcaaaa

SEQ ID NO: 20994 - DNA, 613 bp, Glycine max
gcaggacactgtggagtccactgatttgttggatttgtgtcattagtttctttgttttggttactctaaacaagataattcccccctaggggcatatcagtttgcagatcacagtgaccatttgtgtatgaatttctaaggtcttgtcatggagtgtaatgcaaaatctctcgggcaatgggactgggagcacttattcttcttcaatacaaaagcagctgaaaatccaaggttacaaccaactgattgtagcagtgaagcagatcgggaaatcaacgttggaatgttgcatccatcaggtggtagtgcttgttctggctctgaactaatacatgcttcttcatcaaggagctcaaaatcagcttccaacaattcatcatcaaatggggatagcaaggcatctatattgactctggaaggttctcatgatgattccactgggaagaaagaattgtgcaatggagagccaattgaaacttctcctgcagcagtgccctctcctgtctctggtgaaccgttgctcactctaaagcttggtaaacgattgtactttgaggatgtctgtaccggaagtgattccaagaaaccatcttcctttgacgttcccatttca

SEQ ID NO: 20995 - DNA, 375 bp, Glycine max
ggttctaagtgtacccagaaaaagaggcagaagaaggaagaagaagaagattagagagtgagagagggataattggcgagttagggtgtcgaattgactcactgagtatttgcattgtatcgccggttttttttctttcgccggagaaaaccattgctccgatctcctctgctttttgtttccgataccatagccgtttgaaaggttcggtttttccggcgaggagtgtgggattttctggtgattccttggttgtgaattgagtttggcggaattctcgattttgaccctaaagcaaagggatttactcaaaagttttactggatttcgtgtttttgttgttttcttttgattttttgcattgagtagaccgaa

SEQ ID NO: 20996 - DNA, 657 bp, Glycine max
aaattatcagtggaagatgtaacataaactcacgacttccaatagaagaacagtttcttctggagaggacatgggacctttatgagcgaaaggaattggttggactggtggatatgtcactaaacggggaattcgatgctgagcaggcttgtaagtttctgaagattggccttctttgcactcaagaatccccgaagctccggccatccatgtcttctgtggtcaagatgctcactggaaaaatggatgttaatgacagtaagataacaaaacctgccttaatttctgattttatggaccttaaagttagaaggaacgaagaaagtagtattgatatgaagaattcatctatgtatacaacctcttcttcagacaaccatgatagtaccatgtcatttgccacaactactacctttgcagcaatatatgatgaaagcatgtaaacattgatcaataagatttgtcctttactaaaaaaaatgttttgatttgtttaggcatgtatctcatgtaaatttcgcaacctttttcatactttttgagagtggttttgtttcctggatgtagtcctccatgactaggaagttgctatgtgctgtcctgtaaatataaaccgggcttgtgttcgatgataaatttgaaaatcttttcatttcc

SEQ ID NO: 20997 - DNA, 354 bp, Glycine max
tctatttctctgcttctctaatagttgactcccctcactcacattgggcgcaacttcattcgacaacgcctctccgatgcagcaagcagaagagcacctcgacgttctcaccaaaaccggcctcaaaaccggcgtgtccaagcccaggggagacgtgcatcgcgatggcgactaccaccgcgccgtccacgtttggatattcgcggagagcacgcgggaacttctcctccaacggcgcgcctcgtgcaaggactcgtggcccgatctctgggatatttctagtgcccggcacatttccgctggtgattcgtccctcacctctgctagggggggagcttgaaagaagagttgggt

SEQ ID NO: 20998 - DNA, 452 bp, Glycine max
tacatactcacatctcatcccaaagttccctcctttttcactcccacgaaacgaatccatgagtagttccgagtgacgcacgtcatcatcttccaaatccaaccccatttcgcaaaagggtaggtaggcacttactttcaatgatggtggagacctcgacgctagggcacttccaccaccataggctccacctccgccgctgggtccccgcgttcttcacctcgcataagaccctcttgacccttctatggatcgccgccttcgcctccgcccaatggccttcaatttgacggatttcggtggggtcggtgacggcgttactctcaacaccgaggctttcgagagggccgtttctgcggtttctaagttcgggaagaaaggcggtgcgcagttgaatgtgcctcctggacgctggctcacggcgccgtttaatctcaccagccacatgactc

SEQ ID NO: 20999 - DNA, 493 bp, Glycine max
gtttgatcagaaaaagagatcatcaaaaaaactctagaaccctctctcttttattgtgctccccgaaatcaaatcaagatcctctaaattgccctaactaaattgcacaataatctcacaactttgaaaaggagatatagcatcgtttgtctctgctctttgattgcagcgtccggcatgtgattgatgtgtgaattttgaggtgctgtgttccgtttgatgaaaatgagtgttatccgagttgctccatgtcttcctggggtttatgctcccccaatcacgtcgtctcagttgcgtcgccgcgattttaactcaacgccaccttcattgccgacggcgtttgaccctatctctgtcacttccctgagcctaaaagccgaaccctcgcctcgcttgcattgcctgcctgcccttaaatcacggcgacctctcctcgtttgttttgccgccagtggacaaggaatgatggaaaataacagggtaatcatacatg

SEQ ID NO: 21000 - DNA, 1213 bp, Glycine max
gcgaggagctcaggctgtttctcgaggccaaggagcggctgccgctggcgaaaaccaccgacgttgcgtcgcggatgctcgatggcgccgtgagactgccgaggcagctgttcagtggagaggcggactgggagaggtggctcagccggccaagggcgggagggacttgctcaggattttcaaggagttgaagcagtctgttgccaatgactgggttgggagcaagccccgtgttgtggaggaggataaggagttcatggagaggaaggataagttggtggattttgagcaccatcttagcaatgtttctcagcaggctgaatcccttgtcaagtttcagcaagacatgggtgaaacggttggtgaattaggtctggcttttgtgaagcttaccaaatttgagacggaagaagccatatttgagtctcagagagttcgagctgctgacatgagaaatgtggcaactgcagctgttaaagcaagcaggttatatagagagctgaatacacagacaatcaaacatttggataaactacatgaataccttgggacaatgctagctgttaacaatgcattttctgacagatcgagtgcattgttgactgttcaaacactctcatcagaactagcttctttacattcacgggtggaaaaacttgaagttgcttcatccaaaatatcttggtggagacaagtctaggatgcggaaaattgaagagttaaaagaagccattagagttactgagaatgctaaaatttgtgcagatagagagtatgaacgaatcaaggaaaataataggagtgaacttgaaagaattgatcaagagaggaatagtgacttcctaagcatgctgcgagggtttgttgcaaatcaagcaggctatgcagagaagacagcaactgtgtgggagaagcttgcggaagaaacggctgcttacttgagagacagcagctaaaatgtacttggctgtaaattcttgtttttgccttttttatgcagaaaagtagttctagattttggttccattaatgtaatcttatgtagttacattactttagacgaacttagcgttagcccagagttgtatatgcatatatcccttttatttttgtccgacattcaagatttcaatgggttttaagttttaactaatctgagttgtacatttctcgttattcctttgattttcatgttataaagtaatgtttaatt

SEQ ID NO: 21001 - DNA, 643 bp, Glycine max
caagtaactaatcattcaaaagaaagacctgacgtgtgggttgatagccctgagaaatcaattattctgtctataaccagtgatattcgaactatagaatctgaggtattttctgcaccttacagtctcagatttcctaggattgacagggtgagatatgacaaagcttggtatgaatgccttgatgttcaatcatttatagaactggtacattctagcaacggtaccacacagagggatacagaatatggcagcaaacaggacagtaaaccaaaacgatcgaaatcctccactaggggagaaaagaaaaacttgtccattgttccttctcatttaattcaaactgatgtttccagcattaaggggggctctctaatattttcaaatatgatgttctattttgttaatgtgcctctatctcattctctcgagtccttgcacaaaataattgctgagaatgggggaactttttcaatgaatttgaataactcagtcacgcattgtgttgcagcagacagcaaggggtttaaatttgaagcagcaaagcgtcatggtgatatcattcattattcttgggtattagattgctatgatcataagaagcttgtctgcttacagcctaagtacttcctttttctatctg

SEQ ID NO: 21002 - DNA, 376 bp, Glycine max
gacaagttttatatacataaactgaaactcttttattagcacttgtgttaggcttattagtccactcatattttcaggcacttctctcattcaagagtaatggcagaagcaacaaaagggtatgctgtggtcactggagcaaataagggaattggatttgcaatatgcaagcaattggcttctaatgggatcactgtggtgttgacagccagagatgagaagaggggtcttcaagctgtcgagaaactccaagagcttggtctttctggccatgtgggttttcatcaacttgatgttacagaccctgcaggaataagatcacttgcagatttcatcaggaacaaatttggaaaactagatatcttggtaaacaatg

SEQ ID NO: 21003 - DNA, 378 bp, Glycine max
ttctcctttagacgaggcatcacgcgataaccatcagaatggttccgttcccgtcagagaacggcgttgaaggagacgacgagagagaagaggaagacgaagaggaagaagaggacgaggaagacgaagaacttggcggaagatgaagaagacgaagaggaaccgaggctcaagtaccagagaatgggaggtagcatcccttcgctgcttgcgagtgacgcggcgtcgtgtatcgccgtcgcggagcgcatgatcgctctcggcactcacggcggcaccgttcacatcctcgattttctcgggaatcaggttaaggaattctctgcacatgcttctgttgtcaatgaccttagctttgacacagaaggtgaatatatt

SEQ ID NO: 21004 - DNA, 658 bp, Glycine max
cagagagaggggacgttaattgcagggaaagaggaaggggtaatgggagtagggtaagagttgtggttgatgcccctgcgcctggtgggaattacagttatatcgcagctgggtttaggcatgcctgtgtcatatctggtgatggtagcttgcattgttggggagacatggaggagggtcagaaaccaccgcaagctgggagcttcatttctctggcgttgggagagaagcgaagctgtgcacttggggacgacagaagagttgtgtgttgggggtccaataatttcagcatgccacgcagattgcaagacacttacttcgaatcaattgtggcaaagcgaaccgttttctgcggagtcttgtcttctgactattccttgctctgttggggttccaaaatatttgagtcaaacaacaaggtgtttgacgacgtcctcccaggaccttgtcggaacgagtgcccgtgtgggccccagtcaaattcagccaaactatgtaatccacctggaggagtcatttgtcaaccctgttcccccagagtggttcaatctccctcgcctccatcgaaccaaagtggtggttggagcagccaaatggtggcgtttctggtggttggttgtgtgggatgcagttctctattgctagtcacggccttctt

SEQ ID NO: 21005 - DNA, 661 bp, Glycine max
catttaatggcataaattatgttatacttgtacttcttaccatcaccattctgttctgtccactgctaatgaatatcttcaaatccgttttttccgaagacccggatcctccacgacccggatccaaccatgcatcgccagacaaagcaccggatccccattccccgccccgatcgaatgccaccgagtccgctgccggaggaggcggcggcgacggttggaacttcggcggcctcatcaaaacccttacatcgaaatcggaatccataattgagacctaccgtcgcgatctgcaggaattcggcaccggtttgaagaaagagatcgaggtcgcgcagggttctctcgggaccgtgggccacgtcatcgatgagttcggaaacaccgtcgtgaaaggaacggctcagatcatatctcaaggtaaggacgccatcctcgccgtcaatctcgattccgattccgatagtaacagcgccaatagaaagagcctcgattcggttcggtacagtaggttcgacgctcaggttcgtgctattcagggtgatgttagcacttactccgaggagcccgaggatttgaatgagttcaatgagtggaaattagggttttcgttggaggggaagggtgaggaaatgcaggggcttttcagagagaatgatgc

SEQ ID NO: 21006 - DNA, 886 bp, Glycine max
agccatacgtgttgaaatcactcaacgaagtcgatgctataaatttatttcgccactctgcatccctgaatcagagtagctctgacattcctgagaatattgtcaaaaagattgcgagagggtgcagtggttctcccttggcacttatagtgactggcaaatcactaagtcgtgaaccaccgtgggcttggaacaacagggctaagaaactgtccaagggtcaaccaattcttgcttttagtgcagatgtgcttacttgtctccaaaaaagcttcgatgacttggatcctaaggtggctgagtgttttagggacctaagcttattccccgaagcccagaggatacctgctgctgcccttgttgatatatgggcagaactgcgtgatgaagatgatgacagcgcaatggagaatatctatgaactcgtcaaaaggaacatggctgatattgttgtcacaaggaatatttcaagtggcacgattgactataattaccactatgttacacaacatggtcttcttcgggacctagctatccttcaaacgaacaaggaactaatgaagaagaggaatagactgattattgacgtaagtggtaacaatcttcccgattggtggactacacagaatgagtatcacattgcagcccactcactatccatatcaactgatgacacattcacttcagaatggtgcaacttgcaggcatctgaggttgaggttctagtgctgaaccttcgagaaaagaagcggtcgctaccaatgttcatggagaaaatgaataaactaaaagtcctgatagtaacgaattatgagttctatcgcgctgacttggaaaattttgagctgcttgataatctgtctagtctcaaaagaatcagattaga

SEQ ID NO: 21007 - DNA, 273 bp, Glycine max
tataagcaaggaggtggataatctgtttgccaacgtaatgactcagagatctgaattaattgccggtttttggctccagaaacaacctcaaaaatcaagtgtctgatcatatatattatgtatagatcaatagtttttaattacttttggattgtttataaattgtatcaagtcatgtaaatagtaatacacagttccagtggttatttgcacacttaggaacatatgtaatgaataatcaaaattatggttcttcatattttcagttgtccc

SEQ ID NO: 21008 - DNA, 1038 bp, Glycine max
tatttatataagcaaaactcctccatttcctccctacccctttcttctttctccctcagctccttccaaaatgaagttccaagttatagagcttctctttggtaaaagcaccccaaaacaaatgatcccaaaagtgactttgcttgcagtgtttgccgtactgctattcactgtcacaccactctcctaccctttgtttagatactcttcttcatcaacatcatcacctctgaagagcaataagcaattatccgagaagccatcgtcagcatttgatgatctgaatgagtcagcaagcttgccttcaacttccataaagaagtgtgacattttcactggggaatgggtgccgaacccaaaggctccatattacacaaacaaaacatgctgggctattcatgagcaccaaaactgcatgaagtatggaagaccagactctgagttcatgaagtggaagtggaagccaaacggatgtgacctacctgtgttcaaccccttccaattcctagagattatgaggggaaaatccatggcatttgttggtgactcagttggcagaaatcagatgcagtccatgatttgccttttatcaagggtggaatggcccatagatgtatcatacaaaagagatgactactttatgcggtggaagtacccaagttacaacttcaccatggctgctttttggacaactcacttagtgaaatccaaagaagcagatgcaaagggtccaggcccaacaggcctttgcaacctttaccttgatgagccagatgagaaatggataacccaaattgaagattttgaccatgtcattctcaatggaggacattggtttacaaggtcaatggtgttctatgagaaacaaaaaattgttggatgccactattgcctcttagaaaatgttcctgacttaaccatgtactatggctacagaaaggcttttaggactgcatttagagccatcaatagattagagaacttcaaagggacagtgtttcttaggacatttgctccatctcattttgagaatgggtt

SEQ ID NO: 21009 - DNA, 461 bp, Glycine max
ccgacccaccacaataatagttgtgattctgtcacgtctcttccattggttacctttccaaatctcaaaactctccaaatcgaaaactgtgaacatatggaatctcttttggtttcaggagcagagtcatttaagagtctgaggtctttgagcatttcccaatgccccaactttgtatcattctttagtgaaggattgcctgcgcccaatttgactcaaattgatgttgggcattgcgacaagttgaagtcattacctgacaaaatgagtactcttctcccagaaattgagtcgtttccagaagggggtatgctacctaacctgacaacagtttggattatcaattgtgagaaactactgagcggcctagcatggccatccatgggcatgcttacccatctctatgtggggggtccatgtgatggcatcaagtcattccctaaggagggtttgctgcctcc

SEQ ID NO: 21010 - DNA, 579 bp, Glycine max
ttggtttcgaattttcctctgtttccctcttagactctctctctgctttggttttctcagatttttccaagttcgcggctcttccaggttgaatttgtttcttcgtaggttctgttgcagtgagaaatgggcactttctccttttgattttcccgtcgaatcaagcatcaaaatccgagctttttcttttttgcaagtggtttttttgatttggggtagatttttttctttctttttttgggcttcgtagtgcattgaattggcgcggcattcacttgaatttgcaacgtgggagccggagctgcgatgaagtgtggtgcttggagggtattctcaaagtagcacttaattcgaggttgaatgtttggtcagagcatggattctgcaagggatgctgcgggtggtgtggcagggacagtgctaattcccatgcgttttgtgtggccatatggaggaaggagtgtgtttctcagtggttctttcacacggtggttggagcttctaccgatgtcgccagtggaaggttgtccaactgtgtttcaagtgatttataagttgccacccggttaccatcagtac

SEQ ID NO: 21011 - DNA, 364 bp, Glycine max
ccctcgcgtccttccacgcgtccgaatctctcggttttcttaacttgtctcttctgatgtttcaatagggtttcgaatttttctctgtttccctctgagactctctctatgctttggttttctcagatttttccaaattcgcggctcttccaggttgaatttggtagttttttcaatctagggttagggttttgtgcgtgctagtcaatggtttgttgcgtgcaaatttcatgaagagtgttatttatatttccgtacccgcttcagtttcttcgtaggttctgttgcagtgagaattgggcactctctcctttcgattttccggtcgaatcaagcatcaatatctgcgatttttcttttttgc

SEQ ID NO: 21012 - DNA, 1135 bp, Glycine max
cttacgaaggattatacctgagattatggagaccctattaatccgcataactcgtgattcaattaataggactccacctgcatcgacggaagtttcacagcaaaagcattacaaggaagaacattctcagggagtggtgcatccaagaaatggtagtcacggttctgggcctgctcaacatgcttatccatattatatttcaggagttgttaatcacgttatgatgccatcatcggcacaattgtatcaaaagaatatccaggacctgcagattcatgctggttcttctatgattgcacagtacaatcatcttccccaatgtcctcctcatgcgaatgggatgacaaatttcccatattatccaatgagcatttgcttacaacctggtcagattcctaatcctcattcatggcaatcatttggaaactcaagttcatctgaagcaaaattaagtaaagttgataggagagaagcagcattgatgaagttcagacagaaaaggaaagagcgctgctttgataagaaaattaggtatgttaaccggaaacgacttgcggaaaggcggcctcgtgtgaggggtcagtttgtcagaaagttgaagggtgctaatgcggatcttaatgggcagcctgcatcgattgactatgacgaagatgacgaagaggatgaagatgaccagggagcaagagattcttctcccgaggatgcttgagcatgtcaaattgctattttgacataaggatgaagggccaaccaatttatgagctaatattggcctgtcaaaaggactgctgtaatggaaagttctctcaccaaagcaccaatttatgagcttgtgctcatgtatttggggtgttgatccaatatgcgccctcatcatttatggttgaaacaagctcattctggtctttttttaattgcagttcatcaaatgatccgtactactgagctattgcgtagggtatttacccttctggtggttatgtcctatgcagttgaaagtatcacccctgcgttttattgaacagttacaagcaggttgttcttgcttattttatggagaaatgttaagacatctttaaaaaattgacctgagaaatgagttatttgactatttatctaaagttttactttc

SEQ ID NO: 21013 - DNA, 646 bp, Glycine max
atctctttccgctagtaaaagaaagaaagaaaagaaaaaattcaaatggtaaccacgaaatagcagcagcatacatatattcaaattaaaacccgctaaaaactgtaattgcttcttcgttttcttcttctgcagcttctcgcttctctcagttcagtgcccagagtagaggctagagctcctttcagaagaccgaaacctagggttagtgttttcgttcttgtgcagactgcagagccatggaagccgcagtggtcgaccccggttccagcctcctcaaagccggtttcgcgattcccgatcaagctcccgccatgataattcctacccaaatgaagcgaatgctcgatgatgggtcgatgacggataacccggcagtcgatgacgttgccgttgatccggtgtgcagaggttatgtcagtgattgggatgccatggaggatttgctgcattatgtattgtatactggctttggatgggaaatgggcaatgaaggacaaatactgttcacggatccactttgtactccaaaggctaacaaggaacagttagtgcaactaatgtttgaaacattcaacatatcagggttttatgcttccgaacaagcagtgttgtcactatatgctgtaggacgtatctctggatg

SEQ ID NO: 21014 - DNA, 694 bp, Glycine max
tgcacgcgtacgtaagctcggaattcggctcgggctcgagccgattcggctcgaggcgatatgtatctattgcagctgtgcagtggagttgatgaaagtgcagttggggcatgtgctcaacttgtgtttgcacctattgatgagtcatttgctgatgatgctctgttactgccatctggttttcgtgtcattccgttggatcctaaatcagatggtccagcttcaactaggacattggacttagcatcaacaatggaagtaggttctggtaatgcccgtccagctggggaagcgtgacttgaatggctacaaccttaggtcggtcctcacaattgcattccaatttacctttgagaaccatttgcgggacaatgtggctgttatggctcgccagtatgtgcgtaatgttgtgcgatctgttcagagggttgccatggcaattgctccctctaggctcagtacacagttggggccaaagtcatttcctggtccaccagaggcccttaccttagcaagatggatctgcagaagctacaggctccacacctgcacagagctttttagcgttgagtccacatctggtgatgcaatcttgaagcaactttggcaccatccagatgcaatattgtgctgttctgtaaaaacaaatgcatctccagtgttcacctttgcaaaccaggctggatttgacatg

SEQ ID NO: 21015 - DNA, 516 bp, Glycine max
caagagcctatggcagtgtgctcgatcttttcactactttcaccaatatctccattgcccatcaaaggtggaacttaattgtgtgtcatcgactactgtgaaccatcttcattcgatttcggagcctaaattaggtcataaatcaaacccaaaaacaccatgaaaggaaacaagaagccttatctagttgcgatcctcatagaagccatctatgctggcatgtttcttctctcaaaagctgcatttgaccatggcatgaacaatttcatctttgtcttctatagacagacaacagccaccatattccttatcccttttgctttcttctttgaatgcaggaaaactgcacctcctttgaccttggtgaccttctgcaagatctttttcctttctttcctggggatcagtgcgagcttggacatatatggtattggacttatttacacttctgctactttagctgctgctaccacaaactgccttccagtcatcaccttcttcttggcgctcatactc

SEQ ID NO: 21016 - DNA, 621 bp, Glycine max
  unsure (1)..(621): unsure at all n locations
ccggaacacgcatatgtagctcctgatccgtttagagagacacaagctggggtccatttttcaaatggagcctggaatttgattcacccacagaacaagccgcgtgtgattgaggatggtgtgatgcanggttctgtaacagccacaggattgagggagaagaggagttatctcatgaatgatatgtcacatgaagaagagagaagcaacaagctttcttctgtctactccgatgattcggagccatctagcatgtttgatgaggtgctgctttgtaaggatggtaagagtccatccattttttatgctggccgtgaaccatcaccatcgcagattgctgactcaggaggatctaatgggaagaaaacacgatcaaagagaggttccaataaggggacaagggcaagcgtgacgacggtggatttatggactttgctaattcaatgtgcacaggctgtggctagctttgaccaaaggactgcaaatgaaacactgaagcagattaggcagcactcttcaccttttggcgatggacttcagcgtttggctcattacttcgccgatggcctcgagaaacggttagctgctgggacaccaaagttcatttcctttcagtcagca

SEQ ID NO: 21017 - DNA, 538 bp, Glycine max
  unsure (1)..(538): unsure at all n locations
atccgatcaaacaaacatcaaacccatttttctatttttttttcttttcttttctctcttacacaccttccatgccttctcttttcaagagatctttcttccttctcctcctcctccttcatctccacaactcttaaaaaccctccttatcgatccaacaagcagcaaactcactgaacaaatccacaaacagaaacaaagatcctactcgtgtagatctaataacatcaccttcttcttctcctacagatcatgaattcctttcaagaatttgactcatcaaacacaaacagtaccaaagccaccaatttcccatcatcatcatcagcagcaccagcagcaacagcaccaccatgttcttcttcttcttcttcgaccactctgagccgctacgagaaccaaaagcggcgcgactggaacacgttcgggcagtacctncgcaaccacaggcccccactctcgctctcacggtgcagcggcgcgcacgtgctggagttcctgcggtacctcgaccagttcgggaaaaccaaggttcaca

SEQ ID NO: 21018 - DNA, 348 bp, Glycine max
tgatgactcgtgggcggacgcgtgggatccgatcaaacaaacatcaaacccatttttctatttttttttcttttcttttctctcttacacaccttccatgccttctcttttcaagagatctttcttccttctcctcctcctccttcatctccacaactcttaaaaaccctcctcatcgatccaacaagcagcaacctcactgaatctacaaacagtaacaaagattattactcgtagatccaataacagtaataacacctcagtttcttctcttaacagatcatgaattcctttcaagaatttgactcatcaaacacggacagtaacagtaccaaagccatcatcaac

SEQ ID NO: 21019 - DNA, 612 bp, Glycine max
caattaagcccctctggtctctcactcggactttctctctttgcttgggacacggccataggtcaaaccaactcagctagctgcatactcttctttttctttcctcacaccttaagaaagaaaaaacaccaaaaaacacactgtgatagaattcctaaaaaatggtttcagaaaaacagggttagcaaaaagcaccttgcatcactacgcttccaagtattctaggagttatcaaaaaacaaaagggcttgaaggtagcctagttactagcaaaatagatcatgaattcctttcaagaatttgactcatcaaacacggacagtaacagtaccaaagccatcatcaacttcacatcaggtaacagcaccaatttcccaccagcgccaccaccatcatcatcttcaccgccatgttcctcttcttcttctggcaccaccaccctgagccgctacgagaaccaaaagcgccgcgactggaacacgttcgggcagtacctccgcaaccacaggcccccactctcgcttgcacggtgcagcggcgcgcacgtgctggagttcctgcggtacctggaccagttcgggaaaaccaagggtcacacgcagctttgtccat

SEQ ID NO: 21020 - DNA, 524 bp, Glycine max
cctcgagccgaatcggctcgagagaaacccgagtcaatcaaatggacccagagccatgaatccaccgccagttggacttcaagataatcgcaatcgtaataatacaaactctcatcgacctggcaactttaatccaaatgttccgctaagtggacctgctacaaatcatggtcatggcaatactgatcagttatggagcaataacagtaatctacagggcaatcatcaaatcccttattcacagccattaagaccaaacaacttcccattgcaacctccttttgcacctagtaattcatatacaccaaattcccatacttttccaacttcagtggttccacctaggactggtggtcccaatttcacttcaggaccacataccaatgtgccagatattggtagtctgagcatttctggatatcctaatagtgttcataacccacctattgttccgcaacggagtggggagttgaaacagaatcctaatagtaatgctccacttcttttaagatcaattgatgaca

SEQ ID NO: 21021 - DNA, 342 bp, Glycine max
atcagcacaagttgttgatgagcaggtttaccctcatgttgcaactgggttctctgatacatctgcttttctgagggaacttactctcaagtccatgctaattctggctccaaagctgtctcaaaggaccttttcaggatcattattaaagcatatgtcaaagttacaggttgatgaagaaccagctatacgaacaaatactaccatcttattgggaaatattgcaagccacttaaatgaagggaccagaaaaagagtgttgataaatgcatttacacgccgtgctttacgtgatacctttccccctgctagaggagcaagcattatggctttatgtgcaac

SEQ ID NO: 21022 - DNA, 429 bp, Glycine max
aattcttttgaagagttggagccagaatatgccaagggttacaaaaaagcaagaaatggaagagtttggtgcattggtcctgtttcactcagcaacaaggatgaactagacaaggctgagagagggaacaaggcttcaattgatgagcatttttgcttgaagtggcttgattcgcagaaaccgaagggtgtgatctatgtgtgccttggaagcatgtgtaacataacatcacttcagttaatagagcttggtttggccttggaagcctcaaaaagacccttcatttgggtcattagggaagggaatcaattgggggaattggagaagtggattaaggaagaggggtttgaggaaaggaccaaagatcgaagccttgtgattcatggttgggctcctcaggtactgattctttcacacccttcgattgga

SEQ ID NO: 21023 - DNA, 606 bp, Glycine max
ccacttcgcagctcaccaaaggagtgtcttttcttttaatcaagttagttgtttatatttaacaatctagagttaaggatttctgtgttggttttgtttttcgtgctaagatttaaggattttaaagaatggacacaaaagtgctttcttccggagttcagtactcaaatctaccggagagttacatccgacccgagtcggagcgacctcgtctttccgaggtttcggagtgcgaggatgttccaatcatcgacttgggttctcaaaatagagcccagattgttcaccagatcggtgaagcctgcagaaactatggtttcttccaggtgattaatcacggggtggctttagaagcggcaaaggaaatggaagaagtggcacatggattcttcaagttaccagtggaggagaagctcaagttgtactcggaagacacatcaaagacaatgagactgtccactagttttaatgtgaaaaaagagacggtgcgtaattggagggattatcttaggcttcactgctatcctttggacaaatatgctcctgaatggccttctaatccaccctctttcaaggaaactgtgacagaatactgcacattagtta

SEQ ID NO: 21024 - DNA, 300 bp, Glycine max
tttgacgcctcactcctcacttccctcttcccactccccagatcccaaaggagtgtcttttctttttttatcaagtttgttgtttatatttaacaacctagagttaaggattttttttgtgctaattagatttaaggatttttaataatggacataaaagtgctttcttccggagttcagtactcaaatctgccggagagttacatccgacccgaatcggagcgacctcgtctttccgaggtttcggagtgcgaggatgttccaatcatcgacttaggttctcaaaatagagcccagatt

SEQ ID NO: 21025 - DNA, 869 bp, Glycine max
cgtttttctgctctccaattcggagaccgaagaaccaaaacagactgagtaattggtctctcttcctccgctgcttctacacacaatgaaggtcaaagttatatcacgctccgtggatgagttcacccgagagcgaagtcaagaccttcagagggtgttccggaattacgatcccagccttcgtcctcaagagaaggcggtggagtatgtgcgtgctgttaatgcggtgaagttggacaagatatttgcaagaccatttattggagcattggatgggcatgtagatgctgtttcgtgtatgacgaggaaccctagccagttgaaagggatattctccagttcgatggatggagatattcgtctctgggatttagctgcaagacggacagtttgtcagtttcctggtcaccgaggtgctgtacgaggcttgacagcatctacagatggacgcattcttgtgtcatgtggaactgattgcactatcagactctggagtgttcctattactactcttatggagtcagatgactcaactaagagcactgttgagccagcaagtgtttatgtttggacgaatgcattttggggtgctgatcaccagtgggatggcgagcattttgccacagctggtgctcaagtagatatatggaatcacaataggtctcagccaataaacagttttgaatgggggacagatacagtaatttctgtccggtttaatcccggagaaccaaatctcttggccacctcagctagtgaccggagtataattctgtatgatttgcgtatgtcttccccagtgaggaaaatgataatgatgaccaaaacaaattctatatgctggaaccccatggaacccataaatttta

SEQ ID NO: 21026 - DNA, 559 bp, Glycine max
agggaattgtggtagggaccaagaaagactagtctcactattgagcgcggcagattcatggttgaagcaactaagggtccaacatcatgacttcaattacttcatgggcgctcggcatggctagaacaaattagtgcacactactttgcaaaattgacccctaaaaaatcctttttttttggatatatattttgttgttgtgcccttgcttggaccattaattgcacccctttttgttggcttttgagtgtgatgaggaatgaggatttgtagtactttgtagttgtttaattgaccctttgagagcattttaattaggacacaagcccttgtaagggtatgtaaccgatcaaatgagttgactcctttgtatatagagtggtaggtgaggaggccagagttattataatttactaagatgatgtgagagtgagactacatagaactttgaaacttggattgtgtatgatcacttgctagtattgaccaatgatgatgatgaccattatagttgaaaaaaaaaaaaaaaaaaagggcggtcgtcgactagtgagctcgt

SEQ ID NO: 21027 - DNA, 413 bp, Glycine max
tgacgtcgcacgcacgcgtacgtatgctcggtattcggctcgagccttcgttccggtgcgcatgcgcaccggccagggcggccacgcctggatcgacttcggcggcgagaatctcgagttcaacgtaaccgtcgcgccaatcggcgtttcgcgccctacgaaacctactcttcggtatcagaatcccgccatagctgactacgtgtccagtaacatgtacgtagggttttccgcttcgaaaacgaactggatcgaggcgcagagagttctcgcatggagcttcagcgattcaggacctgcaagggagctcaacacaacgaatttaccagtttttgaactagaatcgtcttcttcctcgctttctaacggtgcaatagcggtcattgtcatcggtacttttatttttgctctta

SEQ ID NO: 21028 - DNA, 704 bp, Glycine max
gacgacctttacagtgatggcctgcccttgcatgatgaaattttgaagaaaattccattgttacaagtgctcacaaagatacaagaatgcagccaggggcttcttaagtatgacactcccaagattatttctaaggacaagttttcctggctgcgagatgatgaattttcccggcaagcaatagcaggagtcaaccctgttaacattgaggggcttaaagttttcccactggtgagcaaactcgacccggaaacatatgaccaccaagattctgcactcaaaaaagagcatattctaggacaacttaatggcatgaccgtgcaacaggcaatagtggaaaataagctgtttatggtaaagtaccgcgatgtctatgttccatttcttgacgggatcaatgcccttgatgggagaaaatcctatgctacccgcaccatatttttcttgacaccacttggcactctcaagcctattgctatagaacttagcctcggaccaagttccggatggaaacgtgtagttacccctcctgtggatgcaactacaaattggaagtggcagcttgccaaagctcatgtttgtgccaatgacgctggtgtgcaccaacttgttaaccattggttgcgcacacatgcctgcatggaaccatttatattgtctgctcataggcaattaagtgcaatgcatcctgtttttaagctgtg

SEQ ID NO: 21029 - DNA, 451 bp, Glycine max
  unsure (1)..(451): unsure at all n locations
tcgctttatttgnctttctcttccttccccaccaaaatttccctttcacacttcacaaaaaagaaatactaaatgatttgtcagtagcagcaaacatgtccagcaagggaaaggagatagcagaaggatcatcaacaacaacaacagcaacaagatcctctcatggaggtgacgatcatcatcatcaccacaatcagcagcagcagcaacaacaacaacagttaccactgagtcgctatgagtctcagaagagaagggattggaacacttttggacagtacctgaggaaccaaaggcctccagtggcactttctcagtgcagctccaaccatgttcttgagttccttcgctacttggaccagtttgggaagaccaaagtgcactcacaagggtgcttgttctttgggcaaactgagccgccaggaccctgcacttgccctctcagacaagc

SEQ ID NO: 21030 - DNA, 520 bp, Glycine max
  unsure (1)..(520): unsure at all n locations
ctctagttggaaaaattccagtttttctggatggtggaattctccgagggacagatgtttttaaagcactagctcttggagcagctggtgtatttattggtagacctgtggtgttctcattggctgctgatggtgagactggtgtgagaaaagtacttcaaatgcttcgtgatgaatttgaactaacaatggcactaagtggttgccgttcgctcaaggagataactcgtgaccatgttgtcacagagtgggatcacccaagattttctcccaagttataagatggcaggactccaccttgttcttctatattctaaaatagaaattttagaataacctttgttcttatttcatgcttctgtggaaaactttgttgttaccgtgagtcaggcattagtcatccattagtaattgctacttcattttgttgcatttggtgctaggatttggtactctagaaacatgattgccaataaaatgtactttttttcttggaagggnaaaaataatagngaaatat

SEQ ID NO: 21031 - DNA, 465 bp, Glycine max
accattcctgggggctttctatttgcctgccactgaactctcacaactcaatactcatctccccaaaacttaaataaattaacaaacaatcgatctcacttaacataacgccattttcgtgcttttatggacttgcctcgccaagagcttttgtgattgtcaagttgcgaagcgcgttgcggatctgtaatcggaaatactggatcgttccaatggctgggagtaacgagcttaaccccaacgattctaagatggtggttccgctgaatatgtgggttctgatctcaaatttcaagttggcatacaatcttcttcgtcgcccggacggtactttcaaccgggacttagcagagttccttgatcggaaggttcccgcaaatgccaaccctgtggacagagtgttctcctttgatgttgttggtgaccgtgaaacgaatcttctgactcgaatctatcgtcctactg

SEQ ID NO: 21032 - DNA, 372 bp, Glycine max
  unsure (1)..(372): unsure at all n locations
tagagtccgctcaaagttcaaggatttgctcctttcctcgccgccaccgccgccgatgatcaagaaacgccaagagcgggaggggctgctccccggtggcggcggcggcggcttcgggttccgattacgaagcggttccggtttccggcgcggcggcgccgcctcactcaggcttagactgctgagaagagcttggcgacctgtgctccaatccatccctgagtagtcagtcactcactgttattatttactgctgtgaaattattattagttcttatgaacttattacggttttgtttattaataattcttacggtgaaattaatatattatcacatttattgtaattnctacttttgtgtaattattttt

SEQ ID NO: 21033 - DNA, 528 bp, Glycine max
ctttggaatagttttcaaggcatgcttgactgatgggtctgttgtggctgtcaaaaggttaaaggactataatgcagccggtggtgagatccaatttcagacagaagttgagaccataagtttggctgtccaccggaatcttctgcggctttcggggttttgcagtactcagcatgaaaggctccttgtttatccctacatgtctaatggcagtgtagcctctagattaaaagatcacattcacggtcggccagctttagattggacgaggcgaaagagaatagctttaggtacagcaagagggttggtttacttgcatgagcaatgtgaccctaaaattattcaccgcgatgtcaaagcagccaacattttgctagatgaagactttgaagctgttgttggtgattttggtttagctaagcttctggatcatagagattcgcatgtgaccactgctgtgcgtggcacggtcggtcacattgctccagagtatctatccactggccaatcatcagaaaaaactgatgt

SEQ ID NO: 21034 - DNA, 704 bp, Glycine max
cggctcgagctcttcttcattctctttccttttagctagttactatccgtccaaactccacatttaactcatcgttttcttcatacttctgacctgctagtgctactcttcaactttctcactattcgtttgttcacacttctcaacagttttaaaaaagaaagaatgggaacaactctcagcactcccaaaactgaaaagtcttccgatgatggtgaaaatgagcatcttagatatggtttatcatctatgcaaggctggcgtgcaacaatggaagatgcacatgctgcacatcttgatctggatgcatccacttccttttttggtgtttatgatggtcatggaggtaaagtggttgcaaagttttgtgccaagtatcttcaccagcaggtgctcaagaatgaagcatacatagctggagatataggaacctctcttaaggaatcatttttcagaatggacgacatgatgcgtggtcaaaggggatggagggaattagcagttttgggtgataagataaacaagtttaatggtaagatagaagggttgatttggtctccacgaagcagacatagtaaggagcaagatgatacttgggcctttgaggagggccctcattcttattttgctggaccaacttcaggaagcactgcatgtgttgcaattattagaaacaacaaactttttgtagcaaatgccggtga

SEQ ID NO: 21035 - DNA, 712 bp, Glycine max
accaaacgaaactctttctcactgacatggctttctgttctccaaaattcctcagcctcctcctcctactctctgccatacccatcggaatcatcgtcactctagagcgagccaaacccgccacccacgtctaccactaccacagtaacggctggttccgagaatgcgccaagtgggattctcataaccgccgcttcattgtttccttcttcgaaggtggtcttggtcaggttttgctgccggagaaggattccgagtcgtcctcgtcatcgccgccgttggaggaagtcacggtggtcagagatgcacacttggccggaaatgcgtcattgggcatcgccattgacccacccagaaatcgagtcctcgttgttaacgctgacgtcatcggtaatcgatacggtgcgcttgcagcatacgatctctccacctggaatcgcctctttttaacccaacttagctctccaagtgatgagaaatctttcgcggatgatgttgcagtggacgcagaaggcaatgcctatgtcacagatataaaaggcaacaaaatctggaaagttggggtggaagggaagcttatatcaatcattagaaacccgttgtttagtgcaaaagagtggtataagaacttggttgggctaaatgggatagtttaccacccagatgggttcttgattgtgattcacactttcagcggcaacttgttcaagat

SEQ ID NO: 21036 - DNA, 554 bp, Glycine max
aagagcttgtcgacgatgcatcgccgcgtaagctgcgaattcggcttcggccacctttcttctccttttttcgacctcctctactgttcttcctcttcactgctcttcctcttcgattagggtttcattttttcaacccgatctatattgcgttgccgcagctattccttcctctcttcgattttttcacttctcgctcttacacgatcttaagcttcgaagtattacaagtttgcttcattgctatgtggtgccacttggcttatcaccggcaaccacctggttatcctgtgtaaaactccatggtaccagagggctagggagtcatgggctgctctcaggatgctaatttttataggggttccttgtgctgtcagctaattctatttttcatctggcttcctactttccaagatgtcacagcaccggaaatacatgctgaccatagaagaatttctactctggtagagttagctaaggaacctgcttctggagaatctgggctctttgaccccatagaaatatcacctgctgtattaccaaaattcccatat

SEQ ID NO: 21037 - DNA, 472 bp, Glycine max
ctcgagccgctcagcttacccaactaaactatgtgattaaataacttaagcagagacattaaggcgcacaataatgacagcgaaacaagggaaggaagggataattgagtgtgtggtgtgtagtgtggcagctccgtcagcgtgagatggacgccgcagcaacaggttcggagctgaacaagtccggaagcggaggttcggagcgaagtgaggacagcggaggagggatatttgagtactctggctgggtttatcacttgggagtgaattccattggccatgagtactgtcatctccgattcctcttcattaggggaaagtatgtctccatgtacaagcgtgatcctcacgataaccctggcctcaaacctattaggcagggagttgtaggacccacgctaatggtggaggagctaggtcgttgaaaggtcaacaatggggatccttatgttttactgtttttcaatcgatt

SEQ ID NO: 21038 - DNA, 354 bp, Glycine max
gatagcgaaaaaaggaaagggagaagaatccgataattgagggtgcggtgtgtggtgtgtagtgtgacagagatggacgccgtagcaacaggttcggagctgaacaagtccggaagcggaggttcggaacgaagcgaggacagcggaggagctggaggaggagggatatttgagtactctgggtgggtttatcatttgggagtgaattccattggccatgagtactgtcatctccgattcctcttcattaggggacagtttgtctccatgtacaagcgtgatcctaacgataactcctgtccttaaacccatcaagcagggaattgtatgacccacgctttatgtggaggagct

SEQ ID NO: 21039 - DNA, 726 bp, Glycine max
  unsure (1)..(726): unsure at all n locations
cgcgtacgaagctcgtaattcgactcagctttttaaaaattgttgtcaacaaacgacaaccacgtatgggcgaatatttanaaggatgcaggagctcaacaaataccctacagaactattctggagacgaggagttatgctgcgtctatgttcctacaaatcatctttatattggtgatatatatcttgtcaacaccaatgatgtcattaggccaaacttatcaattcgtgaaggaattgagattgttgtttcgggaggtatgtcaatgccacagatcctatcaacgatcgattcacgcatcagactaggggaaataagtagaatcaacagaagctgagtgaagggctatattagtttttcatgttatagttccttggtatcttgtgaagccatcagaatgacaatgcaatcattggtttggatgcaagtattgaatatacgtgattgattgttctgagaaagtcagactctgatggcttgtgtaacattcgtttgagtaagaatgtaggatttagcatttgtttgacaaccttacagaattttattctctgcttcgagtctcgaatttttacctgtgtataatgtactactactggttctcactcgttatagcaattcaattttgtagtgctgattgattgattgatggtttctagcttaaaaaaaaaaacaaaaacaaactaaaaagccaacactcatatataaagaccaaaaaggtggttgct

SEQ ID NO: 21040 - DNA, 430 bp, Glycine max
gcgtccgtaagctcggaattcggttcgagctttttcgccaagaaacttttgcaacaacatagcattacatggtttaacttttgcaaggtggcattgaattgaaccaacgtgtgtgtgtgtgtgcgatgtgtgagagtgggccagattctgttgagaattgagatccgtgtacgcacgcattattcaccgttattcttttcaaacggccatattctgctcttctgttctgggaattcaatttcaaagaagcaaagaaaaaaaacccttcctttgcgttttattgtttctttcttttctctctctgttgccaccgtctctggtggtggcacttataagaacgcgagaaacggtgcgttttggttctgaattgctgtgactgtgatagatgatgggtagttgcccttgtttcgggttgtggagctggaagacc

SEQ ID NO: 21041 - DNA, 403 bp, Glycine max
gtcactcgtttttttataaatagagaatacaaatcactttacagattacagttatcctttatttttctctgcttcctaagattcgtcatgtgtgactttcagtccattaccttctcagcaacttaacatggttgggttcaactcagttcctaattggcttctcattcttaaggaagagaagttttttactcgctgtttgattcatcactctgtaaagaagaacgagaagaacattttctgcttagattgctgcacaagcatttgcctccactgcttgccctttcaccgctctcacgtccttttgcagataagaagatacatgtacaatgacgtattacgccttggtgatgctcagacattgttgaattgttcccttgttcaaccgtacacaacaaataaaact

SEQ ID NO: 21042 - DNA, 406 bp, Glycine max
atttaatttgtagataggagctccacccgaagtggtggcgcgtatggctgcggctaagcaagagtttgaggcacggcaaagatcttcagttggttcaagggaaacttcaaaagaccctgaacttgaccaattcatggaagcatactatgacatgcttgtgaagtatagagaggaattaacaaggcctattcaagaggctatggatttcatgcgaaggatagaaactcagctaaatatgctttgcaatggacccgtgcggatcttctctgatgataaatgtgaaggtgccggctcatcagaagaggatcaagacaacagtggaggagaaacagaacttcccgagattgatccccgagcagaagaccgtgaactcaaaaaccacttgctgaagaagtacagtggttac

SEQ ID NO: 21043 - DNA, 357 bp, Glycine max
tgcgttttcaacactgttcgcgcgtcggagggttcttatttggggcacattaaagaagagttggggcataagagtgtgttttcggtcgggccgttgggattcggtcgggctgagtccgacccaaatagaggatccgaggttttgcgttggcttgacgaggtggaggaagaagcgtcggtgttgtacgtttgctttgggagtcagaagctgatgagaaaggaacaaatggaagcattggcggtggtatcagaaaaatcctaaactttatttttgttggcggcgaagacggcttccacgaaggaatttattgatgaagggttcgggttggtaccggatgggtttgcggaatcgtttttc

SEQ ID NO: 21044 - DNA, 584 bp, Glycine max
ctcgagccggcaagccttcgccttactcgcagattttcatgaacgctggcccacgcgcctacagctacgcgtacgatgacaagaccagcacgtttacgtgcgcttctgctgcggcttacaccatcactttttgtccttctcctagcagtaaccccagtcagaaatcgtggcaagggcaaaaccctaaatcagatagtagtggctcggcttcggcttctgcttctgggtcgccgcaacttaacaacggcacaattgtgtatataggtagcatggatccaagtgaattatggtccgcaggtagtacccacgtgcgggaatctcaaaccattgcgggctttgtcagtatcaccatcgctgtttggctcttgtgccacctctgttaatttgttcttaaaacaaactatgcccatgaactatgtttttgtgcctacaaacatggtgggaccctatccgccacttgtctaatctactttactacgtaggcatgcgtgtcattttaaatacatcatccatcgatggaactccaccaccttacaatgcaacacaagtgttctgtttttgtcctggaacccccaaaagcacaa

SEQ ID NO: 21045 - DNA, 448 bp, Glycine max
ctcgagccgattcttcttgaggagctctattatcattttttgggtactgatcaatcacaagatattctgtgttggagggatcctgagaatcctaaatatatgtttggaggaactgttactgaggatggcaagtatgttcttctctatatcgaagaagggtgtgatccagttaacaagctttattactgtgacttgtctgaacttccaaacgggctggaagggtttcggaatgagagttcccgcctcccatttgtcaagctggttgataaattcgatggacaatatcaagccattgcaaatgatgacacattggttacatgtctaactaacaaagatgccccaaaatatagactagtccgagtagattcgaaagaaccatatgcttggaccgatgacatcccagagtctgagaaagatgtgcttgagtcagcacgtgctgtaaatggta

SEQ ID NO: 21046 - DNA, 424 bp, Glycine max
cggttagagattgacacgaagatagtgggagattccaaaattgaaggttggaagaagtctgcagaaaataggtgggaagttcttttgacccactctcaaatggttcagttggctgaaacactagatatatactatgtggatccttattcgctaccttataaacaattatcctgtggtgtggctgccaagtttgcaaacgtgtacaataaaaaggggaattcttttccaaaattgttgtcattcgcccttgcaagtggtatatttcttgtagcaattagtgctctgggtcaattttgtttgccttggttatgcaaggaaaggaaacactctgtagaacatagatctctaccatcatcggaagtgaatgttgcaatgaatgacttttttgatacaaaaaagttggaagagtgttgtgtgtagctat

SEQ ID NO: 21047 - DNA, 679 bp, Glycine max
cagaaactgctgttctattccttaagacccacgacagtgtctttgcaagcaggcctagaactcaagcatctaaatacatgtcttatggaactaggggcatagtgtttactgagtatggtccctattggcgcaacgtgagaaaggtgtgcaccacagaacttctaagtgcatcaaaagttgtgatgcttgctcctttgaggaggcaggagttaggaatacttgtcaagtcactctaaaaagcagcagcctcacatgatgttgtgaatgtcagcgacaaagttggggagcttatatccaatattggctgtaaaatgatacttggccgcagtagggacgatagattcgacctaaaggggcttacccatgattatctgcatttgctgggattattcaatgtggcagattatgtaccttgggcaggtgtctttgatcttcagggactaaaaagacaattcaagcaaacaagtaaggcatttgaccaagtgttcgaggaaatcatcaaagaccacgagcatccttctgataacaacaaggaaaatgtgcactccaaggactttgtggacatactactgtcacttatgcaccaaccttcagaacaccatgtcattgatagaattaatatcaaggctattttgttggatatgattgctggagcctatgacacatctgctattggggt

SEQ ID NO: 21048 - DNA, 1541 bp, Glycine max
atttttctttcactccacattgtgcacccttcatggtcatggcaaaactaaaacacccttcatcttttgtcacattggtggcacttcttctagcagtgtctcttttcgttgctccaacatcctcaacatccagaaaaactagtctcaagcagcagcacccttgcccaacaacaaatgggttccgagtcatgcttcgccacgtcgattcgggaaaaaacttaaccaaactagagcgtgtccaacacgggatcaagcgtggaaagagcaggcttcagaagcttaatgcaatggtgttggcagcatcatcaacacctgattctgaagatcagttagaagcccctattcacgcaggaaatggagagtacttaatagagttagccattggaacaccaccagtgtcttaccctgcggttttggacactggcagtgaccttatatggacacagtgcaagccttgcacacggtgttacaaacaaccaacacccatttttgatcccaagaagtcctcttctttttccaaggtttcatgcggtagtagcttgtgcagtgctttgccttcttcaacatgcagtgatgggtgtgagtatgtttattcatacggtgactattcaatgacacaaggcgttttggccaccgagactttcacttttgggaagtctaagaacaaggtttcggttcacaacattggttttggttgtggggaggacaatgaaggtgatggatttgaacaagcttcagggctggttggtcttggacgtggtcctttgtctttggtttctcaactcaaggaacaaagattttcttattgtttgaccccaattgatgacacaaaagaaagtgttttgttgttggggtctttgggtaaagtgaaagatgcaaaagaagtggtgacaacacctcttctcaaaaaccctttgcaaccttctttttactatctttctcttgaagctatctctgttggggacactcgattgtccattgagaagtccacttttgaagtgggggatgatgggaatggtggtgtgatcatagactctggcaccacaatcacctacgttcaacaaaaggcctatgaggcactcaaaaaagagttcatttctcaaaccaaacttgctttggacaaaactagctcaacagggttggatctttgtttctccttgccatcagggtcaacacaagtggagattccaaagcttgttttccatttcaagggtggggatttggagcttcctgctgagaactacatgattggtgactccaatttgggagtggcttgtttggccatgggtgcttctagtggaatgtctatatttggaaatgttcaacagcagaacattttggtgaaccatgatcttgaaaaggagaccatttcttttgttcctacgtcgtgtgatcagttgtgagagtgtgtgatatatttactgattagtgtatgtttttattgctttgtttgtttgataattttctgttgccggacttgtgttgctatgattgaatctcttagttgttgcaataatatgaacatttttattttctgttcc

SEQ ID NO: 21049 - DNA, 487 bp, Glycine max
caaaactccccttcttggtcttcttctcttaatcctctccaccacattcgaaggggacgttacaaaaaaatcaccattttttctcattgttaatcaagttaagataagatcattcctctctatcaacaaacctttattgtgtatatatatatatattcccacaattcacatcactcttgtccttcactcattcactctatatatccacttcatataatttcctccacattgtgcaccgttcatggtgatggcaaaactaaagcacccttcattggtggcacttcttctagtactagcgtgtctttttattgctccaacatcctcaacatccagaaaaacaagtttcaagcagcagcacccttgcccaacaacaaatgggttccgagtcatgcttcgccacgtcgattcgggaaaaaacttaaccaaactagagcgtgtccaacacgggatcaagcgtggaaagagcaggcttcagaagcttaatgca

SEQ ID NO: 21050 - DNA, 723 bp, Glycine max
ccgcgccgtaacgctcgaatcggctcggtactgccaatgatgggatcaccctatggacctcttggtgtgcctccgcctcgggcaatgcggcctctcttcacatggtctatcacctgctcccggtccaccaatttcccctggagtcttcatgtcaccatttactcctggtgtttggcctggagcacgaggtgtcgatatgaatattataggtgtaccacctgcagtgtctcctgtacccccaggtccacgatttaatgctgctaatatagggaacccaccaaatcctgttatgtattataaccaatcaggccctggaaggggaatgcccccaagcatttcgtactcctggttttaatcctacaggatcaatgggtcgaggagccccacctgataaaactccagggggatgggctcctcctaaaagtagtggaactcttggtaaagctccttccagaggtgaacagaatgattattctcaaaactttgttgacactggtatgcggccacagaattacattagggagctagagctcacaaatgttgtggaggactatcctaagtttacagagcttatactgaaaaaggatgagattgtggaaaaatctgcatcggctcctatgtataatcagagtgagttgaaagagtttgaattatctccagagttctttggaacaaagtttgatgtcattcttgtagatcccccatgggaggagtatgtgcacc

SEQ ID NO: 21051 - DNA, 348 bp, Glycine max
ttcaaatttttctttctattaatctgaaacaagttatgaggcatgaagatccactgcgacgtgtgtaacaagcaccaggcctcgttcttctgcaccgccgacgaagccgccctatgcgacggctgcgaccaccgcgtccaccacgccaacaagctcgcctccaaacaccaacgcttctccctcacccacccctctgcgaaacattttcctctctgcgatgtttgccaggagagaagagcctttgtgttttgtcagcaagatagagcgattctgtgcaaagagtgtgacgtgcccgttcattctgccaacgacctcaccaagaaccataacaggtttcttctcactggg

SEQ ID NO: 21052 - DNA, 444 bp, Glycine max
  unsure (1)..(444): unsure at all n locations
gaatctttttgtaagaacgtgaaacatgacaccctaactcgcgttgcttgcttgagtgatttgactcgtgtcgagtgtattgtatttagtttaagcgtggctgatcgagtgagtatcagaatcaattcaattttgagctagtcatgaagatccactgcgacgtgtgtaacaagcaccaggcctctttcttctgcaccgccgacgaagctgccctatgcgacggctgcgaccaccgcgtccaccacgccaacaagctcgccttcaatctctcattgctttttcttcatccacccttttgctttacattttcctctctgctgatttttgctaggtttgttgagtctttgtttattgatagnnnnnnnnnnnnnnnnnnnnnnnnnnnnnnnnnnnnnnnnnnnnnnnnnnnnnnnnnnnnnnnnnnnnnnnnnnnnnnnnnnnnnn

SEQ ID NO: 21053 - DNA, 388 bp, Glycine max
agttgatgcacatttcatttttcatcttaactgcaaaactcaagggaaatcctcttgctcttcttctctgattttataagtgaattaaaatggtctcagattcttgcccccctcttaaggaacctgaatcagataaaaaatgggaggaaaagggtccccctcgcaatgccaaatggtggtactcaacttttcacgctgtgacagccatgattggtgcaggtgttctcagccttccctatgccatggcatatctaggatgggtgccagggaccttgattttgttgatgtcttggtgcctgactttaaattcaatgtggcaaatgatccaactccatgagtgtgtcccgggaaccaggtttgatcgttacattgatcttggaagacatgc

SEQ ID NO: 21054 - DNA, 977 bp, Glycine max
ttcgtttctcactcacaccaacaacacaacacaagctacagcacggcactactactagcatcaccctccaccattgacgcgtccttttgcttgctccgcacgtcacttcgcgtttttctcagattcactctcgccgtcgcagatctcgccgcagatctgaacaacaatggacggttacgacggcaccgtcaggctcggtgccatcaacctcaagcacgatcgcgccgccgatttcgactccgccaccgccgcccccgacgtctccgtctcctctccggtcacgcgccagaaagccgctgccgccaaacaattcatcgagaatcactataaaaactatctccaaggattgcaggatcgcaaagacagacgcagagcacttcagaggaaagtgcaagaatctcagatatcggctgaggagcaggaggaaatgatgaggaacttggagcgccgagaaactgagtacatgaggcttcagagacgtaaaattggaatggatgacttcgagcagttaacggtgattgggaaaggtgctttcggtgaggtgaggttatgtcgtgctaaaggtacgggagagatttttgccatgaagaaattgaagaagtcagagatgcttagtcgtggacaggtggaacatgttcgatctgagaggaacttgctggcagaggttgattgcagatgcatagtcaaactccattattcattccaagattcagatttcctatatctcatcatggaatatttacctggtggtgacattatgacattgttaatgagggaagatattctttctgaagatgttgctcgcttctacattgctgaaagcattcttgctattcactcaatacatcaacacaactatgtacatagctttcagactttggcttatgtaagcctcttgatgataagtattcatcaattttattggaaaatgaagatcttactggtcaagaatcaactagtgaaacctgaagcatatt

SEQ ID NO: 21055 - DNA, 402 bp, Glycine max
cggctcgtgggaatatttacctggtggtgacattatgacattgttaatgagggaagatattctttctgaagatgttgctcgcttctacattgctgaaagcattcttgctattcactcaatacatcaacacaactatgtacatagggatattaaaccagataacctgatactagataaaaatggccatttgaagctttcagactttggcttatgtaagcctcttgatgataagtattcatcaattttattggaaaatgatgatcttaccagtcaagaatccactagtgaaactgaaggatattctgtctctccttggttgatgccaaaggaacaattacagcagtggaaacgtaatcgacgtgcattggcgtattcaactgttggaactcttgattacatggc

SEQ ID NO: 21056 - DNA, 420 bp, Glycine max
cttggatgcccatatacttcagctcagtaagatttatgatatttagttgtgattgtcaaattataaaaatatttagaaatcaacacttagaaccatgtataaatggttttccattataggtgtaccgtgtggatctcaggcatgcggcatggtttagtgcagttccatgggctgtgatggctgtcacgggttactttgctggcttgtggtcggatatgatgatacaaagtggtacaagtgtcactttgactcgtaagattatgcagtccattggttttattggtcctggactctgcctcattggcttagcaacagcaaaaaacccctcaataggttctgcttggcttactttagcttttggcctgaaatccttcagtcactctggttttcttgtgaaccttcaggagattgcaccgcagt

SEQ ID NO: 21057 - DNA, 755 bp, Glycine max
  unsure (1)..(755): unsure at all n locations
cagcatttgatcaaggcaatacaaggccacttagggaacaagaatataaaagaaggaaaaagaagaagacgacatagcaaagcctagaaacatgggtcaccattcttgctgcaaccaacagaaggttaaaagaggactttggtctccctgaggaagatgaaaagctcatcagatacattactactcatggatatggctgctggagtgaagttccagagaaagctgggcttcaaaggtgtggtaagagttgtcgcctgagatggattaattatttaaggcctgatattagaagaggcaggtttacacctgaagaggagaagttaattataagtcttcacggggtcgttggcaacagatgggctcacattgcaagccacttaccaggtagaactgacaacgaaataaagaactactggaattcttggatcaaaaagaaaattagaaagccttcttcggtgacttcatcaatgaccactacacaaagtgttgatcatcaccacccccagttcaattataattccaatcaactagatcactatggccaccaagaaaatttaacagcaaagccaccgatgcaagaaaccttattttccncgacgtgccccctatttatgtttgacactagttcattagatcaagggacaacaactgtagacaccaccaccaatgtacgagcagaactgttccaagattcattgggtttgagcagtagtgaaacgtggaacatgagccaccatcaagtccatgctcttcct

SEQ ID NO: 21058 - DNA, 420 bp, Glycine max
aagtaaaagtggcaaatatacaacccagcttcctgcctcaagccccagatgctaaaggacaagttggtagccacaagctgatacctttcattggataccctggaattgccatgtggcagtttatgtcccctgctgcagttgatacatcaaaggatcaccttcttcgacctccagttgcataaagtggttagcaatagcatccacttcttttttgtatgcgttttatttttgtgtaagttatccattcagtctattgtgttttttctaaagttactggtggaaagtgtgctcggaaactagttaattatataaaattgtgttgttgttgtctgaactatgataagaaagtgctacatgtcatggctacaaagtgtgttgcttgattaaaaattaaagtctgtttaagggggtctttgcaaa

SEQ ID NO: 21059 - DNA, 385 bp, Glycine max
gtttggatgtttcaatacattacattacccctcttatatataacatataacttgttacctaggttttcctaccttctttatctctcaaaagagagacacaacaaaaggaaccagagtggattaattagggacatgagaacaaggagaggagcgtgttactctggagtagtctcaaggatgtgttccgatgcgagggtttccaagaaaaaaaacaaggatctgcacatgcacatgcatatgcatatgcatgtccccgccggagactccattatttacagccggaaaaggcagaagaaaacgccggagaaaaccgccggcgctgattacgaatttttcgagtctttgccggacgacctcgtaatctccatcttctgcaaacttagtt

SEQ ID NO: 21060 - DNA, 460 bp, Glycine max
gccagttaattctattgataatggcctaattggtattattgtatggagaaaaactaatttaacttcgtctatatcacccaccactgcatcacatcacaaacatagctctaaaagacaatacttcagtaggagacagcgagatataaatgtgaatgccaattctacccttaaagcagtgccctctatgggcgttaagacgactgagaatgatgatgatgacgtgcctcccggatttgggccaccagccgcccgagtggaggatgacctgtcagagattagtttctgttcaaatccatcacacttgggtcaaaaaccaatggggtcatcaaatgtggtcccattacacccggttaacccagctcgacaccttacaataagcttacatactacagtatcagtttgcttcccaacagacaatgcacaactttcatcttagacctcacattttgaatcaatcatt

SEQ ID NO: 21061 - DNA, 594 bp, Glycine max
ccccaccaccctttacatcactttctacacccccaacaccggctcgcttccacccaaaaacaccttcccaatggcaccatcaagcgtgtcttcaaccctcacggctccgcggcctacaacttcatcaccatgggagcatacagaggaggactcaacaccttcgccatcgttggcctttcttccaagccactccacgtttatggcaaacccacctacgtgtgtgaatggatccctgatctcccttcactgcaaaactcttcaaaacccagcatcacaaaaggcctcaagtacctccctgactggggctatggccacgtctacaccgtggtggtagttaactgcaccttcaacggcaccgctgtcaatggtgacaacaccggtggcaagttggtgctccatgcttccacctcaggagccggtgacactggcttcaacgtcaccgacagaatagaggtcctccatgaagcaccgggagctttaaacgcttcacttttcatgtcaaagcctaagtatgactacttctactgtggctcttctctctatgggaacttaaaccctcagagggtgagggagtggatcgcttaccacgtgagg

SEQ ID NO: 21062 - DNA, 480 bp, Glycine max
gcgcaattcatgcttgaaggcttggcagctatctggaattgttgaaaactataggatacttcaatcaaaatatgatgggtcttggcggaaaatgtggctgtcacgaccaaggttacggactgatggtctttatgtgagtagaaatacctacattcgagctggagttgctgagtggaaaatcactaatcctgtacatgtggtctgctatttccgatacttgagattttttccatctgggcgattcctttacaagaattcatctcagaaggtcaaggatgtggcaaagtgcatgaatttccgttcatctaaagcagactgtgtttttggtggccactacacattgtcagatgacaaggttgtcttatttttgtcaaattatgtagttgagtatctgcatctccgctttaatcattatttgcaaatctgagtagacattctctttctggcaaatgtattgcataatatttatatttcttcata

SEQ ID NO: 21063 - DNA, 235 bp, Glycine max
  unsure (1)..(235): unsure at all n locations
gagccgccgtgggcaaccccgccgacgtggcgatggtgcgaatgcaggccgacgggcgcctcccgccggcggagcggcgcaactacaacggcgtgttcgacgcgatacggcgcatgagtaaccaagaaggcgttggtagcctgtggcgcggnntannncttacngngnaccnnncnatgatcgttactgctttgtagttggccttgtacgaccagtttaaggaaagcattttagg

SEQ ID NO: 21064 - DNA, 365 bp, Glycine max
caaagtctaaatttggagtctcctcccagatatggaaacgaaaatatgtatcaaccaccaattcagtatttccccttggggtccaggatttgtgctggctgctatactgagattggttttggacgatatctaaattgcttgaatgcattctggcatcctgaatgcttccgctgccgtgcttgcaacctaccaatctctgattacgagttctccacatctgggaattacccttaccataaatcatgctataaggaaagctaccatccaaaatgtgatgtctgcaagcacttcattccaacaaatcctgctggtcttattgaatatagggcacatccattctggatccagaaatattgccctactca

SEQ ID NO: 21065 - DNA, 563 bp, Glycine max
ccacgatatagtcagcacagagcagttaaatagcacgagggaaacttaaatgcatgtgctagcaaatgattcaagatggcttaatatatgcatctactaaccagaaggatggaatggagagattctaggaggatcccgaacagcataaaacctgtgaaagagattgaacatatggattcattaagagaatgaataatggcactctcaagggaacttactgcgacagacgaacaaatttcatgcgatcagttgtatttgtctaaggctggaagagagagacaaagatatgactttgatgactttgacgttccacaaaagttcaacatttaaggggctaggaatgatggaagtagatctggttatggtccatcacccgtttcctttatcttttgttattcctggttctgagagtgggggagtgttttatttcagtcccaaatggaagagtgcttgttctgaggatgttgaattgtctcaacttattaactatataaaatctataactgattctttgcacatttaattatgtatgctctattgaccaagcatagtgcagtaatgtt

SEQ ID NO: 21066 - DNA, 803 bp, Glycine max
atcgaccgcagctacaatgcaaggttaggtgattttggtttggccttaagaggccatgttgatgattacagactcaggtccactcctcctgctggcaccatgggctatcttgatccttgttatgtcactcctgataatttaagcaccaaaactgatgtttttagttttgggattttgttgttggagattataagtggaaggaaggccattgatatcacttattcacctccttctattgtggattgggctattcctcttattaagaaggggaagttgttggctgtttatgatcctagaatagcaccccccaaggatccgattgtgaggaagcagttggctgtgattgctgccaagtgtgtgaggtcttgtagggagagaaggccctctatgaaggagcttgttacttggctttgtgggttgtgtaaattggtgcctcttcattcgtggaatggttttaacaacccttgcatgatggctgagattgcagggcgcccagtggaagcggcggcggcggcggcaaggaattatggtcaattcagttctaggctggaaggtgtggaggaaggaaagtttgatgctttggatggcaggttgtcaaagtctgcaatgaggtattctaggagggtgtattctgatttggggttcagccgcaacttgatggacttgatggctaccactgaggagcctgaatttcttagagatgctgatgggacggaacatagttctaaatcagctgaacaagtttctggtagctccagcaggtttggaagtggaagatattccataagagggaggaatctgta

SEQ ID NO: 21067 - DNA, 579 bp, Glycine max
cctcgagcgattcggctcgagcagaaatcaagaaacttgatgactggtgtgggtatagcattagcatgaaaaggatagacgtgccacaaaactatacgggccctatagactctggagtctggactgaaatcgaagtcgaagcaagcaatgggcaacgctcagtcacctcccaacaatgatcctcgatatgtttcagcaaccagagcttttactcaaaaggaacttgaagacttgaggtctctgttcatcaatctggcaaatcaatcccagagcaacgggaaatacatctctccctccgtttttcagtcatattttggacttcatggccctcttggggagaggatgtttgatttagttactcaggagcgcaaggatcagaagctaacctttgaagacctcgtggttgctaaagctacttatgagaaagggacaaaagatgaaattgaagaattcatctttcgcttattagatgtatctggagataattttgtagggaggtctgatttggaaactgttatgattgccatttttaatgatatattacgcataaaaggttctgatgatagatcaagttcacat

SEQ ID NO: 21068 - DNA, 1633 bp, Glycine max
cggtcgcgtgggttccaacagaaaccgcgagaaaattccccagaaatctcaacacagttaaacatcatcaatcaaatatttttggaaaataccacaacagttttcagctctgtacaacgttggatttggatcagttttcgtgagagaatatttgagcatagaaacatggtagctgaagcagaggttgcgtgtcaacaaaacgtgggtgtgttggatgtgaagcattttccaaataagggaagcgatgttcaccagatcggagacgcagatgctaattcgcctccgtgttttgaccgagttcgtgccactgagtcggtctccgccgagttactcacttcacaagaagatgttaagtctgcagacaggatctcagatgctgctcttgaatctgcggttctgcagtctatcccttgcatccgttctggtagttttgctgacattgggccacggagatacatggaagatgaacatataaggatagatgatttgtcgtctcatctgggatcactatacaactttccccaaccaagtgccttttatggggtgtttgatggtcatggaggacctgaagctgcagcttatataagaaaacacgtgacaaagttcttctttgaggatgtcaatttcccacggacatcagaagtcgataacgtatttttggaagaggtagaggattccctcagaaaggcatttcttttggctgattcagctttggccgatgattgcagcgtgaatagttcatcaggcactacggcccttactgctttgatatttggaaggcttctaatggtggccaatgctggcgactgccgagcagttctctgtcgcaaaggagaggccattgacatgtctcaagatcacaggcctatttatccatcagagaggaggcgagttgaagaattgggtggctacatagaagatggttatctcaatggggttttatcagttactcgagcactgggggactgggacatgaagttacctaagggtgctccctcacctttgattgcagagccggagttccggcaagtggctctaacagatgatgatgaattcctcatcataggatgcgacggcatctgggatgtgatgtcaagtcagcatgctgttagccttgttcgcaaaggcctgaggcggcatgatgacccagagaaatgtgccagggacctggttatggaagcattacgcctgaacacattcgacaatctcacggtgatcattgtatgtttctcttcccttgaccacgtggagccagagccatcccctcctcgccaacggaaattgagatgctgtagcctctctgcagaggctctttgtagcttgaggagcttgttggaaggcagtgcaagcaactgaatgtatgtacatacacagttcatctaataatgtgttgttgggattatacacactgttttcggttgcttcagtttagacattggaaaaagctgccatcatttttttacgtggtcggttgatgtacgtagcctgggttggaggatggtggtgtaaatatgtattgtcgttacattattattttgtactatagtcaatttttactatgactgccacattcatgtcagattcttgtgcgtcaataaatggaatctcttagtttctattccaaaaaaaaaaa

SEQ ID NO: 21069 - DNA, 355 bp, Glycine max
ggatgtttttttttttaattattattatcaccaatcccaacagaaaccgcgagaaaattccccagaaatctcaacacaggagaagaagaaaaaccaaacacagtttatcaatcaaatctttttggaacatagcacaacaattttcagctctgtacaacgttggatttggttcagttatcgtgtgaggaatattagagcatagaaacatggtggctgaagcagaggttgtgtgtcaacaaaacgtgggtgtgttggatgtgaagcattttccaaataaggtaagcgatgttcacgagatcggagacgcaaatgctaattcgcctacgagttttgaccgagttcgtgccactgagtc

SEQ ID NO: 21070 - DNA, 348 bp, Glycine max
ggcgtcgtttcgaggctagagagtgaaagtagtagtgtacccacaaaccccttcttctattccattttgtttggaacactgcgtaaggctgcgccaccacctccgcctccgtcgtccacggccagttgcttgcgttcctttcactttttttataattggctaagaataataatggcgtaccggcgctgcctcttgataagagggagcctcgtggatcggaggtgccatctgtctttcagttatgttctccacagcaacgaggggaagcgcgaacgcaccaatgaaaaatcatcttcaggaggggttggtgattttactcaaacaaggtcctttggaagctctcttaat

SEQ ID NO: 21071 - DNA, 563 bp, Glycine max
ataatagcatctcagttgccaggaaggactgacaatgatatcaagaactattggaacaccaagcttaagaaaaaaatgatgggagtgaaaatgaacccttcagcactgaagaaacctcaccaagttaacctttcatccatgcttcaaaactcaacaccatcatcaccctccccctcatcatccttcaaaaacaaccacaacaactcttactactaccagccccatttgcccttcacaggctccgagtccatgtcatattcaagtcttcccagtgacaattattccacttttgagagccttcagaattaccaagttagtagtggctttatggaaacaagttgcagctcttcttcagatggaagctgcaacaacaatcagatcaatcatgtcaaggaagcagaacttggatatgttggtgatggaacttttggtgaccagataataggtcgtctaagttacctcaaatagtggggtgaagatcaagataccctaaaagtggtgccctccaatgctggtagggttagttgggtgacagatgaagaaactagattattggggaaaag

SEQ ID NO: 21072 - DNA, 429 bp, Glycine max
gtagatgttcctcaaatcaagtatggagccattgttaagaaggcagctaataataaagaatggagttggtcagatgtcgcaaatcccatatttaaatgctctgacaaggttagatccttgatctcctctcttacattcagtataatgaagatctcagtcaaggatatttctgctagcttaacaaaaggtgctagtcaaccatatgaagctatatttgtgtcatcaaaaactaagaaaagtgatgcacttgatccactaattgtagttcttcatgggggaccacacactgtctcattgtcaagcttttcaaagccattggcttatctttcttcccttggatatagcttgttaattgtgaactacagaggctcattaggatttggtgaggaagccttgcaatctcttccagggaaagctggatctcaggat

SEQ ID NO: 21073 - DNA, 509 bp, Glycine max
  unsure (1)..(509): unsure at all n locations
aagagcnangacggngcatgcacgccgaccgaaagctcggaattcggttcgaggttgcaactttttttgttcgcagcagtttgcgacctcagagggttgttctgcacataattacagatagaaagacttactaccccatgcaggcttggttctccttgcaccctttgtcacctgccataattgaggtcaaggcattgcaccactttgattggtttacaaaggggaaggtgcctgtgctggaagcaatggaaaaggatcaaaatgttcgatcacagtttagaggggggtcatcagctatcgttgcaaatactactgagaagccgaaagtaattgctgcaaagctgcaagcacttagtcctaagtataactcagtaatgaatcacattcggatacatcttacagagttgttctcaagtcttaacaaggtggtcttcctcgatgatgacactgtggtacaaactgatctttcacctctgtgggacattgacttaaatggaaaagttaatgga

SEQ ID NO: 21074 - DNA, 347 bp, Glycine max
gtgtgttctaccatgaagagccaccaaaccatcccaagagatgcaaataccttgtggcaacttttattaaggaagttttctccagttgccagagttttgcagcacggctttcaacttcaagttttgaggatgagtacccagtgagcgattttgacgaggaacaagaattgtttatctcagcagtgataagccgaaccatggagaaacagaagcacaagccaaatgtgttgagacacaacttttcttgggtatactctccagcaacgaaagaactttatttcactactcaggcagtggcaccacaagaaaaggtggagagtgatcaagaaagtgatgaaggagaagag

SEQ ID NO: 21075 - DNA, 740 bp, Glycine max
atcaaaactctgccatatgtatttaccatttggccatatcactcaacttaattgaagtactcttttaccacattcttctctttggcacggaaatcctctaaactacgatactcttctcgaagcaacctgtccagttcagggtctttattcaatggttctttttggccccggaccttgcgatagtggtgaaatgcccaatatttttccaggccatacagattgcccttatggtagaaatccagagttgtttgttcaaaatccttgtataaatcatctctaaattccttctccaaaccataactgtagaatctgaaaaggcactctataccataattataattagccgcagcatcttccttagctaatttcttaaattcattatacatagaaggcacaaacatgtctcgaagaaaataggaccagaatctgtataatgtattcatttcctcactgcaaccaattccaagtttctttctatcattcaagcaccgtttgtgatacttcaagtacttctgttgtttgaaaccattttcttctaaaagttggtgacttggatgctgaaacggtggaaaagactttggcattgaacccacaggtggactaccaggaaaccccccatgtggactaccagaaaaaaccccatgtggactaccagaaaaaaccccatgtggtgaactaccagaaaggcccccatgtggtgaactgctcaatttggaaggcttgaaaccatgattttcagg

SEQ ID NO: 21076 - DNA, 346 bp, Glycine max
atcatcatacatgtttgttttaggaaaataggctttattattattattattatttattttaagtaggttgtagaaataggggaagatcatattcattcatgtattcagcattgggtagaatctaattatttgagctttggattctaccttttagagtaactcaaccaaagattattgtgtcttgggtgatgggagcacccaatgacatagttctttgtttatagtatttcagtagatggggttcaaaagatcattttatatcttttgaacttttcattggccagtcaaataggaagacaaaattgagcttggattgctcaataggctagcatgtattttatttttt

SEQ ID NO: 21077 - DNA, 1009 bp, Glycine max
cattcagaacctggagacgattctcatgatcgcgagaggctcagagaaaaaagaggctcatcccgtcatggttcaaagtcccgagatggagacaaggacagaagctctgggggcattagggataggaagagggatagggacagagatcatgagaacaaggataggaagagagaccatggggacaaggatgtgaagagagatagggagagagacagagaccacggtcgtgaccaagaaagggacagaagggaccgtgggagtgaggctgagcggcaacagcgaacagaagtaggtctgataggcatcgaactgatctggatgacaaagacagagagacaagtcgtgacagggagtatagagatatagagagaagccgggataaggattacaaagacagaggaagggtgagggaatcaaaggaacgggatagacaagacagacggtataaagagaaaaaggaagaagcaacagaacctgaggctgatcctgaaagagatcaaaggactgtgtttgcttatcagatttctctgaaagcagatgaaagagatgtatatgagttcttctcaagggctggcaaggtgcgagatgttcgcttgattatggatcgcaattcaagacgttccaagggtgttgggtatattgagttttatgatgtcatgtctgtccccatggcaatagcactttcaggccaacctcttcttggtcaaccagtgatggtgaagccatcagaagccgaaaagaatttggttcagtccacaacatctgttgctaatggactcactggacttataggcccttattctgggggagcaagaaagctgtatgttggcaatctgcatgtcagtattactgaagctgatattcgtagggtgtttgaagcatttggtcaggttgagctagtccagctgcctcttgatgaaagtgggcactgcaaaggttttggctttgtgcagtttgcacgccttgaagatgcaagaaatgctcagagcttgaatggtcaattagagat

SEQ ID NO: 21078 - DNA, 362 bp, Glycine max
tggaagaataagagcaccatcacattcactgccatcttcactagaaaacaatgtcaagtgtttcttttcttttggccttgttcatggtagtagctttgtctatctttccttccatagtgggtgcaataggtgagcaccggctaaggtgggtgcctgagacaacaacaccatgccaaagctccatagaagagtgcatggcagatggtgagtttggaatggattcagagtctcaccggcgcattctagcaacctcgcagtatataagctacaaggcgctgcaacgtaacaccgtgccatgctctaggaggggtgcttcctactacaactgcaagccaggtgcagatgctaatccttacactcgt

SEQ ID NO: 21079 - DNA, 414 bp, Glycine max
attagcttaaaaaaccggttcggctcttgaaccgctttaaaaatttggttcgtaattgagttcagttattataactgagaacatggccgaaacctcttcggctacgcctccaccaccgaagcccgtggtggttagggtcaaacgcaagccctcgcatctccacttgatgctttctggctcgaaattaacgagaggccgttgaagcgtcctctcttggattttggaaatttatcaatctcctccaattctgctcaaaaggtggaattttataacaagaaggtttttgtgcaacatgtggagacaataagcagctctgaggtcacctttgatatcgtgcaatcctttgtggatctggttccagtggtgcatctgattccaagtcaaaaattaaggaaagaaagaaattcttcaaca

SEQ ID NO: 21080 - DNA, 562 bp, Glycine max
cacaccatctataattccccaactgacgcagctcacacgtacatctatctctccccccaaacccacaccgttttattctctgaaatgggtcttgaccaggatgccaatagctcaggccttcacctcgttctagggctttctttgactgctactgtaaaggaaaccactcaatccaccaagcccgatgatgatcatcatctttgtgttatcaagccaactccaacgaaaccttatcctcccaatgaaccgtctctgacgttgggcctgtccggtaagggttaccacgtgcccagaaataacgttgccatcaacaacgtttattgtgaggaccctcttgagttctctcgacagacatcacctcacagcgttgtttcgtctttctcaactgggagggtcgtcaagagggagagagatcttaactgtgaagacatggaggtagacgcagaagaaagggtttcttcacgagtgagtgatgaagacgaagatggaaccaatgctagaaagaagctcagactcaccaaagaacaatctgcactgctagaagagagcttcaaacaacaca

SEQ ID NO: 21081 - DNA, 731 bp, Glycine max
ctcgtgctttgccaacgtcacgcctcagcagaccctccacgagatatcagtctcagcgggggtacttgagaagaagtctccatgcaacttccttgtgttcggccttggccatgacagcctcatgtggacatcgctaaattatggcggccggacggttttcctggaggaggacaagtcctggatcgaccaaatccaggagaaggtaccctctttggagtcctaccatgtcatgtacgacacacaggtccaccaggctgaagagctcatgaaaactggaatgaaggaggattgccagaaggttacggacccgagattctccaggtgccctcttgcacacaaggggctcccgagtgaggtttatgacattgattgggacgtgatcatggtggatgcacccaccggctacttcgatgaggcgccagggaggatgagtgcaatctacactgctggcttgattgcccggaacaaggaacgcggccaaaccgatgtttttgtgcatgatgtggataggaaagtggaggacatgttctctaaggcttttctctgtgaagggtatttcaaggagcaagaagggaggatcaggcacttcaacattccaagccacaggtctcgtttgtggaggcctttttgcccagagtagttgaagaacacaatttgctccctttatttcatctcacatgagccatttattattgttatcatcaaaacttatataattactatatgatatg

SEQ ID NO: 21082 - DNA, 660 bp, Glycine max
cttttgttaaacaggctggctgtgacttcggctcccttataaaaaaaaaaaaagagatgggaatttggaatagcgggggaacggtgggtgggcaaggtgaaagagtggtgtgggaagtacaacatcgtgggaggacctgtggagaagatagttgagaagcggtttaggaagaattatcaccctgcttgggcagcagcatttatacttgatccactttacttgattaaggatgcaagtcggaagtatcttcctccgtataagtgtttgacgcgcgaacaggagaaggacgtagataagttactgaccaggctggcttcgcgagaagaggctcatgttgtgttgatggagctgatgaagtggagatcagaggggcttgatccgctatatgcacaggctgttcagatgaaacaaagggatccagtaaccgggaagatgaaagttgcaaatccgttaagtagtagacttgtctgggaaacttgtttgactgagtttaaatcacttgggaagattgcagtgagactcattttttttgcatgcaacttcgtgtgggtttaagagtaattggtcttttatgaggaaaatttcagctaataagcactcaagagttgccttggagagggctcagaaaatgatatatattgcagctcatgccaaacttga

SEQ ID NO: 21083 - DNA, 617 bp, Glycine max
gagaatgtaaacaaaaaatttcatgacccctttgagggttagtctttgcttcattctcctcttcctcactacaacaagtgcacaagccccagtttacagttacaattcttgcatgaactcaacttctattagccccacatacaaaactaacgttaagagcctcctctcatggatcaccaatgattcatccataagcaaagggtttaactacaccaccataagcagcaacaacggtggtgacaacgacggttatggcgatgctgtttatgggttgtacagctgcagatacgacatcacaggatacttctgccagttctgtctcaccactgctgtcaacgaaatctctcggctgtgtcctgacagtgttaccgctatcctatggtatgatgtttgcatcctccgttactccaatcagagtttccatggcaaagttagtttaagcccaacgtggaacgttaccggacccagaaaaatcaagaattcaacagaaactaagagaattgaggatgctatggagggtttgattacaaaagcaactatagagaccaagcagttttgggcaggggaggagttcgattggggtgacaatgagacattgtatggatgggtgcagtgtg

SEQ ID NO: 21084 - DNA, 736 bp, Glycine max
accagctacactccacaccacacacctcaaatagcaacacccttctctactcttcacttttcgctctctttctctacatagtttctttttcactctcccattcttcttttttaagcaacaacaacctcattcctcggatcctaagaaaatgggaaccagagtgtggtgttgtttcatgatgttcttcctctctctcaatgctcttgcaatagcattggaagatcacaacctcaaaacgacgtccagggatgacatcaagtgcaccccatgtggccaagttccctccccgccgccaccctctccgccgccgccagcagctccaaccaccacctactgccctccgcctccgtcgcctccaagctccggcggtggtggtgcttactattactctccgccgccaccctctcaatatatctactcttctcccccgccgccggcgtccaccggcggcggtggtggcggcgtttactactacccaccgtcgagagggtactacccaacgccgcctcctcccaacccaattgtgccctatttcccgttttactaccatacccctccgctgtcgtccacggcggcgcctccgccggtgaaaggctcgttggtctgtgccagtgcaatttcattgttaactctttttattgcatttctctaagaaaaaagaaagagagaaaaaggaaaatggtgggaataagtgcacaaattagcagatctcgggaaagtgaaagtgaggtgagtc

SEQ ID NO: 21085 - DNA, 411 bp, Glycine max
cgaagatctactttatcttggaattcgcgaagggcggcgagctcttcgcgagaagggcgaagagccgattcagcgaacatctcgcgagacggtattttcagcagctcatctccgccgtcgggtactgccacgcgcgcggtgttttccaccgcgacctgaagccggagaatctcctgctggacgagcagggcaaccttaaagtctccgactttggactcagcgcggtgaaggaccagataggggtggacgggttgcttcacacgctgtgtgggacccctgcttacgtggcacccgagattctcgcgaagaagggttacgatggggcgaaggttgatgtttggtcatgtgggattatcctctttgttcttgtcgctgggtatcttccgtttaatgatcctaatttgatggtta

SEQ ID NO: 21086 - DNA, 409 bp, Glycine max
gtgcaacagtccctcagaactcggcagctagaaagattgaagcattgcacaacacagataaagcaagtcagaaattcacaagtgtctggttttctgaattttgaagtaaatcacctttgaaatttcacatacctcataagttttttgggaaaccattggtattgaactctgttcagcttcctgctattttctgcacaccaggctgcaccttggagtccaacacatctgctccctaagtttatagcatttagcatgctggcaaggttaatatttgtggtactcaccatagaacaaatcagagtttgtggcatataagatggccttaacctagatttagagcagttaggtagaaacttttcctctccttctaataaaactcggtagttgcttcaaacaagactagatgact

SEQ ID NO: 21087 - DNA, 702 bp, Glycine max
tgtttctcttgttcttcaaacccaccacctctcttctctttctcttcttcttcctcattatttcagttacctcacttactgtgccgccgcgagggggggccccactcgatagtgatgatgatattgattccctcacctacctctggccccttcccgcagagtacactttcggcgtcgacgctctctccgttgaccccgccctcacgctctccgtcgccggcaacggcggcggctccgccattctcagagccgccttcgaccgatacagagggatcgtgttcaagcacaccggtgtcgggtttagtttcttcagaaagctgagggaacgattggtgtcttctgtttcggcattcgatgttgacactttgaagatcactgtccgttcagacaacgaggagcttcaatttggagtggatgaaagctataccttgctggttcccaaagccaaggaatcttcccaagtcacgattgaggcaaatacagtttatggtgcattgcgcggattagagacattcagccagttgtgttctttcgattatacaactaaaacagtaaaaatatacaaggcaccttggtccatccaagataaacctagatttgcatatcgtgggcttatgctggatacatcaaggcactatttacctattgatgtaattaagcagattattgaatctatgtcctatgctaaacttaatgttctac

SEQ ID NO: 21088 - DNA, 1171 bp, Glycine max
agggaaaagtgaaaaattgattttatccaacaaaccatgctaaaaagtactatttggaatggtacttgttgtaagagactgagggacaagtaaaataaaattaaaacatgtgatgttgggtacacttgatcaaagttttgaaacacatttggcagctagctaacacaatcatactgcccttgagaaacaaataacataactataatgtgactcttctagctagtacaaatttgaacataataaaattactagtttcaaagctctatatatcacttcaattataatatcacttcaatatgtacttcaccataccaggaagatggatgttcagaaagtaatcttcccaatcaatcagttcggggtcaaaataaaacaaatctgtctccaccccaccttgtcttcctgccattctcaacttctctgtgttcatatcatcaaatgcagctttgaagaacaagtaaggcttgtaaaggtccaccaaccgcatcacaatctggatcttcctattgagatcaagatatgttccttggaaatactggcaaaatgcagtattggcaagctcaagtccctttaacacaagcaggtagcgaatgaacatatatcttctgaagctatccatattgctcagtactgtaacttttccaaccttaactggccttccatccttacttatgcatggttttgctgtgaaatatctaaatccatactcttgaagtttgccatatcttagtggtcttctaacagaggaaccaatatgatatataacatcatcactaggacgatttgcatgagccaccatggccacaagtattgcattcaccaccatgtctgctggtatcgcatcaacaattgctttgagatctccaaggaagcatgttaattttcctttcccataagctacagctaaactgtcaatggttcttacaccttcagcccaaccagggaaaggttcttttaatgtgctggtaacaatgctgggacgaatgatcacaacggataagtttccttttagttgctccacaagcatctctcccattgccttggtgaatacatatgtgtttggccatccatataactttgccctgctaatgcccaagtccttcataacctctttaatttccttttctgtggcccccagttgttgtaactcacttaatttgtcgcgcacaac

SEQ ID NO: 21089 - DNA, 462 bp, Glycine max
gaaggcggtgaggacgtgggggggggctcatttgatttgggcatagcttttgcaataaaacgtttagatgcctaacatggcttttacacaaaaaattatgacatattgatgtctctttttttgtgtgccccatgttgtcatacgttctagttcatgtatgcacctgaaataatgctccaggtggactagtgtgaatgcttaaaaagaaagaggaaaacatctattttttagttgttgatttgtatactttactatctgatccatattggtatgcttacatcacctgagtgttgttaatagcagccatagatccgccacggcagaaaggcatgttggatttttgccaaccgccataggaaatatatgaaaggaggcccaccatggcgtgtttatatggcagaatttcaaccttctgccattgctaaccctgcattaccttaagcacttgtctggaggatttta

SEQ ID NO: 21090 - DNA, 393 bp, Glycine max
acgatgcacgcctacctaaggttcggatttcggttggggctcaaggtattggcctaagtttaagcatttaattccttgaccatcacggggctattcctcctttttgggcacttgtcatgtttcataaacaacctcaatgcaaagcacaccaatgccagcggtcacaaccatcatcacaaacaccaacacactcagaatcctcccttgaactcaaggcttcacatggcgtttcttggcctacaagcatggaagcaagtgatctactcagacccaaataacttcacttccaactgggtaggtccttcagtttgcaactacacaggtgtgttctgtgctccctcacttgatgaccctaaagtgacagttgtggctggcattgaccttaacttcgca

SEQ ID NO: 21091 - DNA, 496 bp, Glycine max
tcattattggatatttacggcgaataggagtatttagtgagtatggaatgcgtttgctgttcttaagatgccgagaggcatggcttactggtatactcgaggatctggaccaggcaaatccatatgagtacttaaaagggatgatcaactgtcacagaatgcatctttttgatgttgttaatcaatatcgagcaatatttgcggatgacacatcaggaagtgaggaaaattatgacggtgggcttctttttagttgggcaatgcaccaaattacctcacacctacaaactctgaaagttatgcttccaaagataactgaaggtggatcactgtcaaatattttggatcagtgcatgtactgtgccatgggacttggctgggttggactggattttcgaggcttgctcccatcactttttgaagaagctgttctcaacttattctccaaaaatatgagtagtgcagtagaaaattttcagttggtcttggattcaca

SEQ ID NO: 21092 - DNA, 345 bp, Glycine max
ggaaaccactgttcttgtgaggaacattcaattcccaaatggcatttccttgagcaaggatggttccttctttgtctattgtgaaggggttgttggcaggttacgtaaatactggctgaaaggagaaaaagctggaacttcagagattttagccatcctacctggatatcctgacaatctgagactctatgtagatggtgatttttcggcagctcttcattctagaaggtatatgtatgcatactacaatggtatctacccaaagatgaggaaaataatactcaagcttcctataccaataaagattcattacctgcttcaaatcgggggtcgccaacacgcagc

SEQ ID NO: 21093 - DNA, 520 bp, Glycine max
gctacgcaacgacggacaccatcaccaagggtcagccactccctgatgatggcaacaccttgctttccaaggacggaacctttgagttgggtttcttcaaccccgggagttcaaataaccgctatgtcggaatttggtacaaaaacattgtggtcaaaacagtggtttggatcgccaaccgtgacaacccaatcagaaacaactcaagcaagttggtcataagccaagacggaaacctcgttcttcttagccagaacgagtctcttatttggacaacaaatgcatcatcatcagaagtttcgagttcgagtccaattgtgcagctcttggatactggaaactcggtaattaaagatggtgatgacaaagagagtgcttttctgtggcaaagctttgactatacttgtgacacactattgccaggaatgaagtttgggtgggacttgagaactgggcttaaccggcgtcttacttcttggaaaagctgggatgatccatcttcaggggactttacttgggg

SEQ ID NO: 21094 - DNA, 825 bp, Glycine max
tttcactcttccgggggattcacggagatgtgttttgccaggaattggtttgcacttgaatgcacttgcaagcttaaaggattgcaaaaacataaaaatttgacacattgtcatctggaaggcaacctaatctgctcagctctccttcatctgtgcaactctctccaagccaagaacatcaactatcattggtacctgcatcagtggaaagagatttggagccattggagaatgaggttcagcctggtgaagattgtacccagtcattggtattggttcagatggctggtgaagatttccagcagaatagtccgaaaaagaaaaggcgcaagttggaaccagctggggaaggggagtcttgcaagcgttgtaattgtaagaaatcaaaatgtttgaagctttattgtgagtgctttgctgctggagtctactgcatagaaccttgtgcatgccgcgattgcttcaataaacctattcatgttgagactgttcttcaaactcgccagcagattgagtctcgtaatccacttgcatttgctcctaaagtcatacgaagttctgattctgtatctgaaattggggatgaccttaacaaaactccagcctcagcacgacacaaaagaggctgcaactgcaagaaatcaagctgcctaaagaaatattgtgaatgctatcagggtggtgttggttgctccgttagctgtagatgtgaaggatgcaagaacgcttttggtagaaaggatggttctgctcctgctggcttagaagccgatcctgaagaagaaacagaagcctctgacaagggtatggtagaaaaaactttac

SEQ ID NO: 21095 - DNA, 570 bp, Glycine max
gattaattcatttacagtccgtgcattacgtgatacttttccacctgctagaggagcaggcattatggctttatgcgccaccagttcctactatgacatcactgaagttgcaacccggattcttcctaatgttgttgtgctcacaattgatcctgacagtgatgttagaactaaggcatttcaagctgttgatcagtttttgcagatagcaaagcaacattatgaaaagacaaatgcagcagataccactggtgttgcaggtgtgggaagctcatctgttccaggaaatgctagtttgcttgggtgggctatgagttctttgaccttgaagggtaaaccttctgatcatgctccagttgcttctgcatgttcgactgcaatcacttcgacgtcttctaatggcaccgcaggtatagagacgccatcaacagcaccagcccgtgtaagctctaccgcagatttggctgaacaccctgtccctacgtctcctacatcaacggatggctggggggaacttgagaatggaattgatgaggagcatggaagtgacagggatgggtgggatgatct

SEQ ID NO: 21096 - DNA, 567 bp, Glycine max
  unsure (1)..(567): unsure at all n locations
tcgctttcatcttgtccattgcaagtgaacagaaattcatactcagccagatcaccccaaattgactgccgcgcggtgggaaaattggtcagaatcaagattttttgccaatgggaaagaatctgatagtggtgtttcctcaaacctaaatgtagctgctgaggctaccaatttagcttcatcacaggaggctccatgtaacaaccaagttaacccagctcctccagacagggtgaatgatgttttctgggaacagtttcttaccgaaaggccaggctgttctgacaatgaagaggcaatgtccaactaccgagcaaacccgcatgatgaacaagacgaagggcggtcagctcatggaatctctagaaacattaagaacatggatcaactcacactttgagttgggcatgctgtcttagagaacagttaaactatttttatatgaatttttcatgactaatatacaatatgatctgaaacttcacagttgacagttggccccctgatttatcttgtgaaaaatcccaaatgcttaccnnnnnnnnnnnnnnnnnnnnnnnnnnnnnn

SEQ ID NO: 21097 - DNA, 406 bp, Glycine max
tggatacagatagaaaaaagcagagacaagttgtcgtcattttcttcacccaaaacaaagtcgaggatatcatcaccattgtccagtgtacaacgcatacatcttcgatccttagtccttattctctctcatgaaccggtggtccggcggtcggggtcgtaagcctcggcggcgagcatggtgctgctcgttcgcaatccctccgtcgagccccgaagtcaacacaatccctcactccaaatcgcgccacaaaaacaaaacagaatctttttcaaaacccagcgtcgtttcggtcccaaactcaccgcagagcgccaaatccgggtttcccatcgtgggccggatcgacccgcgccggatcttgtcgccgggaagagtctctcccatcgactccgatcccgccccc

SEQ ID NO: 21098 - DNA, 388 bp, Glycine max
tgaaggcgcagtcgctgtgtttggggaaagacccatcaaattaatccgcgttttcctttttctttcgtttccgcttcaaagcatgaagaagcctccaactcagacctcttccatttttttcagtattcatttccatttacactttctttttctcttcttcttcttcttctggctacctcattcttaataagcacaactaccaaaagtgggggcagttttctgaatcacaagtgaacctctctagagagagtcttgtgcaagatgattgagttgtttgagtatcaagagaggtcaagtgatggttgatcaagctgatttagttatcatttgtgtctctgttggggtggcccttggagttttgatagcttatctcatatatgttggcata

SEQ ID NO: 21099 - DNA, 838 bp, Glycine max
ttcaaaatgcgtcttcctcgccagctcattgtacgtgattcagattcccttcttcctcttccttttctacaattctcagatttgtaaccgccccccgaaaaaaaaaaaatcaaaaaccaaaactctaagtgggtcggtttttctgcttaaaatttctgttttggtctgaaatttctttgtttttggtcgtgccagtgctctatgagatagaatctgcgcgagaaagcgacaccaatccttgcaatagagatggtggttaccagaaatattgtgttgttactgctttctattacttttgttgctccaattgtgctctacactgatcgttttggcaccttcaagtacccctttgctgagcaagagtttattgatgctgtaactgcttttgtgagtgcagctgactctggccatttgaatctcctgccgcaagaaacttctacggtctttaaggaaccaattgggcttgtatatacggaggacgctgcaaacacaaagaatttgcttcatggcttgcactttgccaaaccaggggagcatgtatctgccagggtattgtcagctacgaaggacgaaggtcaaaccaaaggggagaaccccatcaaactggtgacagatggaattaatcaaggaaatcaaaacagctatctggtgaaagctgatataactggtgatagtgtaaatggggaagatgctattgatgttgatcacaatgatgggaaactcgctaaatcttctgatgcttctgatctagcatccgaaacaatggacactaagcaggagcaccaacacattaaatcttcaagccaagtacctccgaaaggatctaaattatcggaag

SEQ ID NO: 21100 - DNA, 546 bp, Glycine max
cccacgcgtccgttccttttctacaattcttatatttgtaacctgctctcaaaaaaggagagaaaaaaaaacagagctgtaagtgggtcggtttttctgcttaaaatttctgttttggtctgaaatttctttgtttttggtcgtgccagtgctctatgagatagaatctgcgcgagaaagcgacaccaatccttgcaatagagatggtggttaccagaaatattgtgttgttactgctttctattacttttgttgctccaattgtgctctacactgatcgttttggcaccttcaagtacccgtttgctgagcaggagtttattgatgctgcaactgcttttgggagtccagctgactctggccatttgaatctcctgccccaggaatctttaccaatcgggcttgtcttatacggaggacacttcaaacacagagaatttgcttcatggcttgcactttgccaaaccgggggagcatgtatctgccagggtattgtcagctacaaacgacgaaggtcaaaccaaaggggagaaccccatcaaactg

SEQ ID NO: 21101 - DNA, 323 bp, Glycine max
catcaatcctcgttgctttatttgaggccacattatacgcatctctccatctctctctccttacctcctccggctccggcttcctcgccagctcatttgctctatgagacagaatctgacgcgagaaagcgacaccaatccttgcaacagagatggtggttaccagaaatattgtgttgttactgctttctattacttttgttgctccaattgtgctctacactgatcgttttggcaccttcaagtacccctttgctgagcaagagtttattgatgctgtaactgcttttgtgagtgcagctgactctggccatttgaatctc

SEQ ID NO: 21102 - DNA, 283 bp, Glycine max
tctctcctctgtcttcatcaatcctcgttgctttatttgaggccacattatacgcatctctccctctctctccttaccacccactatgcgtcttcctcgccagctctatttacgtgattcagattcgcttcttcctctcccttttctacaattctcagatttgtaagtgggtcggttttcctgcttagaaagtctctttcggtctgaaatttctttgttttttggcgtgtcagtgccctatgagatagaatctgcgcgagaaagcgacagcaatcattgcagt

SEQ ID NO: 21103 - DNA, 380 bp, Glycine max
cggctctaggcaccacactatggcttgcactgataaaacggccaccgtcaccgacgaagctagcggcggcggagccactacaatcttcgccgtgcaccccgacataatccaaacccacatcctcacgtgcctggacggtcgcgcactcgcctccgtcgccagcacgtgctctcaactccacgcgctctcagaccacgagcctctctgggagaacatttgccactccacgtggccctccacgaactcgccacgcgtccgccacgtcatatccacgttcccatgcgcgtctcgctcctttttctccgactcggttccttccttcgccgcgcgcgaaggttcgaacatcgatcgcgcgccagagctgatttccgcggtggaca

SEQ ID NO: 21104 - DNA, 563 bp, Glycine max
cgtaattaaagtggtgtgactattgagttctatgaaatgatgccaccaacaaccacacccactcattgattcatttggttccctcactttccccacttcctttgtctccatataaacccttcaccctgtgacccttttcccactcccaaacccctctcttcattccaattttggcaccacaccatgccaaccctcaaccatgtcctcacattcacattcttccttctcctctcttgccattgccacctcctcaatggccaagaggacacctcatttggccgtgccatagacagaaaattgttaggcctaaagagaaaagaaaagctcagccacttcaaattttattggcatgacatagtgagtggccgcaaccccacttcggtggcggttgttccgccaccgccgaaggtgaacacgaccacagcatttggcttggtgaacatgattgacaaccctttgacgttggggccggaattgagctccaagcttgtgggtaaatctcagggattttacgcgtcgggctcgcagactgagattgatcttcttatggctatgaactttgc

SEQ ID NO: 21105 - DNA, 519 bp, Glycine max
tgcgtaagttataatgtttctgacaaacatgattgtttaatcctgttattatcgatgatactttaaatattgtttagacgattcaatagtatatttttggagacctttttatgaagttcatgcaagttgttagaaaattcctttctacaattagaatttgaaatggtaatagttgttattccttatagtgctgagtcgaggggagaaccaagttcgcatctgtggctactgacttgttgaatgttgggcagactaacatagcatgtaaatgaatagatgacaaaagaatgcagtttcttgtaaggatattatcctatcacactatcttccgcttaggacaatattctgcagatgaaactctaaatattcttatcttcagatgatattgtcctatgacttgttggatttcttgtgaagacgatactgcaaatctttttcagatggattcaatagcaaatttctggcgggttgcatatgaagctcatgaacgctgttagaaaattcttttctactattaga

SEQ ID NO: 21106 - DNA, 507 bp, Glycine max
  unsure (1)..(507): unsure at all n locations
agcgacctataattataaaagtggcatagcataacgtaacaatgttgtcatatggttgccacattcgacatctctctgtcttaaattccactcgactcagaaaataataatctngaatcgctaagacagcaatgggatctctctctgctctctaccaacctatccaatatcccactgctcgcagagacgactccgtccttgacgacttccacggcgtcaagattgctgatccttaccgatggctggagaatccggaggcagaggaagtgaaagagttcgtgcagaaacatggttgcgctgacggattcggtgctgcagaggtgcgactgtaggcccaaactggccgagaagataaccaagttgtttggtaatcctcgttacaacgctcctttcagacgaggcgataataagtatttttacttccacaacacggggcttcaggcgcagagcgtgctctatgtgcaggacactctggaggctgaggctgaggttttgctcgacccaaat

SEQ ID NO: 21107 - DNA, 478 bp, Glycine max
ccttatgatccaaggctgctgtttacagcttcggatgatggaaacgtccacatgtatgatgctgagggaaaagctttaattgggaccatgtcaggtcatgctagttgggtactgtgtgtggacgtgagcccagatggggcagccattgctacaggttcaagtgatagatctgtaaggctatgggatcttaacatgagggcatctgtgcagacaatgagcaatcattcagaccaggtatggggagtcgcatttagaccacctggagggagtgatgtgcgaggtggtcgacttgccagtgtatcagatgacaagagcatatcactgtatgattattcctgatttagatattgtgtgctgtatttgtactctttgtggaatgttattcactcttttgtctacaaattgattttgaattgaagaaaatgcatggttgtacatgctgtatcagtgttttgattctgtatcatttatgcatgat

SEQ ID NO: 21108 - DNA, 473 bp, Glycine max
tgattcataaggagattgagaggcaaaggagacaagaaatggctaccttctatgcctctcttagatcccttctccctcttgagttcatcaagggaaagcgttcaatatctgaccacatgaacgaggcagtgaattacataaagcacatgcagaaacatatcaaagagcttggtgccaagagagatgaactgaagaaactctccaatcattccaataatatggaaaataaccatgagggcttgcatacatcttgcaacttcactgtccacgagaaaaatggtattatgggaatagaaatcaccagtgtcttcagagaggaaaagcctaaaatttcaaagttactacagtttttgactgaagaaggacttgaagttgttagtttcttttcaacagaagtcaatggcagattgctccacagtgtgcagtgtgaggtgaaccattccaacagtgtagatccatctgagctgagaaag

SEQ ID NO: 21109 - DNA, 559 bp, Glycine max
tgatgaataagttcattttgcaaatgagcttttagacattcacttcaagtcagctttggatgatcttttgaaaatatgccagactaaaatccatgccgaccaaggagacgagaaagagcacttgaaggtgactcttttgcgtattgaatcatcgttgcaaggacttttttcttgtttgcccgattttgtcccagactctaggaatggaatggttgaagattcaaaccatatgtttttaattgccggggccacaggttgtactgttggtagtactgctctgagagaaaaagctactgaggttgtacatgcagcctgcaaatatgtcctggagaaaaaatcagatgacagcatcctgttgatacttattattcgcatcattgatgctttaggaaactatggaagtttggagtatgatgagtggtctagtcacaggcaggcttggaaattagaatctgctgccataatagaaccccccattaatttcattgtgtcatctcattctaaagcaaagaaaagacctaggtgggctcttatcgacaaggcatttatgcacaataca

SEQ ID NO: 21110 - DNA, 369 bp, Glycine max
ctcgagccatttggtttcacacacacagaagaataaaaagagagagaagagaaacacacaaacacaaacagaagcatggaggtggaagtgatggttccaccggtggacttcaacttcgacagcaactgctcctcccccttcatcaccgccccttccagcccccaattcttcgcttccaacaaaccaaacttcttcttcagcgcccccaccagccccacacgtggcacctcctccttcttccacgactccccctcctcttcctctgttcttccccatgaagaacaacaagatttcgagttcaatttcagcggccacctcgaccgcccttctctctccgccgccgagctcttcgacggcggaaaaatccgt

SEQ ID NO: 21111 - DNA, 539 bp, Glycine max
cctttctatttacctagcacccgcgcccaagtcacttgctccaaccctttctttttctcagtatctgtgccccaaccccacttgcttttctgcatttctttttttatccttctgtgtcctctgtattctaatcccatgcttcttaatcactttctcaattccattgctccctctctaccctgagttttggaccttgccatagattctctcagattttcgctcttcctggtatcttcagaatgctttctgtgagggatttttggaggcggcataggtggaaggttctcgtcactcgtcgtgttttaggaagtgggtatcttgtgtataagctctacggtgctcacaggcatggggttcaggaacttgaaagagaactcgcagttcagagggaaactgaggagcttatgaaggctcagatgcaagctcactttgagaatattcagaggatgtctgatgtaacattgccgcatgctatgcacgagttaagttgtcggatcacagaagagttggatctttctcaccttcttgaaaggttaata

SEQ ID NO: 21112 - DNA, 708 bp, Glycine max
tttactttgtattctcccatttgtcttggagtctacctggcttttttatgggacttggtatcggtgtttgatttgcttgtaatgttaaacgtaaagataagaaggtagatttgttgctggcaatgaagctacttgagaaatcaactgattcggttcctcttatttttctcgttaccgatggggctgttgaagatgagagagatatatgcaattttgtgaaaagctatgtctcaagtgggcaatcgtttcgaacacctcgcatatatacttttggcataggtttatattgtaatcactacttcctgcaaatgctagcacaaattgggaggggccactatgattctgctcatgatttagattcaattgactttagaatgcaaagactattcagttcagcttcatcagttatggtagctgatataacaatcaaaagtttagaaggtcttgattcacttgagttattcccaactcatatacaagacatatcatttgaaagtcccttgatcttatcaggaagatacagtggaacttttcctgaattagttaaagtcactggtactttggcagatatgactaacttcgtagtagaccttaaagtgaaaagagaaaaggatatgcagctcagtaatgtcctttctcactcctaagacttaccacgtattcatcatacctggttgtgatttatcccatcttagcaaatgggatctg

SEQ ID NO: 21113 - DNA, 551 bp, Glycine max
gttcgcactgggaactgggaagaatagaaagaaaaagaaaccttccgattccttcatcgccgccattattcggtggccactgcatgcacctttcccttttctcatccaacaccttctcagatctactccttttcctcttcccaaaatcattctccgattgcgcctagggttcacacttcgaatcgccgttttctgtcatgaattgggctccgttagcacacctcgccgactctcgctgacggaggagattcgaaattcggccgccaaatggtttcaatcttgttgtacatcgtcgctttcatttgcacgtgcggagccattgcgttgtccttgcttcacatttataagcacctcctcaattacaccgagcctacttatcagcgcttcatcgttcggatcgtttttatggtcccggtttatgcgttgatgtcattcttatcactttttctaccacagggttcaatctattttaattcaatccgggaaatctatgaagcttgggttatttatattttcctatcactatttctcgaatgggtttgtggtcctgg

SEQ ID NO: 21114 - DNA, 624 bp, Glycine max
gtggatatgcctcatcactatgttgaagttcatcctgagattcgtaaacaattctgggattctcagcattggccaaagcatatacttgtccgatatacatggaaggaacattcagagatagatgtaacttcaggattttttgttctgtttggttcaggtctcatgttgtctttcatcctttcaatctacgtattgcaatcatcacgtgacaaattggaaagatttgtaagggaaacggttgtagaaagcagcgtgcctggcgaggtggtagcaaaggttgaatgatgcatccctggtgtcaatgatgcaatgtataacattgtaatattgtattcgtgaattgacaagatcagttttgttttggaggagggggagaaggggatgttgttcttgcatatacaaagctatgaaccagttgtttcttttcatgatgaaggaagtgacttaggtgggtgagttggagtgcattaatttatcaggaccaactgtggagtgagaagctgtaaaagttgagagattgagtgtattaattcatagggaaggctggatttgtaactacattaggttaaatacttgaaaacctatagaagaagaataaatcaaagtgtagggtattgatttggc

SEQ ID NO: 21115 - DNA, 472 bp, Glycine max
  unsure (1)..(472): unsure at all n locations
caactccccaaaggggactttacaacaagaagaagaatacaaaaagtcctttttgccctttccttctctctctctctctctctctctctcagttttcctcttcgtaatggcgagttcttcaagaacgaaatctagtggaccagtgcttcgttcttcttcttcttcttcttctctctcacattctaacagcttctgttcgtactcaacatcaaacgcaccgtttcactcaccttcgtcgagtttcttcagaaaacctcactcgcacgtgcctccccgctccacttccccgacacgtgtgaacctattcagcgccgcgccgcttccctcgcactcggtccggttcgctctcgaccggtccatctncccgaaccggaccgtctcgagccacgtcatcgcgaagcaccgccacgtcacggctcagaagaaatcgtgcatgtgttcccctacgaccgcatccggttcgttccgatgc

SEQ ID NO: 21116 - DNA, 490 bp, Glycine max
  unsure (1)..(490): unsure at all n locations
cacgcgtccgtaagctcggaattcggttcgagtttctctgcctctctctctctctcgcccccaccaaaatctcaaaggaggaagccaaagaccctcttttgctcttgctttgttcccacataccaacctgctcctattttggcatgaacatatcttacacagtgtgaacttgttaattagttggttatctatacacgtgaatttaaagaatggcatcaccctcagaactaagtctggattgcaagcctcaaagctattccttgctactcaaatcatttggagatcaaactgatcattcctacaagcttgaagaattcctcaatcgcttggaggaagaacgcctcaagattgatgctttcaagcgcgagcttnctctctgcatgcaacttctcaccaatgccatggaagcttcaaggcagcaacttcaggcctttaaagtaaaccatggagcaaagccagttctgggagaattcatacccatgaagcactt

SEQ ID NO: 21117 - DNA, 675 bp, Glycine max
actgtcccatcccacccaagcttgatatctaaccaattaccatcatcagagccatccactgaatggtgacctgcgtagaagtgtgagttgattgagaggcaatcatttattcaacttcgcatttctctcgcatccactgaaccaagattcctattccaaaatgaccgctcctacttcttccagcctgtggctggctccaaaccccagcaaaagatggggcgaactcttcttccttctctacacccccttctggctcaccctttgtctcggcattgttattcccttcaatctttacgagaaattcacagagctggagtacttgctcatcggattggtctcggctgttcctgctttcgtcgttccattgctgctcgttggaaaggttgacagaagcatttcttggaaggatcgttattgggtcaaggccagtctctggataataatcttcagttatgttgggaattatttctggactcattacttttttacagttcttggtgcatcttatacctttccatcatggaaaatgaacaatgtcaccacacacaacattcctgctcactcatgtttgcttcctgtgttatcatgtttcatcgaacatgacactgcgtcgattacggcattatattgctggtttgccagaaaaacttcaatgggctactgaagctgcatgga

SEQ ID NO: 21118 - DNA, 285 bp, Glycine max
gcatgctgacacacactcactcactgtcccacctgagcttgttaccaaactagttaccgtcgtcggagccatccactgggtgggcaatcacttattcaaacttcacatctcatctcatctctctcgcatccactgaaccaagatccctattccaaaatggccgcttctgcttcttccagtccgtggctggctccaaaccccagcaaaagatggggcgaactcttcttccttctctacacccctttctggctcaccctttgtctcggcattgttattcccttcaat

SEQ ID NO: 21119 - DNA, 327 bp, Glycine max
ggcatacactctcctgcttcttctgttagtgaaatcatgattctctctcatttgttggttttccctgtgcctaaggtaggcaggacaatatggtgatcttatatgaaaatgtgaaacctgtaactattcatgtgcatgcagcatgatcattcccaagcttttttgtaggatgtgaaatcattgcatattgtacaaaactttgaatagaatgtagttgttcaatgggcaaattagaagcgtgaaacttacattggaaaggtgtagcctcatgttcacagttggtgagcaattgagcatattgcaatctcaatacgtccgtcttgcttt

SEQ ID NO: 21120 - DNA, 497 bp, Glycine max
  unsure (1)..(497): unsure at all n locations
ctcgagccgtgagaaggcactcccttgtgactgcatcaccaaaacacgtgtccctcttctttgttggccacaaaagcaacccaacaacaattcatcctcacactcacacccttctgactccatcacccaaacatgacccacaaaaccataatcagtggtggggccaccccaaaaccatcaaacccagtttcaatcacagtaggatcaggttcaacaccttgcacactggttccaccgaagaacaagttgaaacgggtgaggttgaagtcgatgtgtggacgaagatgcaggaagaagctaaactcgatgtcaccgaggaacccattttgtctaattactacaacacttccattctctctcacaagacacttgaaaccgcgttggccaatcaccttgcaatcaacctcagcagcacaagccttccaagcagcacactttctgatcttnttgtgacggnnttggagaccgaccaagccatcatggatgctgtgaagtgt

SEQ ID NO: 21121 - DNA, 477 bp, Glycine max
  unsure (1)..(477): unsure at all n locations
gaaaaattagagagtgagatgaggaagaagaacattctagagggacaaacattacacaactgaacccacaattctattactgtttgcttcaaaggatataattgaaggttttgagaactaaggctgcaatactgtatacattctactcaaggaatggtcaatatctggaaatttgctatgtggaaaggttaaatgaagccattcttgtcgaatcatactgattctatgtacaattgttcccaagttggttgtagtcatccactggctcatacttcttatccttgtggtgatccttattttggtagttcaatagttgcttatggaccacaggctattactcaacaaatggtgccccagatgctgggattagcatccaccagaattgcattaccagttgatcttgcannanatgggcccatttatgtcaatgccaaacaataccatggtatactgagaaggcgacaagcacgagcaaag

SEQ ID NO: 21122 - DNA, 306 bp, Glycine max
cctatcgcgtcctgaagaattagagagagtgagaggaggaagaagaagaagaagattccagaatccagagtgagaaacattaggcttatcagaggagacatgcccgagttgaaccgacaattctattactactctttgcttctttcttcatgcctcatcaaatcccaaaggatataattgaaggttttgggaactaaggctgcaatattgtatacattctactcaaggaatggtcaagatctggaaatttgctatgtggaaaggataaatgaagccattcttgttgagtcatcctgatactatgta

SEQ ID NO: 21123 - DNA, 744 bp, Glycine max
  unsure (1)..(744): unsure at all n locations
gcagggttgaccgagtttgaggttggaaggaatcaagaaggtccaagtgaggctgtgaatgcatactatgcagcagcattggtgggtcttgcatatggtgactcaggccttgttgccactgggtcaacgctagtggcgttggagattcttgccgcacaaacttggtggcatgtgaaagcagaagacaacttgtatgaagaagaatttgcaaaagataacaggatagtggggattttgtgggctaacaagagggatagtaagctatggtgggccagtgctgagtgtagagagtgtaggcttggaatccaagtgctacccttgttgcctattactgagacattgttctctgatgctgattatgtgaaggagctagtggaatggacagtgccctttttaagtagtcaagggtggaagggaatgacctatgccttgcaaggaatttatgatagggaaacagcactgcagaatattagaaagttgacaggttttgatgatgggaattcgttcactaatctcttgtggtggattcacagcagatgaggagtgttgcacacaagcttctggacaagttttgtttattgcaatattattttaaatttcattcttgtcaacattttttattttctgtaatttatgaaattctacatcttgtatcagttattgttaatgtggtgggggtaaatntgagtaatgttttttttcaagaatttaacaaaatttgcagtatagcagatttttctaaaa

SEQ ID NO: 21124 - DNA, 394 bp, Glycine max
gaaaaaacagagagagagtgagacagtgatgactgaatgaaaaaaaaaaaatgaatctcgtataagtaagtcatagatatctttctcagaacttcagctctctctctctctttctctctctggaacttcttctctcctcaacgctggttccagagaaacccaaaacaaaactgcgtcctctttaaaacgcaccatcaatacaaagaaagaaagttttcaaaacgcaaaagccaagaaccaaaacaagaagaacaatgccattttttttctagcacccttttgtttccttccaccaagaaccggtttcgccaccgacccatttctccaaatgcttcccctccgcctaagcgccgtcgtttcctccctcattctctgcttcctcttcccggcactg

SEQ ID NO: 21125 - DNA, 697 bp, Glycine max
cacgcgtacgtaagctcggaattcggttcgaggcgaagtgcaatgatgcttgattgtacaattgcttctaggcttgacatggaaagaaggattggatcacagctagatgttgccactcttgatgacattttgataccatctttcaggcatgcaggtgataccttatttgatgttgacacagttcatagaattttggtaaacttctgtcagcaggatgatagtgaagaagaaccagaagatgcttctgtttttgaatccgacagccctatttcaccctctcaaactgcactagttaaagtgtcaaaactaatggacaactaccttgctgaaattgcccctgatgcaaatctaaaactttccaagtttatggtcattgcagaaaccctacccgcacatgcacgcacgattcatgatgggttatatcgagcaattgatatttacttaaaggctcatcaaggattgacagatttggacaagaagaaactatgcaaattgattgattttcaaaagctttctcaagaagctggagcacatgctgcacaaaatgagcgccttcctctccaatcaatagtgcaagttctatactttgaacaactaagacttagaaattcattgtcctgctcctacgcagaagatgataccaagccaatacaccagtcatggcgcataagtagtggagcactaagtgcagcaatgt

SEQ ID NO: 21126 - DNA, 421 bp, Glycine max
ccctcgcgtccgtgttgagggagttcatatcaccaagttatttattctggtccctcctttgctcatccacacaccgctttcctatcatggaagcctctaactcacattcgtttcgctctcgtgtgcacctttttgtgcttttcttattgttatgttttgtggtcacaattgaagctaattcaaagaagaaggtcccagccttttatgtgtttggggactccacagtagacccaggaaacaacaacttcatagacacggctttcaggagcgattttcctccctatggtagagattttgttaaccaggctcccacgggaaggttcaccaatgggaagcttggcactgattttcttgcttcatatctgggcctaaaagagttggtgccgccatatttggatccaaatctcagtgacaaagaact

SEQ ID NO: 21127 - DNA, 543 bp, Glycine max
tgcattttcttcggttgatcccttctccgcctataaaactgcaaatcccatcaaaatcccaatctttagggtttccatgtccaatccaagggattcgtttatgaagatttagcgaaaagggttgaaattgatcatggatttgggaagcgaatccgtggaagagaacgaagtgaatcatgatgggaatggaaacggtggttcttatgatgacgagaagattgggttgggtttggagggaaattcggatgtcaacggttcggatcaaaagggaacggttggcgaagttgaagtgggtagtgcggaaggtgtgaattccaaagggacaccaacaaaggggtttgggttgaagaaatggaagagaattcggaggaatgttgttaaggatccaaattcgagtgttgattcgggtaaagtcttgaagaggggcttgtctggcaatgccaatttgagtgaaagccagccttttctgcgcgatgttaaggagaagaatgaaggatcttcaaacatgtttgggaatgtagtgttctctgatggcaatgtgat

SEQ ID NO: 21128 - DNA, 415 bp, Glycine max
ccctattcgtgtgcgtacgttgttcggggaagccttacattgtaatgctcgagaagttcactgcacattgatcagtatataaagacaaatgagcagtggtggaagggctgtgaagcccaaagaggaggagcaagatggcatgtctgtccactctccttgcaaacctcctccttcctctgcttcctctcgcccctaggagcagtcacaggttgaattggagctgagattgttggaagctcttgagatttaccctccaatgaaactacaaggagtacatcgtcactttgtcctttatggtctgatggaatttctaaggaggaagtttgacagacaattttcttctgaggaggtcctacaattgctggatcggttctacaacttagaaatgctgaaaacagatgatgacgagattgat

SEQ ID NO: 21129 - DNA, 365 bp, Glycine max
gcacacattttcttatctccgctccccttgcggtgatggaggaatctgaatcctttgctccatgccacggtggcattagcaatattactctgtctagactcctaaatttttcatgcttatcttgtgcaacactctctctgctagtgcgcgcgcgctaaaactgtaacaagtttaggaagtgaatgtatctatttatctgagttatttgttcgctcactgcaactgcaaccaccgaatgcgaacattaaaagaattaaaataaagctgtgggtagtgaagatctgggaatcttagagtaccaaattagatctctcgaatgtctcaaatcgagagcctcttttcctgtcgcaactacaattgctagg

SEQ ID NO: 21130 - DNA, 563 bp, Glycine max
cttgttcttaagtctcaacctctccactccactgcctattattgttgtgtcccattcaccagtcccctccgacatggaagccagcgctggactggtcgctgggtctcacaaccgcaacgagctagttgtcattcatggccatgaagagcacaagcctttgaagaacttggatgggcaggtgtgtgagatatgtggcgatgatgtgggactcacggtggatggagacttgtttgtggcctgcaatgagtgtggttttccagcgtgccggccatgctatgagtacgaaagaagggaagggagacaagtttgtccacagtgcaagaccagatacaagcgtctcaaagggagcccgcgggttgagggagatgatgacgaggaggatgtggatgatattgaacatgaatttaacatcgaggagcagaacaagcataaccattctgctgaagccatgctgcatgggaagatgagttacggaagaggtcctgaagatgatgagaatgctcaatttccagctgttattgctggtggtcgctcttggtctgttagtggggagttaccaatag

SEQ ID NO: 21131 - DNA, 341 bp, Glycine max
caaattcgcaagggagctgcacttaacgcaatctagattgctgagatgttgctatgagttctggtttttcaaggatctggtacttaaagattatgattcttttgaaacagttttgtatgtgctagttgtatgtggttattcatttcttttgtgatgtttaactagtccaagtatcttttcaacgatgtggtagcacactagctggaaacagtttttttaaggtcttggtgcgtaatatctgcaatccttttcaccgggaataacaagcactggttatggcaaaggagagtaacctaatgtttaatcttttgaataaagaatttgttgagcagttttatatc

SEQ ID NO: 21132 - DNA, 735 bp, Glycine max
cggctcgagatggcataacaacaaaagtctgatgccatgagtgtaggttctcttcatcctcacaacaaccccaatcttcccaaccactactataaacaccacaaactcctctcctctcttttcttgttttcaaatctcagacggaagaaataacaaccaagaaatcataggaaaaaaaatgccaccttttgccggctccgaaccagttgggttcccgaagccagattccaacatagtttccattgacgtgggaggccaactgttccaaaccacgaaacagacactaacctcggcgggtccgaaaaccttcttctccagaattgcggcggaatcttctggactccacacccccttcgtagacagagacccagaactcttctcgctccttctctctcttctcagaaccggtaaccttccctcaaaggccaaagctttcgatctccaagacctaatcatcgagtctaaattctacggcatcgagtccctcctcgtcaattccctttccaacccttctcaattggaaccttttaatctccaaaaatcgcttcttttacccttgaacggacgcgattccccctccgccctcgccgccaccgcttccggcgccctccacgtcgcgcacggcagcaagatcacctccttcgactggtccctccgccgcaaatccaccgtcctgactcaatttaccgccgtggattccctcctcgccctctcgccggccctcgccgccgccgg

SEQ ID NO: 21133 - DNA, 1146 bp, Glycine max
ctctagccgtgcaattacaattcctatcatttgcaatccctatgtcatctaaaccttcttttaacaaaatccaaaaaccatgttgaacaagcaatctgtcttgtccttctcactagcattgctagtttcatttttgtattccaccaccaccttagcccaattatcaccagcttctgcccctctcaaaccaccccaacctgctcctaccataccagctgctgctcctcaacaaccattggttccctcattgccacaatcaccaagtgattccacccctgacagtactccagctgttgacattgttggaatcctgaggaaggcaaagtcattcaacatcctaatccgcctcatgaaaaccacccaattgatcaaccaactcaatgcacagctcctcactactaaatcaggcggcatcaccattcttgccccagatgacagttccttctcagaactcaaagcaggcttcctcaactctctttctgatggacaaaagctcgagctcttacagttccatgttctttcagactacgtgtctagctccaactttgatacactgacgaacccagtgagaacactgtgcaggggctaaacctggaaaggtggaactgaatgtgataagttatggtgggagtgtgaacatctcaacaggtgaggttaacaccaccatcactggcattgtatatactgataagcatcttgctatttataaggtggggaaagtgcttcttcctacggacttctttgcagttaccaaggcacctgcaaaatcaccctctttggctccagaaccttcaagtgacaccgcaaaggcacctaaagctgataaggacgagtcatcatcttcagattcgtcacaggttaatcccactgaacagaactctggcaccgagaagatcgctgtgtacggaatgtggatgtcacttggacttggagtacttctcatgagtgtgatgacaacgtaaaccagaaccagaataagatcatatatatctgaattttccaacgttgtagctagttgctacaccatatgctatctattgataccaagagtgctacgatgagttatgtaattgtgagaaagaagtgaaaagtgaaaacttgtgatgaatttattgaatactggatcaggggatctattattgttgt

SEQ ID NO: 21134 - DNA, 467 bp, Glycine max
aggtggggaaagtgcttcttcctacggacttctttgcagttaccaaggcacctgcaaattcaccctctttggctccagaaccttcaagtgacaccgcaaaggcacctaaagctgataaggacgagtcatcatcttcagattcgtcacaggttaatcccactgaacagaactctggcaccgagaagatcgctgtgtacggaatgtggatgtcacttggacttggagtacttctcatgagtgtgatgacaacataaaccagaaccaggaaaagatcatatctgaattttccaacgttgtagctagttgctacaccatatgctatatatattaataccgagagtgttacgatgagttatgtaattgtgagaaagaagtgatgaatttgttgaatactggatcacgggatctactgttgtatctatgaaattattctaaaacaagagtattatgctatggtcgcttctgtt

SEQ ID NO: 21135 - DNA, 306 bp, Glycine max
cgtcgagccgccaatacaaatcctaccatttgtactcctttccaaaagcatcagagccttcattcaccaaaactaaaatcatgatgaaaaagcaatctctcttgtccttctcactagcactgctagtttcatttttgtatttcaccaccactttagcccaattatcaccagcttctgcccctctcaaaccaccccaacctacccctacagcaccagctgcagctcctcaaaaccattggttccctcattgccacagtcaccaagtgattcaacccctgacagtactccagctgttgacattgttgg

SEQ ID NO: 21136 - DNA, 247 bp, Glycine max
tgcaattacaattcctataatttgcaatcctttccaatatcatctaaaccttcatttaattaacaaaaccaaaatgatgaataggcaatctgtcttgcccttctcactagtactgctagtttcatttctgtattgcacctccaccttagcccaattatcaccagcttctgcccctctcaaaccaccccaacctacccctaccccaccagctgcggctcctcaacaaccattggttccttcattgcca

SEQ ID NO: 21137 - DNA, 530 bp, Glycine max
ccaaattcactttgttccttcctacttctctctctctctcgtcttcaccaatggcgtcgtcgtcaccaccaccttctctgttcttcctcctcctcctcgctctcttcgccgccacggcatcctgcctcacctgcaccacccaaaagctcaccgactccaacaaaaagctcttctccaactgcctggaccttccctcactcgattccttcctccactggacccacgaccccgccaacgcctccctctcggtggccttcgtggcggctccgcccaatcccggcggctgggtgtcctgggggatcaaccccagcggcaccggcatggtgggggcgcaggtgctggccgcgtacaaggcggagggcaccggtgccgtcaccgtgaaaacgttggaccttaaatcttactctgccattgttccggggaagctgtcgttggacgtgtgggacatgaggggggaagaggtcaggggtgtgattaggattttcgcgacggttaaggttccggataaggcggagagtgttaaccaggtg

SEQ ID NO: 21138 - DNA, 860 bp, Glycine max
ggaaaatcatatatttcttctgaattcaatcagagtcaattgcattcaagaactgactttgtttctcagacttccatgaagtctgggttaccaactggttctcagaattctgaatttcaggatcaagcataccctccaatgcaggatcattcactaattttcatgcttacagaacctttctctccaaagcatctccctcaggggaacccagctagtcaattgccttcaggctctaatctcaatagagatgattttcataatcaacttcctatgcaggattcaaaattttcaagtaccacatcatttgggagcctgcagcctcaatcaaatcaattttcctggaagttggatgtgaacagactacaacctactctgggtggcaagttgcctccagaaggacatcttatgacatcttcccacatcgattcattatcacagaagcaacaaccaatgtataattttcaatgttctgtatccgaggctaatttgggtgtgcctggggagactgctactgcttcaagatatccacctgattttctggatagcaatcattcaacttctcttccatcttttgggggatcaagaatatctgctcactataatccttatgcatcaacctttgagaaaccactaactttcaaattcagttcaagtatttttagacaggaaaatgaaataatccatggtaacaattatgcttcttcaatattgaaccatactcctgtgaatggggaagatggtggtggggttggatcaagacagtcagcttcctcatcaaaatcagctagagctcttggtcaattttacctaggtctggtggtgaccaatatgacccactttttgacagcattgaaccatca

SEQ ID NO: 21139 - DNA, 513 bp, Glycine max
aattattattaattactaaggaactctcccagaaaagaggcatcagttgcaatggctcgttacggtgagggcgacaagcggtggatcgtggaggaccgccccgacggcaccaatgtccacaactggcattggtccgagaccaactgcctcgactggtccaagaccttcttcaccagcctcctcactaacctccctatcctcgacggcgagggtaacctcttcctcaaaacgacgtcgcttcgctccctcgacggcgaggcctacatcaatgtccgaaaggggaagatcatccccggctacgagatcagcctcacactcaattggcagggcgaagccaaagattcccagggaacctcgcttcttaaagtcgacggcaccgtcgagattccctacatctccgacgagaacgccgacgaggatcccgaggttagggttaccgttaacgatgagggaccggttgggatgaggattaaggacgccatgctttccaaggggaagcccttgatcttggag

SEQ ID NO: 21140 - DNA, 513 bp, Glycine max
ttaaatatttgcttcattccttcaccgccgcactatcgtttccgagaaccatcactttttctcgctgctcttcaaagcaatcgcaacgcgcgttttgcttctcttttcatcgcagatcctctgcgtcgccaccagattcactcacgtttcgtgattcgaacgcggcgtcgtttagactcaagcttgcgggagaagagaaaaccctaatcagacatggggaagaagaagccgacggcgagggacgaagagaacgcggtacagcaaggcggcggcggtaaatcgaagaagaaggcagtgttaatcgacgacgacgagtattccatcggaacggagctctccgaggagccggcgccggcttccgaggagaaacccgtcgtggcgggaaagaagaaaggtaagaaaggtaatgctaaagccaagagtaatgatgatgatgttgatgaggatgaagatgatcctgaaattgtgtttgctgggaagaagaaggggaagaataagaaaggtggtgggagc

SEQ ID NO: 21141 - DNA, 410 bp, Glycine max
caaactcaaagcctaaacacatttcattcccaaaaaactcactcacgagagtgcatcattcctcatttgatcctctcttcccccatgaccttccaaccagtccccactctccttctccttctcctcctcgcgtccgcaaattcccattttgccctcgccggaaagcgcaaggttcacatccccgacgagttggacgacgtgttcgacgacgaggaggacgacgcgtggcgagaatggggcaagaaacccgaaccccctttcccttcctccgatatctccaagctcgatccctcgcagatccagcaggagatgatgaagcgccacgccggacccgtcatcggattcgtcaagctccggccagggtctcgccgtactccggacatggtagctgaatttgcaatgaaatggac

SEQ ID NO: 21142 - DNA, 1155 bp, Glycine max
ttggccgtcgatgccccccgtccgtaggctcggaattcggttcgggagggcagggccggaccagcttctttctttacaacttacattttatcatctggctgggcaagtttggcagttgaagttatgcaaattttccctctactacgcaatcttttccagagattcatactcaggcttaaagaagatgcactggatggcagcctatcttttccgtaccatacagaagttccaagaatcttactgtttggattcctcgggttcacttgtgctattctggcacccctaatgttgcccttcttgttggtctactttttcattgcttaccttgtttatcgaaaccagattatcaacgtatacattacaaaatacgatagtgggggacagttctggcccattgttcacaacacaacggttttttcgttgctattttctcaacttatcgcactaggggtgtttggactcaaacgctcatcagttgcatctggattcaccattcctctgctgattggtacgcttctatttcaccagtattgtaggcaacggtttctcccagtatttaggagcaattcagcacagattcttattgacttggatcggagagatgggcacagtggaaggatggaagaaatttatgaacatttgcgttcagcctacaaccagtccagtttaatgccacataccacaagccaacccgaatgtgtcagtcttcacgaggacaaggatagtggtccatcttcatcagaagatatggagacaggcaatgaaaatgaaattagtcaaaaagatagaccacggcccattcaacgcacattgagtatgagttcagataaatccgtacttggtgtaaagcaatgaatactcagaattgtacattgtaataagaataagaatatcatgacgtgcactaaaggtgccggtgcatgaacaattgatccattatagatggagatgaaagtctcttgatatattgctcattaaatttttttagttgtaaatagtttttcaaatgattttcaattaaatgtgaatagacatgtaaggataacaatgccatccaagtaattttgcagtaaatgaggtcatttacataaatcaaacaacgttgtaatattgcatcttaagttatattgatctctgaatccttttttaatgatt

SEQ ID NO: 21143 - DNA, 378 bp, Glycine max
ctcgatccgaatcggctcgagtttttttgcaggaaatttgtgaagcaggtggtgactggtgccctgccaagtgtgatattgcgttttatttttgtgcgcagttccacccgtgatgatattgttttctgctgtggagggttctatttcccgcagtgcaaggaagaagagtgcatgttttaaagtcttgtacttcacaatctggaacgtgttttttgttaatgtatttactggttctgttatcagtcagctctcagtcttttctagcgtaacagatctgcctgcccaacttgccaaggcagtgccagcacaggctactttcttcacaacttacattttatcatctggctgggcaagtttggcagttgaagttatgcaaat

SEQ ID NO: 21144 - DNA, 850 bp, Glycine max
ctggctgtgtctgacgatgatgttccgacagcaagaggctggatagataatgtactggggaaattggtatcagtctctggtgatccaatccagaggttgggtgcttacttgttagaggggcttagagcaaggttggaatcatcagggaatctcatctacaaatcccttaagtgtgaacaaccaacaagcaaagagctaatgagttacatgcacattttgtaccagatttgcccatactggaagtttgcatacatatctgcaaatgctgtcatccaagaaacaatggcaaatgagtccaggattcacataattgatttccaaattgcgcagggcacacagtggcatttacttatccaggctcttgcacataggccagggggacccccctcccttcgtgtgaccggtgttgatgactcacagtcgactcatgcacgaggtggaggactttggattgttggagaaaggctttcagattttgccaggtcttgtggagttccatttgaattccacagtgctgcaatatctggctgtgaggttgtacgaggaaatattgaaatccgagcaggggaagctctggctgtaagttttccctatgttttgcaccacatgcctgatgagagtgtgagcactgagaatcacagagatagattgctgaggttggttaagaggttgtctcccaaggttgttaccattgttgagcaagaatccaacaccaacacgtccccattctttcacaggtttgttgagaccctggattattatactgcaatgtttgaatctatagatgtggcttgccccagagatgacaagaagcggattagcgcagagcagcattgcgtggcacgagaca

SEQ ID NO: 21145 - DNA, 356 bp, Glycine max
cccacacaccctctctaatttttgaggcatacataccattcgctcgcggtgtgtgcaatacagcttctatttcaccttccccccccaaaaaaacccttggctttttccctcaccaacattgttcctttgttgttattctagctttcattaaacacacgcgtcgcgccaggtgtagaagaaacacactagccaacacaacagccaaatgtccatggtttagcgctcaagaaccttcccagaaaaaaaaaaacttctcttgcctcatcaaagaagttactaattacactcagacaaaaatagcctaaacaaaatggctatgcttcttctcattccactgtgcctatcatccattttac

SEQ ID NO: 21146 - DNA, 505 bp, Glycine max
  unsure (1)..(505): unsure at all n locations
acgtcgacgcacgcgctgcgtaagcgcgggggcccgcgtcgtggagggaatcttatactgctacgactacttggggaaaatcaaagggttcgatgtggggcgcggggtgtgggaggagctgaaggggttggagaatgctttgccgaggtttttgtgtggggccaccatggctgatttgggtgggaaactgtgcgtggtttgggagtgccaatgcaatgggaaggagatggagatttggtgcgcggagattggggtgaagaagaattcggatggggaattgtggggtcaacttggttggtttgggaaggttctttctgttcccaaaggctcttctattgtcaactgttcttctgtttccttgtgattgtgaccatgcatgcaagcattcttttgatttgcatttgaattgccgcacttnctgctcttgatgttgatgtaaactatgataataaataaacagactgtcaacagctaccctgagtgataatgttgttgtgatgaagtg

SEQ ID NO: 21147 - DNA, 567 bp, Glycine max
  unsure (1)..(567): unsure at all n locations
cgtcgagccgaatcggctcgagaaacctcactctctgattcagtgcctctgatctctctcgcccccgctctctctctctctctctgaaaggactaagatgggttcggtttctctgaaagtaggagatggaacagccagattccatagagcaacactgtgttcttcagctgttaacattctcatgatattctctgtcatcaccaccaacctctttgctctctatgccttcaccgcttccccaaagcacccccatcactctctccttcaccacaatgcccacaaaaacatctctctcatctctgaacaagtctcactcattctcagagagatcgatttgtcccagaagaaactggcccagatggagaaagagcttctaggatatgaaagcattgatctttcgagacccaacattgcatccgagctcaaactcttcctccagcgccaccagctccctctggggaaagactctagaactgggatcactgagatggtgccatctgttggccacacctgtgagaaaaattcagactngttgtctcagttcatgaattacaaggtttttggagc

SEQ ID NO: 21148 - DNA, 337 bp, Glycine max
tgggaatctttgttatgacgttcagatggctaccaataaaataactcttcaaccacacttgaaagcgtcactgaagaagctctaaagcaaacatcttccccaattacttgcagaagtatgtacatcagtaatatggagccatccaatgtgactctgttttaacaacaatttaggtcaccttggtaattttctgttaattagcaaaatgatctcctttacaacaacctatatgcaaggttctgtctgacatgttcacaagtcttttatacaaggtcttcaagacctaatgtttgaagaacctgacatgacatagttttattggaaacaaccaagctgg

SEQ ID NO: 21149 - DNA, 546 bp, Glycine max
ggccctcgaggccaagaattcaagcaaacaataccatggcatacttttaaggcgacagtcacgagcaaagcgtggggctcaaaacaaactcatcaaaagtcgtaagccatatcttcacgagtctcggcaccgccacgcattgaacagggggaggggatctgggggacgctttcttagcgccaaacagctgccacagtctaatgcacaactagtcactgatgcctatcaaaagaaagatgcatcagaggcagaaaatcatccctcatgcaccggtgaaaatgcatctatcacattcacagccatctctgccttaactagtttgtccagcaacagtgtcaatttccccaacatggctggatcatcgcaatgcagtgggggactcacctttggtgctggagctctccaatgtacttcagttggccgatgagaggtggaaccaatcaaaatcaacttcactgctctggcaaatcatccttggcttagtcactttactttctgtctttcatgtgctacagaaatgttgtcttttggaactgctttcccatg

SEQ ID NO: 21150 - DNA, 501 bp, Glycine max
  unsure (1)..(501): unsure at all n locations
gagcttgacgncgcaagcaccgcgtgccttagcctggaattccgcttcaagtggccttttccttatttgtttttggtttaagaaaaggtgagggaggagagtggttcttttctttggctcgttaaatcgattgatttgaatccgacacggccccagtaaaaaagggtttagttgtgttcgaaattcgaatttccaatcgcaaagcataagaattgttttggaaaaatgacggtgaaagcaattcagcttcagatatgtggattggttagtcaacgatggagttggaaaccccgcacagtctcatccctgtcctcattttcctcaattccataccctaacccttattccaaactgcttcccatcaccaccgtcgctcgctgggttcgattcgtgccatttcacgcttcctcgtcgtcgcttccttctgccgggaatgttcgaaacattaagttctgtcagtggtgtggtggttccacgaagcatgatattcctgaaggggag

SEQ ID NO: 21151 - DNA, 872 bp, Glycine max
  unsure (1)..(872): unsure at all n locations
cgttgccatcctatatattgtcaaaatgggacaagactgaatgtaattcctgtgctggcatctcgttcccaagctctcaagtattttgaatcatcattccaaaaattcaatcaagtcaaaagttagagtactgcatttctttctgacattttggcatgaaattatgaattaaggaactatttttcgtttctcttgcatgatttcctctactgtgacatgatgccctttaccttcagatacctgtatgttcgatggggttttgaactgtcaaagatggtggtgttcgtcggagaatgtggtgacacagattacgaaggacttcttggtggtctacacagaagtgtcatactgaagggagtgggaagcagtgcaatcagtcaactccataataacagaagctaccctctttcagatgtcacgccattggacagccccaacatcgtcgaggcaactgaggggagtagcggtgctgatatccaggctttgatcgaaaaagtgggatatctcaatggatgaaaaaatttgaaagtcatttctagttatatgcctcttagtgtgtgtctgctatgaaaccatacttctgagcaagcagatatctgaattttatccacaatgttcataaagcttttttcctcctctcttctctgtaacttctatatcattctcttcctcacaaacttccccatgaaacatatttcctcttgtttccccacttatctccttgttggttctgtatctacatattacatttttaatgaaggccacttccatttctcgtgcctttnnnnnnnnnnnnnnnnnnnnnnnnnnnnnnnnnnnnnnnnnnnnnnnnnnnnnnnnnnnnnnnnnnnnnnnnnnnnnnnnnnnnnnnn

SEQ ID NO: 21152 - DNA, 333 bp, Glycine max
ctccaagagacacagatgattttggagatgacactggagaaagcagtggttcttatatcgttcgtattccctttggtccaagagataaatatattccaaaagaacttctctggccttacattcctgaatttgttgatggagcgcttaaccacattatacagatgtccaagtctcttggggaacagattggcagtgggcatgctgtctggcctgttgccatccacggacattatgcagatatctgaattttatccacaatgttcataaagcttttttcctcctctcttctctgtaacttctatatcattctcttcctcacaaacttccccatga

SEQ ID NO: 21153 - DNA, 498 bp, Glycine max
ctgttgccaatgaggctccttggatttccacaattggtgcgaggacactagacaggaaattcccagctacagttcacatgggaaatggacaaatgctctatggagaatccatgtacccactgaatcatcacccaatgagcagtggaaaagaagttgagctggtttatgtgtctgaaggagacaccgagagtcaattttgcctcagagggtctcttccaaaggacaaagttagaggcaaaatggtggtctgcgatcgaggcgtcaacggaagagcagaaaagggccaagtggtgaaggaggcgggtggtgtcgctatgatcctcgcgaacacggagataaacttgggagaggattcggttgatgtccatgtcttgcctgcaactttggtaggatttgatgaagcagtcaccctgaaggcttacataaactccacaaaaaggcctattgcaaggatcgaattcggaggaactgtgatagggaagtctagagctccatcag

SEQ ID NO: 21154 - DNA, 365 bp, Glycine max
ccaaatcagtggtctaaggagctttcacggaggaccactcctctttgccacactcaacctttccctacctccaaccactctcatcagtgcagtatgtgcatcacttatggacaccatgctaggaacgagtccttttcccaaatcattttcaaagaacgatggggtggcaactgcctgccacgcggtgtcaaagcatgacatactgccaaggttgctctttgcccctataacctctctctctactcagttaaattccctgctacagttttggcacttgtcgatgacttcaccagatatggggaagcttgcaaatcagatatctgaaaaagagaaagataagttgttcactgctgtagtaaattact

SEQ ID NO: 21155 - DNA, 436 bp, Glycine max
ctcttctcacgagcaatgcaatctaggttttgagtttgatcctgtcaatggcttcctcttcttctctactcttacttgagctcaaatttcttgcgccgcaaattacccccaaacgacgccgttctctctctagattttgctctcagaactccaggtacaatgttgctctccgtacgcgaatccgcgccttcaaggaagaaggtgccgtcattgacagagtgaacgacgtgaaatggagcggaaacggagttgccgcgagcgaatacggtgctaacggctccgttaacggttacgcgaacggcgtctcgggcgttagggagagtgagaatgcgaatggaagcttggtgaagtacgtgaacgacaatggcaatggcaatggtgtagcggcggaagtggttgaagattctgcagaagcgtcaaagcggatggaagatgg

SEQ ID NO: 21156 - DNA, 1087 bp, Glycine max
gtggtccttacgaatgaaaattgccgtagagacagctagtgcattggcttatcttcatgcttctaaaatcattcaccgtgatatcaaaactaacaacattctccttgacaacagtttctatgttaaagttgcagattttggcctttcaagactattccccaatgacatgactcatgtctccacagcaccacaagggaccccgggttatgttgacccggaatatcaccaatgctaccagctaactagcaagagtgatgtgtatagctttggagttgtgctcattgagctaatatcatctatgccagctgttgacatgaacaggcataaggatgaaattaacttgtctaatctagccataaagaagatccaagaaagggcattgagtgaactggttgacccttatctgggttttgattcagacacagaggtgaagaggatgataattgaggcgacagagttggcctttcaatgtttgcaacaggacagggaattgagaccttccatggatgaagtccttgaggtattgaagagaattgaaagtgggaaggatgagctaaagcatctagaagaagcagttcatggttctggggtttcacataataataatgtaacaacctcaacagaattggatgaagctggattgttgaagaataggaagccacctttttcaccaatatccgttcctgatagtcgggaaagtaaatccactacgcctaatgccagttcttaatcacttggcttattatcagttagtgatacataatccattcttgcctaacaagctttcagcactcattgttagttgaaaatgagtgaatctaagcttcatttatcttgtcatccccttgtatagttataggatgattatattaagcggaatatcatagtcaagttaggagttgagagaatataaatttgaatattcagaataaaagaaaatataattgttgattcccgaaactgtgttgtcccttttaagctgtaaagcatgcacagtatttgggtgttagattgtcacacactccactccaacattgacacttccttaaaattcaattaaaaattaattttttatcgtcattgatat

SEQ ID NO: 21157 - DNA, 464 bp, Glycine max
acacactcactcaccactgtgtccgtgtgtttgttggttttcttttcctatccactctcaacatagcagcagcaactgcttcagtttctattttcagtagtttgttccaagtttctgatcaatggaacatagtttgaaaagaaagtctccagagagtggagacaatttactcttcaacagattttctctggatgaccttaatgaagatctcttggagagggtactttcatggctaccaacttcctcattttttcgcctcacttcggtgtgcaagaggtggaaatcagctgctgcttctgtgagtttcaagcttgcctgctcacgcgttccttcgcgggacccttggtttttgatggttgctcccaatctcaaccaatctattgtctttgacactgctgaaaacagttggaaaagactcaatcacccgcatcttccgctcaaagactctaacattagctgcatgc

SEQ ID NO: 21158 - DNA, 467 bp, Glycine max
tgggcctaggaatccaaaaaccctcaagacgagtagagggaacgaatgaatagaagaaatcatcgtatcgtatctgcaacaatttctaatttcgggcttcactgtttagtgtaactctcaagccatgtctccgggtcccgttcttgacgccggcgccgaccaacaaatccccttcgtcgacgacgcatccctcaagaagaaacctcaccccctggtccccccatttcctttcgattccgtttctattttccactctactctgtctctcattcgcttcctcgatctgttttttctcaggaagatgacgctcctattgtcgaagacgtcaaggacgatgacaaagacgaaaccgaagacgaggacgaggacgacgatgacaaggaagatgacgcccaaggtgctgctgagggtgggaagcagagcagaagtgagaagaagagccgaaaagcaatgctgaagttgggacc

SEQ ID NO: 21159 - DNA, 317 bp, Glycine max
tgcaacaatttctaatttcgggcttcactgtttagtgtaactctcaagccatgtctccgggtcccgttcttgacgccggcgccgaccaacaaatccccttcgtcgacgacgcatccctcaagaagaaacctcaccccctggaagatgacgctcctattgtcgaagacgtcaaggacgatgacaaagacgaaaccgaagacgaggacgaggacgacgatgacaaggaagatgacgcccaaggtgctgctgagggtgggaaccagaccagatgtgagaagaagagccgaaaagcaatgctgaagttgggactgaaacct

SEQ ID NO: 21160 - DNA, 549 bp, Glycine max
aaaaatcagattatatgcagataatgaccttttaacgctacaaaatgcaaacctgttgaataaccaaacggtaagcatgaaatgaacatgtaaaaaatcttggcaaatcatcttccttgtgcattatgtgaatctcaacttcattttatactactatccatctatatgaactttacctgttgtcataggtagagctgtggtaaccttaaggtgaatgaaggggtagtcctacgcccccattcatggtagtcaatagcactctatagcaggataacggagcgcagcagccctgagttactatggaagtcgaaatcgctgagcgattttcaataaccgctgtagcggctgcaatagtggtctaaatacagcttttcgggtgctacagcgcactgccataatattagacttcaaattctatatttactccagaaacatcattgtttgggtaaaaatttacaaaaaagttacccctgttttgaccctttattcctttacgcattacaaaattataaaatatcctaaaaaaaaaaaaaaaacaaaaagcggccg

SEQ ID NO: 21161 - DNA, 413 bp, Glycine max
  unsure (1)..(413): unsure at all n locations
agctttgggggattatggcaatggtgccatggctgaaccctctaccatttactcaactgtaaggctcttctatgagtcaaaggctcagcaaggtagagctgtggtaaccttaaggtgaatgaaggggtagtcctacgcccccattcatggtagtcaatagcactctatagcaggataacggagcgcagcagcccttagttactatggaattcgatatcgctgcacgattggcgttgccgtctatcgctcgcatattggtttaaatacagcttttcgggtgctacagcgcactgccataatattagacttcaaattctatatttactccagaaacatcattgtttgactcataagcnacaanaaagttacccctgttttgaccctttattcctttacacattacaagattatat

SEQ ID NO: 21162 - DNA, 321 bp, Glycine max
actgaacaccccatgaatgtgcctgcgtcttcaggacatgaacctactggttggcatacaccatctggcaatgtgaataattctggaggtgtacctcctccatcctggattggatctagttcaaatgttcactctccccctaaccctagctggatttttaatcatgaagtcccagcagaaaatatgcagagtgtgtcagagttcagtccctggtccctttttccatcaattagctctgcatctggtgttcataatggccattcagccccatcttcttctggtcctccttcatttacccagggttctagcagcaaccaacca

SEQ ID NO: 21163 - DNA, 624 bp, Glycine max
catacataaatacacatgtttgcttattttaaaaaataataataatttagtccaaccctgtataagagatagctcaaatgattgggtatgtcttcaatacgaaagctccaatggcttcttactacttcctcttgcttgttctcgtcggtgcaactacagcttctggggctgaactatgtgcagacttttactcatgcacctgcccaaacttgttgcctatagtgaagaaaggagtggccaaagccattcagaaagaaccacgcatgggcgcttccttactccgattgcatttccatgactgctttgtaaacggttgtgatgcatctatactgttggatgatacaagcaacttcattggggagcaaacagcagcagctaacaaccaatcagctagagggttcaacgtgattaatgatattaaggccagtgtggagaaagaatgccccagagtagtgtcatgtgctgatattcttgctttgtcagctagagaatctgtaagttaattaggaggaccttctgggaaggggggtggggggaaggatttactacacaagcagagtgatgctataatacatcctgggcttactagctaatggtctgtaacaatttgttataaggcttaat

SEQ ID NO: 21164 - DNA, 514 bp, Glycine max
caatgtcagaattgttcactctgcatctgctccaaatctcatggagaacaactctgttgaaatttcaatttctgattttcctccagtttctgctgcacaagtgagtaagttacctgccagcagccagtctaaattaaacgtggaaaattttcaatctgctaacaagtctttggttgaaaagattcgtggtgctcttgattttgatgaagaaagatacagtatatttaaagacatatctgcccaatatcgccaaggcacaatagatacaggtacatatctggactatgtgcagcagtttggcttgtctcatcttgtgcttgagttggcaagactatgcccggatactcacaaacagaaagagcttgttgaggctcacaacgctagtttgcaaagagatgctttcccagaaattaacttggttcgaggcaccgctagcacccatcacaaagacggtaatttaaacaagaaaggtaaaggtaagtctgtagatagtagggggagtaactccacagag

SEQ ID NO: 21165 - DNA, 479 bp, Glycine max
ctcgagccgaatcggctcgagggttcttgtattcttgtgccagcaaccaccctcgtctccacaccataaaaggaggagagtatcctggcttttgtcttcctctagttgcacaaatcccatcttttctgtctcaattacctctctttttgttttcctcccttagttctttttctgaacaaaatccatcttgctgcagctagctagagagcagctgcaacaagctgagtgaaacaaacaaacaaaacacttgtttgtaaaattgaataaagggaatattttcaatagattcttcccttttctttggctaccttcaatgtcaaacatcacaagttgtgatagtgggagcttctctacagagaataccagagaagatgcagcagttaaacaacagcaatctgagatacttggtcagttccatagtccacattctcatacttcaactacaacaacaacaaataatagcaatggttccaacacaa

SEQ ID NO: 21166 - DNA, 472 bp, Glycine max
ggtacttttacttgaagggcatacccgcgaacgatgaccacccgtctcatgatgttgcacatgggcaaatgctggttaaggaggtttatgaggctctaagagcaagtcctcagtggaatgaaacacttttcatcattacatatgatgaacatggtggattttttgatcatgtgaagaccccttttgtcaacattcctaatccagatgggaacaccggacctgctccctatttcttcaagtttgataggttaggggttcgggtgccaactattatggtctctccttggatcaagaaagggactgtgataagtggcgccaaaggacctgctgaaaactcagaatttgagcactcttcaattcctgcaaccataaagaagatgttcaacctttctgctaactttttgactcacagagatgcatgggctgggacctttgagcatgttgtgggggatttaggttcacccagaacaga

SEQ ID NO: 21167 - DNA, 1058 bp, Glycine max
ttcggtttttcaaagatcaccggtccttatatgaatgctatgtaccaatgaagtacaaaaaataccacaagaaaatggctaaaactgcagaatggggggaccatgttaccttacaggcagctgcggataagttttctgcaaagatatgccttctaacatcattcagagacacttgcttcatcgaaattatgccactgtaccaagcaccacagcgtgaactgtggttgagcttttggtctgaggttcattacaattcattgtatgaaatccgagatgcaccaatccagcataaaccaaagaggaaacactggctgttttaagagaggcagatataagcatcatggtcctaagatgtcgtgctgtgtgtacattttgtatcatttataggtaaaggggaaagtgtccataaaacggtctttcaactcttgaggctttggcaagtagaactcttaacttccaagtgagaattgaccccttttcagatttggaagatatcttaatagctcactactttctactttttgtttgtcagtttatctttgccactaccttcacgccatttcaaccaccctcattcacccgttggatcttttggtgatcagctccttgcatgatgcaagatatctaaacattcctcatcctttatgaacacaaagtagctattaattattcagtgagggcaaactacaaaattgaacgttgaaaattctatttgccaaagtattaatgatccagtaggttgtggccatctttttcctacacataaaagaggaggtccctggagggaaagaaatcactcgtatgtttttgtttttcctggatattctttacagtacacatgtgatgatttttttttttaaatatgaattacgcccttttagtggggaagaacagtccattattttaatcattgctgtgtaaagcaaccaattcatgagttggttgtcgtaattttgtaaaactgtttgaaccttgccaatcatttgcttttcccttagtcatatgcaattagccgtgtatcaagttttatacaaaattttaagtgcttattcaataag

SEQ ID NO: 21168 - DNA, 362 bp, Glycine max
ctggctgttttaagaaaggcagatataagcatcatgggcctaagatgtcgtgctgtgtatacattttgtatcatttatagtttatctttgccactaccttcacgccatttcaaccaccctcattcacccgttggatcttttggtgatcagctccttgcatgatgcaagatatctaaacattcctcatcctctctgaacacttagtagctattaattattcagtgagggcaaactacaaaattgaacgttgaaaattctatttgccaaagtattaatgatacagtaggttgtggacatctttttcctacacataaaagaggaggtacctggagggaaagaaatcactcgtatgtttttctttt

SEQ ID NO: 21169 - DNA, 442 bp, Glycine max
ccgcaaaggtggtcttgttttgtttcttttggagaaagagaagaactgagagagagcgaaccatggggaaatctacctcctgcttcaaactaatcacttgcggtggtgatgcggctgagaaggacgattaccaccaagtatctgagatcaaggaatcttatgataaacgtggatggagtttccgcaagaagtctgcaaggcatcgtgtgcttagcaatactgtgatagcagaggccccatcttctgcaaataaggaaagttcagaatgtaataattttaattttcaaccacttcctgaacctaatgttgttgagaagatttacacaacaaattgctctgatgagaagccccagttatcttcctttgaaagctcacaaatagaagaaacaaatgtcattgaaactgaggagaaggtggatgtgaatccaccagagtctgaggt

SEQ ID NO: 21170 - DNA, 1239 bp, Glycine max
  unsure (1)..(1239): unsure at all n locations
cgcatcaaagggcaagccgccgctctcggctggcaacaacaacaacggcggatgggataattgggacccggacgacggattcggaccgccccgaaccagacgggggttaatcagcaaaacgattatctttctgtcgtttctcagggatttggtaaattatcattggctgctgctaatgttgttcaggccgggacaaaagaattctctgctaaggtaaaagagggtggttatgattacaaggtcaatgaaactgtcaatgttgtctctcagaagacaacagagattggacaaaggacatggggtatgatgaaaggggtcatggcattggcttcacagaaggttgaggaattcgctagagataacccgaattggacgtctgataactggcaacgaaatgaaagtgatagaaatggtttctaccaggagttcaatcgagagaataatggccggaattcttctaccagagaaggacaacattcttcaggtggacaaactaatacttttcactcaagctcttgggatgattggggccacaatgattntaggaaggaagagccagctaaaggatcagctcctcagtcatcaggtgggaagtttgataataattataactcgagctcctgggatgattgggaccaggaagatacaaggaagaaagaaccagctaaagggtcatctgcccgtagcagtgatggttgggctggatgggataatgccaaagatgatggatttgatgatatctatggaagtgcatctaatagtaaaggtgtcactcataatgacaagtcaggtgctgcctggacaggaggaggctttctctaaggtttgacccgatctctatcagcaggatcaaagttttgttggaaatgacctcttggactggtggcatgcaaaccgagcaggggtgttgtttagtatgatggatgtgacctgattgtcaactataagtttgttggtcactattaaattcatgccccatatgtactggatgaatgattattttgaggtcagtgtattgtctacaagtatttatttttcaacattctcccatcctcccttgtgtaatcttttcatgtgattttttggggacttctgtatggttggaaacttattttaaatgtacaagtgtctaaagaaagggcaaattgcccaaatttatgattatttttactggaagtgtgatgaaacattattgtgacacgaaaaaatttcataattattttgaatttatagcaactt

SEQ ID NO: 21171 - DNA, 1627 bp, Glycine max
tttggacgcgtgggcggacgcgtggggaaaattaacacggcaaggaaaccaaactcaaaaaatttccaaaactgttgtagaattagggacaacatggctggaggatcacttggagacaacattggattgaaggaagatgctatcaagagggtgtgtggtttggcctgcaaagctaacaatcacaagtcaacggataagctctacttttacgacaaggttcagatttcttcggaaacttaccatgttttcagcttcccgggatcttgggatcccgctgaatggtttgttaatagcaaaccctttggggtatcgaagataaattctacccagttcccttctctcagaagtattggtaacgatgaacttgctttggtgaacgaaggcttcgcaaagagattcgatcgcctattgaaaactagctttaaagctgtggtgaataaggctatagtagatgggaagcaagtagtgtttacagggcactcctctggtgctgcaatggcaactcaaactaccttttgggtcttggaaaagtactttaacccaacaaaaatccaaaaacccaagctacccttttgtgtcacttttgggtctcccttaattggcaatcatatattctctcacgcttcaaggagagaaaattggtcacgctatttcatacactttgttttgagatatgacatagtgccaaggattttgcttgctcccttggcttctattgaggaaaattttggttctgttctccaattcttgaatcccaagtccaaaacttccacccaagatccaacaagggctattttgatttctgaagtttataaaactgtgatgagaaacgccgcgagtgttacaagccatgctgcttgtattctcatgggcagcacaaatttgttacttgagacagtggcaaattttgttgagttgagcccttataggccctttggaacatatgttttctgcaacggaaatggacagctgattgtggtggaaaactcagatgctgttttgcaactcttgttccacactgcccagatgttaagcgatttggcagaacttccagaagttgccgacgttagcatatcgcaacacctggcctatgtggctgagttgcaggatagcttgggaatgcagaatgtagtgtacttggagcaacttgagcaacttcccttgtctgctgacggttcaaatagtgatgttgcaacagccttggatggccttggactgaacacaagagcaaggctgtgtctacgagcagctggtgagttggagaagcagaaacgcaaaaacgaggacaaaatcatgaaggagattcaggataaagccttgacaagcatgaaagagcttcaaaattacaaaacaacatgtgagatgcacaaggggaagggctattacgatgccttcaaggtgcaaaaggagtcgaacgacttccaagcaaacgtgaagaggcttgtgctagcaggggtatgggatgaagtcattgagatgctaaagaggtatgaactccctgatgagttcgaaggggacaaagaatggataaagcgtggaaccgaatatcgccgccttgtggagcctctagacattgcaaactattaccgtcacttgaagaatgaggacacaggaccttacatgatca

SEQ ID NO: 21172 - DNA, 735 bp, Glycine max
gcagtgattgagatgctttataggtatgaactcccagacgaggttgaggggaatttaaaatggattgaacatggaactgaatctcgtctccttgtggagcctctagacattgcaaactatcaccgtcacttgaagaatgaggacacaggaccttacatgataagggccaggccaaaacggtataggtacactcaaagatggttggagcatgctaaaagggtgcccaaaacctgctcctatcactgaatcaaccttttgggctgaagtagaagagctttatagctggattaacagcaagaggcatcttgatgatcatgtcgagcaaagggttaagcagcttcaaaaagaccttaaaaattggactgatgatgagaaagtactagccaaggatacgttcttgaaggatcctaactttattaggtggaaggatattctacctcaggaactcaaggacacttcttcctagctagtctagttactgctgtgaaaggatattctgtattagtcttttttccactcaatgaggaagctataagcttctgatgatgcttttgatgtgtatttgtcatgcaggtgtagtgttggttacttcagtgttgtaactttgtatttgtattcctaatgtttttgattcccaagttttgtattacttgtgagaaccaaaaatcattcagactgctggactaaataaatttgtttaatagtagggtctgaaaaaaaaaaaaaaggagaaaa

SEQ ID NO: 21173 - DNA, 399 bp, Glycine max
tgatgaagtaaagcaaagggttgtgcagcttcagaaagaccttaaaaagtggactgatgatgagaaggtactaaccaaggatacgttcttgaaggatcctaactttattaggtggtgggatattctacctcaggaactcagggtcacttccttctagtcttgttactgctgtggaaggatagtgaattggtgtttttttccactctaaattaataatggagaagctatagaaatttcggcatgcaggtgcagtgttggctacttcggtgttgtaactttgtattcccaatgtttatgattcccaagttttgtatgacttgtgagtgagaaccacaaatcattcagactgttgaactaaataaatttgtttaatctagggtctgtattagtgggttactc

SEQ ID NO: 21174 - DNA, 592 bp, Glycine max
cacttcgataatataattccattcccatttaaaaagaaaccatcaaagcaagaacaaagctatgtgaaactacaaggtcttggtcaattcagtagtaattcaatatgtcctagttagttccccctttatataataccaagatgcagaagttctgaaaattaaccaaactcaaaaatttccaaaactttatagaattagagggacaacatggctggagggttgcttggagataaccttggattgaaggaagatgtgatcaagagggtgtgtggtttggcctccaaagctcacatgtcaccggagaatctctaccatttccatgagattgagattttttccgaaatttatcatgttttcagcttttcagggtcttggaacccccatgaatggcttgttaataacaaaccttttggggaaacaaagatagatcatgccctgtttccttcacttagaagtattggtaatgatgaagctgctttggtgaatgaaggcttcgcaaagagattcgaccacatattgaaaactagctccattaaatctgaggtgaataaagctatggttgatggaaagcaagtagtgtttacagggcact

SEQ ID NO: 21175 - DNA, 650 bp, Glycine max
ggaatttgggaggtcatgtaagctggttcgaatcgtatgtttactaaactaaactgattatgcgacattgcgactcactcacgcactcaccgacccaccctcgatagtcaatctattcttgattgccaattcgcatcgcatcgctgactcaactcaatttgcaaaacactgattaatcaattagcagatagacagagaggaaatacatcgcatcgctgattgattttcaattccatagaaatccaatagaagaaatacgaaagatgaagaggtctcttagaaagttgggagttctggcagtagagaagcatgagcgtgaccgcagaaacattatgcctttgtcccagctagaggagctcgctcaggctacccaggagatgcaagacatgagagactgctacgatagcttgctttccgcggcagcagcgaccgccaacagtgcttatgaattctcagagtccttgggagatttgggctcttgccttctggagaaaaccgccttgcatgacgacgaagaaagcggcaaagttctcataatgctcggtaaaatacagtttcaactccagaagcttattgatagatatcgctctcatatcacccagacaattaccattccttcggactctcttctcaatgaacttcgaattgtt

SEQ ID NO: 21176 - DNA, 581 bp, Glycine max
ggcgttcacggcagcgttttctggaactttcggacccaagtgtttgtaatttttgattgtaacatttttttattaacaatgtttgactaataaaaacaattaacgaaaacccaattttttattttcacttcagctgtccgttatataatttggcctgtgacctgatctgatcctattactgttttgattcgatcaaaccataaaccctagctagctaagtagcgttcgagatggagatggagaataatggattcctgaatttacaggcagtggcaccggaaatgtccggcgagggatttccatatgcaccggaaaattggccggaagatggtgacatttggggatggagaactgggcggagaattgtcgcaaatcgttcccactttcaggatcggtatctttatctgccgaatcgactaatccgtgccttgaaagaggaaaaggagaaggagaacccacgggtcaggggctgactcacgccctagttctagctcaatccgcaggcaacagcacatctttgctagcaagcttgctgttgaacgttgcatcaagacatattttcctgatgctgatattgatgc

SEQ ID NO: 21177 - DNA, 414 bp, Glycine max
gcttctagcgatgctgagttgagaggcaatcagtttcatctggaagagagatatggtaataataataggtactcaaaggatgcagttctcactaagggtgaatgcctctgggagggaatgcttcaaccaaatatctctagcactcattcagtcgtaagcatctttaagagtggtgagaaaactgctgctgaagactggcctgggtttcttgagatcaagggaagggtgcgatgtgatgcatttgagaaatttctgcaagaccttcgacagtccagaagtcgtgcaatcatggtttcgcatttcgtttccaaagagtcggatgatcaatcaactctacgtgaggtggctgactcgtacattttggacgagagagtaggatttgctgagcctgtccctggagttgaactttacttt

SEQ ID NO: 21178 - DNA, 364 bp, Glycine max
aattccttcgttctaccgtcatcaactaggagaagaagcttcattttctgcaaaatggatccgtctgcggcattgctgtttaaccacctcaaaggtgcagacccgttcttcctgctagcgggtcctaatgtgattgaatcggaggagcacattctgcggatggctaagaacatcaagactgttgcatctgaagttggaataccgttggttttcaagtcaagctttgacaaagctaaccgaacatcatcaaaatcatttcgtggcccggggatggctgagggattgaagatactcgagaaggtataaatagcttatgacattcctatagtgtcagatgtgcatgagaccatccagtgtgaatcat

SEQ ID NO: 21179 - DNA, 247 bp, Glycine max
gttgtttctcttttcagatctctcattctcactctgttttacatacaatgtcgttctgaatcactgcatcttttcttatttccactctctgcagcttcattttctgcaaaatggatccctctgcggcattgctatttaaccacctcaagggtgcagacccgttcttcctgctagcgggtcctaatgtgattgaatcggaggagcacattctgcggatggctaagaacatcaagagtgttgcatctga

SEQ ID NO: 21180 - DNA, 532 bp, Glycine max
acgcacgcctgcccgcggacgtaagctcggatcgcgctacaagtgagtactgcttttctattcatcatagtggttcttgcgggcttgtgtttcgtctctggcctcctccacctgcttgttagatttctcataaagcacccttcttctgcgtctgctcagtccaacaacagacaccaagagctttccacatctgatgctcttcaaaggcagcttcagcagctcttccacctccatgactctggcttggatcaggctttcattgatgctcttcctgttttccagtacaaggagattgtggggttgaaggagccttttgactgtgctgtttgcttgtgtgagttttctgaaaaggataagctcaggttgttgcctatgtgcagccatgcctttcacataagttgtatagacacatggcttttgtcaaactccacatgccctctttgtagaggaacacttctcactcaagggttttccgttgagaatcctatatttgacttcgatgatcttagggaggatgagatgtgtccttggt

SEQ ID NO: 21181 - DNA, 466 bp, Glycine max
tagaatccttctttcttccttctctcaccgtcaaaaacaattcctcatctgccaaatccaatgtttttgcctcaaaactcataagttcacattttttaaaatttccatttactttgcctatcctcatcttcattcattttcctcttgttttaaggttttgcttctgattgattgattgattgcctttgagagaaacttgtgaactcagttctttctttctttcaccctcttgggtaagctcagaaacttccataaagaaacagagtttctccctaaaattctgttaggtgtttgatctaggattttcattgggtccaagaaggaggatatcattgctatgattttgaaggtttctctcattgcggttctcctagtgatatgctcctgtgttgcggaagccatttctaggaatcacaatcaaaatcccaaccacaacattatcaacaaaaatggatcttctctggct

SEQ ID NO: 21182 - DNA, 393 bp, Glycine max
cgaataatcaacaaaacactttctcagattcatatcccatcttctcttctccctcttcttaaaaccagggagggagagggagagagagagagagaacgtgcttaacatagcaatggcaatggccaacaaggagagggagaagaagttcttctttgtagggtcactagtaaactacgcagctgaactaaagcttcttctcgcaactctcttccttctttgtggtgttgccactctccttcaattcctcccttcgcgtttcaccatttcctcctccgatctccgcttctgcatctcaagggtgtccctatacacccccaccaccctctacacccccaccaccctttacatcactttctacacccccaacaccactctctttcacccaaaaacacc

SEQ ID NO: 21183 - DNA, 565 bp, Glycine max
atcttatcctatccccacaattaacgatcgcttctgatggctctgttctgtattcatgagatgtgacgtgtatccgacacgacatggtgaactcccttttttttctcctctgactccgaaacatttccgggtagatcgggtatcatggggcaggacacaaagaactacaacaacatcgcatcatctcctctgttggaacctctgccttcgtcgaattcgaaacgagcttcgaagcttcaaacgttgggaaacatcatcgtcaccgtggtcggaactggggttctgggattgcccttcgcttttcggatcgctggatgggtcgctggatcgctcggggttgccatcgtcggcatatccacctactattgcatgctactgcttgttatgtgcagagaaaaattggcatcagaagaaccattaggggaatcaaacacatatggagacttgggttataggtccttcggaacccctggtcggtatttgacagaagttataattgtggtagcacaatgtgcagggtctgttgcttattttgtttttattggacaaaacctttattctgtat

SEQ ID NO: 21184 - DNA, 404 bp, Glycine max
tatttgttctatcgtatctggtgtaccttcagttgccacttctcactcattaatcattatttatagaatcctttgctggaatcttatcctatccccataagtaactatcactacccactgacccatgttctgttcagatggctctgctctgtattcgtgagacgtgacgaacctcattttcacttcactcctaatcatttccgggtagatcgggtatcatggcgctggacacaaagaacaacatcgcatcatctcctctgttggaacctctgcctttgtcgaattccaaacgagcttcgaagcttcaaacgttgggaaacatcatagtcaccgtggtcggaactggggttctgggattgcccttcgcttttcggatcgctggatgggtcgctggatcgctcggg

SEQ ID NO: 21185 - DNA, 322 bp, Glycine max
aatcgtgctcgagaattaaattaaaagaccattttcgtccgcaccaactctcagaacatcaatcacttgatcacgtcacgcgaaaaccgaatggaagaagaagaagaagaagacacgtcgccaccgttctggacggaaaggcggcggtcgccgccgtctccgccgctcgtactcgctgttcctcagctccagtgcacctctaatatgccttctggtgattgcactcgcattcatgctggtcataattcccacgctgcactccttcaccacccaaattttcaaacccaattcggtgaagaagagctgggactccctcaacttt

SEQ ID NO: 21186 - DNA, 1136 bp, Glycine max
aattcctttgtctctttctcttttctctttcttcctgcgttaaagttgcaactcctctgttgttccttcaattgttcaaatcccgaaattatcattaaccttgctgcaaattgcgcacacgattctttgctttccttcgaaactctcccaaatcccactctctctctctctctctctcataaattcgccaccttttattttgcgtaactgctctgcaccttagtcttctctctccattctccaactccatttcttcgatctggagctctccgctttcaaagctgtcaaatttccgattcgggatggacaaatacgagctcgtcaaggatataggatctgggaatttcggtgtggccaggctcatgcgtcacaaagacaccaaggagcttgttgccatgaaatacattgaacggggtcacaagattgatgagaatgttgcgagggaaatcataaaccatagaagtcttcggcaccccaatattattcggttcaaggaggtggttctgactccaacccatctgggtattgttatggagtatgcggctggtggagagctctttgagaggatttgcagtgctggaagattcagcgaagatgaggctcgatatttcttccagcagctcatctcaggagttagctactgtcattccatgcaaatctgccatcgagacttgaagctggagaacaccttattggatggcagccctgccccacggctcaaaatttgtgattttggttattctaagtcatctctgcttcattctaggcctaagtcaacggtgggaaccccagcctacattgcaccagaggttctttcacgtagagaatatgatggaaagttagcagatgtatggtcctgtggagtgactctttatgtaatgctggtgggagcatacccatttgaagaccaagacgatcccaaaaatttcaggaaaaccatcaatcgaattatggctgttcaatacaagatcccagactatgttcacatatctcaagactgtagacatcttctatctcgcatttttgtggcaaatccagctaggagaatcgccgttaaggaaatcaagtcccatccatggtttttaaagaacttgcccaggccctccccagaagtaggcccatgtgccattttcagg

SEQ ID NO: 21187 - DNA, 344 bp, Glycine max
atttctgactatgctacgcacacacaaacacaaacacatgaattcttttgtctctttcttatcagtatctgcttcccctgcgttaaagttaaagttgcaattcctctgtctgttccttcaattcttcaaatcccgaaattgtcatttttaatctcgctgcaaattgcgctcacgattctttgctttccttcgaaactctcccaaatcccacttctttctctctcataaataaattcgccacctttgtatttttgcgtaactgctctgcaccttattgattcctctctctctctccctccccctctcctccatttcgatctgcagctccccgctttcaaagctct

SEQ ID NO: 21188 - DNA, 491 bp, Glycine max
tcccaaatcagttcacgctcgtgtcatgtgcttctgtttctaggttcccccaactgacgcaagtagaaaaacttgaaaatttgaaacagaagcagaagaaggaaacacagacagaactgagagtgagtgagagcagaagaaggaacgtagcaacaatgggtccagcggcaaagacgacgacgatgcgttcgatctctcaagaagcgttcgaagaactggtgaatgagaacatcgacgacctcggcatggaccccaccgaggccctccaagacgcaatccaaaccctcactctccaaggcgtcgatctctcaggcatcgtcacgtgcgtccccggagaaaccaaccccgtcatcgagtgcttggaccgcttaagacaccttgaaaccgaaccggaccaaaacctaatcgcgcaagcgtttaacaccctccacgagttgtgcgcaaatccaaattctgattcaaattcaaatgtggctattgcaaccaaaaac

SEQ ID NO: 21189 - DNA, 630 bp, Glycine max
  unsure (1)..(630): unsure at all n locations
gtgaatcttttcataagtctactgtaggcactgaaaggtctgaatctggaacaactcctgctggggcaggtgtttcatctccttcctcttatactccctccactgcccatcgtcattctactagaaccagatcatctgttaatataggagatacacctagaaaagaaacatctcaagacaaaggaacgagctcatcaaagagcaagggtaaagctgtattaaaacctgcgcaggaggaagcgcaaggaccccaaacaaggaatacagtgcgcagaagagcagctcttgataaagtcgctcaaatgaaacctgcaaatggcgactcaacttctgaggatgaagaattggatatatctcctgttgaaattgctgaggctttggtgattgaagatgatgatatttctgatgatgaggatgaagaccgtgaagatgtacggagggattattatcttcctgtctacttgcctgacgaagtgcatgatgtgaaattgggtgactcagctgaggagagtactgttgctcctgcaacaagtgatagccagactaatgcatcttcaggttctagcagcaaagcgggtacagccagnggttgtgactctgctgattntaggagtgggtattcatctagct

SEQ ID NO: 21190 - DNA, 533 bp, Glycine max
ctttttatttatcttcgttctctctctcaatccaacgatttcgccattcaacagcgatctttccgtctccatcatcgtcatcaacgctcccatttccggaacctcagggccattgactcttaaggatgtctcctgcatcccgatccaagtctaaagacaggaagcctagcaaggatgctcagaaggcttctgcaaagcctacaggatctggtaatgctgcagctggtgttccagccagtgcatataaccccttattaggaacattccatactctggacatgtcaccagctcctacctcaccaatacattctaatggtcgttttcggaacatagatgagacagatgaacatcctgtcaactcattggttgctggtgttgagtatgattctgtttctaacaatggtagttggtctggtgagtccgaagaacataaagacaaaagctctaatgttcctgttcgaccggaatcagtaccgggagctgataatgacaagcgggagaaaatccgccagaagaatgagagataacatcaa

SEQ ID NO: 21191 - DNA, 575 bp, Glycine max
ttttcgcgtccgaaaaattctacatttatctatcttggttctctctctcaatctaacgatttcgccattcaacagcgatctttccgtctccatcatcgtcatcaacgctcccatttcctaaacctcagagagggatccagctaacagttgtttcccgctgaaaagttgcttccccacagaactgtaaagcaaacggttagatgcaccaacacaagcaccactaacgaaccattggttcagttcaatatataacgaatccgatactcttttcatctcacacctactgccaccacttcctgcttagtgcgaaagccatttcagcacattaaatggcagttcacggtgacgatgaccctgtggtgatggtggttcccaacctctccccgcccaacacctacgaagctgtcgtcaacggtggcaccttcgaccgattgcacaatggccaccgcctcttcctcactgcttcagcggagttggctaggtgccggattgtaattggagtttgtgacggacctatgctggcaaaaaaacagtttgctgaactgatacagcccattgaggaaaggataaataat

SEQ ID NO: 21192 - DNA, 959 bp, Glycine max
tctttattctctctttctctttctctctcttgccccttcaaagaggcacttcaattttctcttttggcaaagaccagcatccttaattcttcaaaattcttttactatgtaacaccccccaccccaaaaaaaacctatgctttttctctgttcctctgcacccatttattttttccccggaatttcgattgttaaggttgttccacatcgtgtttcaccgccgactcgacacttttcagtcaaaattccatctggggttttcgtggctccgacccagatcctgtctctctctgatccaactatattgttaagatttgtcataataagaagcaccatggatgttgatcaggagttttctgctgaatcctctggctgcctacaattagtgttttttgttcataaatatagcatagatgatactatcttatgatggctaagacagaagtgatgttgaagagaggttattgtttcattggatgttgtctctgtcagggattcagttagtgcacttgcttggctaacttgctaattgaggttgctgctttgtatgatttgaagagtttcagtaaggagtgtgttctaacaaaaaatctttagttgagccaattttaagctatgatcaagcagatattaaataggctccctcggaagccctccaaatcgggggaaagtcgtgaaggaggggcgatattgactccctcttcaactccttcgacaagtgcaaggagcagcgatgcagcaggctacagccatggaaatgcaactgcttcacctctttcaggcactgctgattctaatttggttcctggattaaatcatggtgacaggattgtccaagctatgaactcaaaactgaatctgaatgggagttttccagttacggcctatgaagccttgccaagttttcgtgatgttccaaactcagagaagcagaatttgtttataagaaagctgcaaat

SEQ ID NO: 21193 - DNA, 456 bp, Glycine max
gcactggctatagtttgcagggtgcatgcaattgggagacactgatgcaatgatggggcagattgagaattccctgctgttttatacagcaggtcttgagattcaagggcaggtcttgggggaaacagacccgagattcggtgagacgtgtcgctatgtggccgaggcacatgttcaggcactgcagtttgatgaggctgagaagctgtgccagatggctcttgacattcacaggggaaatggagctcctgcttccatcgaggaagctgctgataggagactaatggggcttatctgtgactcaaagggtgattatgaagctgctctagagcattatgttttggcaagcatggctttggctgcaaatgatcatgacgtagatgtggcttcagacgattgcagcataggtgatgcctatttggcgttggcgcgctacgatgaggcagtgttttctta

SEQ ID NO: 21194 - DNA, 461 bp, Glycine max
aaatgataccatcactgtctcatcttcttctcataaccctctttctccatggctcttgctggctctgtggttgagcttcaagcctcttcagtaaagaagaaaactgcagtttccagaagttggattctgctggaccactatggcaaaggcactgttcttgatgcggataagtatgctatcatgcgcctggttcaaattcacgccagagatcttcggattctcgaccctctcttatcgtatccttccaccattttgggcagagagaaagtcattgttctcaatttagagcacattaaagctatcatcactgcagatgaggtgtgtttgatgttgatagagagctggaaaaatcaaaattcgtgaggaaaccatctatattgatttcttaaaaaatccgcgatgtagtgaaaatgatatcggttttcaaatttgccaggatttgttggttgtgattggtgatg

SEQ ID NO: 21195 - DNA, 468 bp, Glycine max
cacttttggcatgaaattgtgaagagcacacagcacgcagcacactttcaagtttcacccttaaccgcgccctctcatcaaactccaattttcattcatttcgcgattccctcctttctttctctctctattctaattctaattccaatcacaaccagattctattcccttccttccaattctagggtttctctctccgctagggttcccaatttctctcccccttcccaccaaaaacatggccaccgaaaccctagaagacaccaagcctcccctccaggacgacgaccgtgcgaaatcggagattcccgagaaagacgcttcctcggacgacgccgcggcaaaatcccgggacgcgaatgccggcgacaaagacggagcatctgacaatcaggaagtagaagagaaagacgccgctgaggagaagaaagaagagatcgacgaagacgaagaagaagaggaagacga

SEQ ID NO: 21196 - DNA, 496 bp, Glycine max
aatgatcaaaaccattcaagtgatcagtctgactcaagttcacttatcttccaacttggtcgggacatctcaattaattgtctcctacgatgctcaaggtctgactatggttcgattgcctcattgaaccaaagttttcgatctcttgtccgaactggagagctttataggctgaggcgacagatgggtatcatagagcattgggtttacttctcttgtaatctccctgaatgggaggcattcgatccaaacacccgtcgatggatgcgcttgcctagaatgccctctaatgaatgctttatatgttcagataaggagtccttggctgttggtacggagcttcttgtctttggaaaggaaataatgtctcctgtcatatacagatatagcattttaatgaatgcatggtcatctggtatggaaatgaacattcctagatgcttgttcggttctgccagccttggagaaattgccatattagctggtgggtgtgatc

SEQ ID NO: 21197 - DNA, 489 bp, Glycine max
  unsure (1)..(489): unsure at all n locations
tcggaatttcggcttcgatgcctagagtccagggttagttagggtctatgagaataagaaggtagcagtgttcactagatattgaggagttccattgacattntgaaaatgttagttcgagccacaggataatttcaatagctagcatactgcattgaggaatagggggatttaggagcaatcctacaagagcagagataagtaccaaggaaatcttggtgagcaataaaacgtctggcaagttggacgattccaaggtgttcaacaattccatgcagagattaagacccttggaaggcttcgtcatccaaatcttgtcactctgattggttatcatgccagcgagactgagatgtttctcatatacaactatttgccaggtggcaatctggaaaagtttatccaagagagatccacaagggcagtggattggaggattcttcacaagattgcattggatatagcccgtgcacttgcatacctgcatga

SEQ ID NO: 21198 - DNA, 848 bp, Glycine max
tgccagatgcaaattttgaagagagagaagctaagattctagagagagaagttgcattgctttgcttcccgcgtttgtgcattaattttcttatgcgtgcaagttcttcacacaccacaaagctcccacatttgttgataaatagaagctctaattgtcttcaagatcttgcattccccacctttagcctcactcaagttctttccctttttttagaaagagattcaaagggtgaaaccatcatcggttgttagatcaagctatttattctcttaatcactgtctgggacctcttatcttcttcaatcactttcaaagatcatttgaattgaagaaatggggggccatatgagcaagaagacccctgaaacatcatctggtattaacatcaatgctgatatggcaactgaattgaggtcatatgaggctgcctgcaagctctgactctgatttgcagtcctttaataccaccattcaagctcgagcaaatcaagtcattaatactcttgctgttggagttgaggttcgatccctttcgtttagagtctctcaaacaaagtcacagaatgccttctcgagatgaatcaggaagttggcaaggtgatcttagactgtaagaaagatatatggaagtatcccagaactgtttgagcttgttgaggaatactttgataatagcctgcagactctagatttctgtactgcattagagaagtgcctgaagcgagctagggataaccaattgcttactctcatggcccttcagcagtttgaagaggaaaccagcttgggagagacacgctatacgaggacattacaggaactgaagaatttcaaggcagctggtg

SEQ ID NO: 21199 - DNA, 1165 bp, Glycine max
taagctcggaatttcggcttcgagccggctcgcgccggtttgcctctctctcttcgcttattgttgcaccttcctcgtaaaagataactcccggtcggcgtgcatagccgccgattgaggcaaaaaaaaaacacaaaacacactgtagctcatcacagccaaacgcggcgtcaacgatgacgagcttctgaaattccaacttcgcccttcttctctgtgtatattcttttttatttatttattattatttctattattttttcggtgaggttagctccatgcctagtcccaagagcagccgcagcggccagatcgagagtcaccggaggggaaggtcgtcgtccttccacggccagtgcgcgatgtctgtcggtcagctccaccgtccgaagacggtttccgacctcccgtcgctcagaagcctcgccggaacggcgccggcgcctatgccggagggattgcctagacagccgccgaagatgctgctgaaggtgacggtgctgagaagcctcgcgcccgtgcaggtgctgatgacgccgggatccaccgtccgcgacctgatagcggcggcggtgcggcagtacgtgaaggaaggtcgccggccaatcttgccgtccagcgaagtctccgaattcgacctccattattcgcagtttagcctagaaagtttggataggaaggagaagctgctagagcttggatctaggaacttttttctatgtccgagaaagccagctacaacagtggaagatggcgtaacgacgtcgtttgcgtcttgtgcgaaagaggcagagaaagagagggagggatatggtggtggtggtggtgggtttgcttggttcaaactcatgcagttcatgatgtgattggttggttgattagtcattattgttattttatttcaattgaaatgtcttttttatttgtcccagaatgaatggccggttacttgtaaaaaataataggttggcttggcaattaggtacagggtttgagatttgtgtgtaagcaaagcaaaattgtaaaatagcatgtatgatttttaaacacatacatggtaatgttaaagctttcaattgcaaaattgtaaaaattatatgtataatcttatagtgctttcctgtgtcccaaaaaacccaatggccggcttcggtttgtctgttcc

SEQ ID NO: 21200 - DNA, 577 bp, Glycine max
ctcgagccgttcaaagcctttcctatgcctctcccttcgcttactgttgcaccttcctcctaaatgattactcccgctcggcgtgcatcgccgccgattgagctcaacaacaacaacaaaaaacaccataaaactcaccgtagcgcaccacagccaaacgcgatctcaacgatgaccagcttctgaaattccaacttcgcccttcatcttcgtatacttttttatttccggtgaggtgagttccatgcctagtcccaagagcagccgcagcggccagatcgagagtcaccggaggggaaggtcgtcgtctttccacggccagggcgtcatgtccgtctctcagctccgccgtccgaagaccgtttccgaccttccgtcaatcagaagcctcgccggaacggcgacggcgactttgccggagggcttgcctagacatccgtcgaagatgctgctgaaggtgacgatgctgagaagcctcgcgcccgtgcagatgctgatgacgccggaatccaccgtccgcgacctcatagcggcggcggtgcggcagtacgtgaaggaaggtcgccgtcctatcttg

SEQ ID NO: 21201 - DNA, 588 bp, Glycine max
attcgcgatagggagcgggttcccgacattcgcgagcttccagaaagatatttacgtctacggcacgccaacgttggagtttccggggctgattaaggttggtgtgcacgggggggagccgtgcgacccggataagaggccgtggggagcagcggtgatgatggaaaaactcaaagaatgggtggagtttacgttcaaggggatggttgaatccactgagcccgtcatcaaacagtcttgcatctactccatgacgccagatgaggatttcctcattgatttcttgggtggggactttgggaaggatgtggttcttggagccggcttttctggtcacggcttcaagatggctccggttattggcaggatattgacggaccttgctgtccatggagaaactaaatcccatgatatcagttactttaggattgcaaggttccgtataacctctatgatttagccttcttttcttctatttaaataaatgcatctccttccaccctttccttttctaattcttgtttaccagccaccagcttttgctttgcttattattattaatgtaagaataaaacaactgttgtcacg

SEQ ID NO: 21202 - DNA, 493 bp, Glycine max
caggactacgctccaattgaattagatcttactcaagcttctctcttttctacctaatctctctcttccgagcttcccttaaccacaacctcggaagaaaccagcaacattagtacatagaacaccaacatggttccaatcccttgtctgcattgactgcaacaaagcccacaccaatcccaacccaagaccacgacgaccaagactctccttcatcaaaatgtctcctttccttcagcaccgactcttgttcttcaaccccatcttcctcttcccacaaagccctcttcatcactctcatcctcatcacctctattgccttatcaacatccttcgccttcgcctttctctacttctcttcaaaaccatcaccttctactctcctcgtggctcgtcctctggccaaactcaaacgccccgtcgtcctcttagtctcctccgacggctttcgattcggttaccaattcaaaaccccaacaccccacatttgccg

SEQ ID NO: 21203 - DNA, 1179 bp, Glycine max
  unsure (1)..(1179): unsure at all n locations
catgcacggcgtacgtaagcttcggaattncggcttcgagcttggcatatgtggattgccatgccccgtgttggcggcttccaagagcgtcaatttgggtcctacccagaggctgaccctcttggtattttattcctggnnatttggaggaaccacagcgtcttccaagggcttattngtggctgtctaaagcntgttgaaatgatgtctgacatctaaaccaatcacatcggaagaagggaggaaattaggacttattgatgctattgtgtcttctgaggagttactaaatgcatctaggttgtgggcacttgaaattggagagaggtgcaaaccttgggttcgttcacttcataggacggacaaaattggttctctgtctgaagcacgtgaggtgttgagaactgccaggcaacaagtaaagaagactgttccacatttgcctcagcacgtggcttgtgtagatgtgattgaacatggaatagtccatggaggctacagtggtgttctaaaggaggcagaagtattcaaacaattggttgtatctgacaccgcaaaaggtttaattaatgtcttctttgcacagcgggcgatatcaaaggtgcctggtgtaactgatatcggccttaagccaagaaatgtgaaaaaagctgctgttattggaggaggtctaatgggttctggcattgctacagctcttatactaggcaacattcgtgttatactcaaggaaatcaattctgaatttcttctgaagggaataaaaacaatagaagcaaatgttaatggcttagtaagaagaggaaagttgacgaaacagaaggcagatgctgcactgtcactgcttaaaggtgttctggattactcagaatttaaagatgtggacttggtcattgaggctgtaattgaaaatatcagtctcaaacaaactatatttggtgatcttgagaagatttgtcctccacactgcattttagcatcaaacacatcaactattgaccttgatgttgttggtaaaacgaccagctctcaagatcgcattgcgggtgcccatttttttcagtcctgcccacattatgccacttttggagattatacgaactgataaaacttctgcacaagtgattgttgatctgataacagttggcaaaatcataaagaaggcacctgttgtggtgg

SEQ ID NO: 21204 - DNA, 683 bp, Glycine max
gcctccgtcccgtcctggtccacggcggcggccccgagatcaactcctggctcggccgcctcaacatccccgccgtcttccgcgacggcctccgcgtcaccgacgccgacaccatggagatcgtctccatggtcctcgtcggaaaagtcaacaaaaccctagtttctctaattaacaaggccggcgccaccgccgtcggcctctctggcatggacggccgcctcctcaccgcccgccccgctcccaaggccgccgacctcggctacgtcggcgaggtcgcacgcgtcgatcccgccgtcctccgctccctaatcgacaccagccacatccccgtcgtcacctccgtcgccgccgatgaatccggacagccctacaacatcaacgccgacaccgtcgccggagaattggcagcgtcgctcggcgcggagaagctgattctgctgaccgatgtggcgggaattctggaagatcggaacgaccctgacagcttggtgaagaagattgacataaaaggagtgaagaaaatgatggaagatggaaaagttggtggtggaatgatacctaaggttaattgttgcgttaggtccttggcgcaaggggttattacagcgagtattattgatggtagggttccgcattctttgttgcttgagattttgactgatgaaggtgctggaactatg

SEQ ID NO: 21205 - DNA, 1381 bp, Glycine max
attcctcttcccgtataaactactattaacttccaccaaaacacatttcctttttcttctggctctgcatttaccatactctgtttcttggtttcaattcaatcacacacctctttgccctcatggcccactttacctcctcaggtaaatcagacaatctcaccaaagaagactgtattggaaaaagtgcgctggttgtatgctttggtgaaattttaatagactttgtgccaacagtgtgtggagtgtcactagctgaagcacctgctttcaagaaagctcctggtggtgctcctgccaatgtggctgttggaatctctaggcttgggggttcatctgcctttgtaggcaaggttggagcagatgaatttgggtatatgttggttgatattttaaagaagaacaatgttgagacatctggcatgaagtttgaccctaatgcaagaactgcgttagcttttgttacacttagagctgatggtgagcgcgagttcttgtttttccgaaatcctagtgctgatatgctacttcaagagtcagaacttgatgaaaatctcataaagaaggctaaaattttccattatggctccatcagcttgattgatgagccatgcaagtcagctcaccttgctgctatgagcattgccaaaaactctggttgcattctatcatatgatccaaatttgagattggctctatggccttctgcagacgccgctcggaaaggcataatggatatatgggatcaagctgatgttataaagataagtgaggatgagattacatttttgactgggggtgatgatccttatgatgataatgttgttttgaagaaactttttcacccaaatctcaagcttttaattgttactgaaggttcacagggttgcagatattacacgaaggcatttaagggcagggttgcaggtgttaaagttaaacctgtagacacaactggagctggcgatgcatttgttagtgggattttatactgcatagcttctgaccaaactatttttcaggatgagaaacgtcttcgaaaggctttatattttgccaatgtatgtggtgccctcactgtaactgagagaggtgcaattcctgcactacctacaaaggaagctatcttgcaattcttactagaagcagctgtaatataaacagtattgacagatttttgttataattggttgttaagctatagcttaggtgatgctgaattctttttcctttttaattaaaaattttgtctatgaaattttcttatattaattctagttttcttttgctctcaagttttgggattgcgtaacagctgagttcacgaatttcctaggtttaatatttgtaatcaaataaaaggtattcagttttaattaag

SEQ ID NO: 21206 - DNA, 719 bp, Glycine max
tgctaaagaatctggttgcattctttcatatgatccaaatttgagattggcactatggccatcagctgaggctgctagggatggcataatgagtatatgggatcaagctgatatcataaagataagtgaggaagagattacatttttgactggtggtgatgatccttatgatgataatgttgtattaaataagctttttcaccctaatctcaagcttttaatagttactgaagggtcagaaggttgtagatattacaccaaggaatttaagggcagggttgctggtgttgaagttaaacccgtagacacaactggtgctggtgatgcatttgttagtgggattatctatagcttagcttccgatcaaagccttttccagaatgaggagcatctccgaaaagctctatattttgccaatgtatgcggtgcgatcacggtaacagaaagaggggcaattcctgcattacctacaaaagaagctgttcttcaattcgctgcaacataacatcagcactcacagttagttctttgatcatcaaatgtaatatttgtttttaacctatagcttgggtcttgctgagattcatgtatcttctttatctttggggctgtattttccttatatataatcaattcaatttgcattgctctctcatgcaatgtcttgtagcattgagcacacaattttacgttttggttgaaatgttgaagatctaaga

SEQ ID NO: 21207 - DNA, 628 bp, Glycine max
atttgcgggaaaagaaggggaaaaaaaaagttgaaaacactatgatgatgatgaaaagttttgttctggcaactggttggagaaaaaatatggtagaaagtgaaaatctgggtgctatgcgcgttgattgttgttgaattcctttttgttaccacctcacttgttataaacaccaaccaatttctctccttctcatctacttttctcactgcttccgtgtttttttctctctcttcattacacaacaacaaagtagttgttaatagcctctgttttcttcttgccaccaaaatctcacaccttccattgcatcatcattcataaatggctcatcccacctcatcaggtcaatcccatgatctcaaaaaagaagattgcaaggaaacaagatcactggttgtttgctttggggaaatgttaatagactttgttccaacggtgggaggagtgtcactggctgaagcacccgctttcaagaaagctcctggtggtgcacctgccaatgtggctgttggtatctctagactgggaggttcatctgctttcataggcaaggttggagcagatgaatttgggtacatgttgggtaacattttaaagcagaacaatgttgagacgtctggcatgc

SEQ ID NO: 21208 - DNA, 546 bp, Glycine max
tgatgaaaagttttgttctggcaactggttggagaacaaatattggagaaagtgaaaatctgggtcctatgggcgttgattgttgttgaattgacttcctttttgaacccatatcacttgttataaacaccaaccaatttctctccttcttctcatctacttttctcactgctttcgtgttttttttccctctctctttgtagcacaacaacatagttattagttaatacttaatagcctctgttttcttcttgctaccaaaatctcacaccttcattacatcatcaggcataaatggctcaccccacctcatcatcaggtcaatccaatgatctcacaaaagaagattgcaaggaaacaagttcagtggttgtttgcttcggggaaatgttaatagactttgttccaatggtgggtaggagtgtcactggctgaagcacccgctttcaagaaagctcctggtggtgctcctgccaatgtggctgttggtatctctagataggaagttcatctgctttcataggcaaggttggagcagatgaattt

SEQ ID NO: 21209 - DNA, 425 bp, Glycine max
cgaggacggaccatgcacgcacgcgtacgctagctattaatttcgatcgagatcatttttacgaacttcgaaactgttgcttttggggaaactcaaaaacaggtttttctttcatagtatcacagaagagaaagtgattctagagtgttgttgcaatggctgaggagaaagacgctttctacgttgtaaggaaaggggatgttgttggcatctacaagtccttcagtgacatccaacctttacttgcatcttctgtgtctagtgaccctgtaagtatttacaaagggtactcgttacctcagaagactgaggagtaccttgtctcacatgggctcaagggagccccttattctattagtgcagctgatgtgaacgaggggctatttggaagacttgttgcttgtccttatcaggatccatattca

SEQ ID NO: 21210 - DNA, 381 bp, Glycine max
cttgtgtacaactgtaactgcattatcaatagactgagtgaatgtattattatcccacagatgactctgtggtcgatggcaaagtctccccttatgtatggaggggatgttcggaagattgatcctagcacatatgatgttatcacaaatcctacccttttggagattaattctttcagctcaaataacatggaggcatgtgaaccatctatcttttttgggatggagggaataatgtttctcaaattaatgtcatatttcttttgctgcattggcagtttccttatatcacaagtgtgaatagtgaagatcgggatcttggtaagcaaatgagaagaagcagcaaagaaataaaaacaacctatactcattcattaggcc

SEQ ID NO: 21211 - DNA, 500 bp, Glycine max
gctagctagagaaagaaaaaagtccttgtgagtctttgattctagcatccttcctttgtgcaagtttaaagaatggagaaccaacaagaaatgatgaaagtagaaaaggtatgtgaaatctatgaaaaaatctccaaactagaagacctcaacccttcaaaccatgtcaacaacctcttcacccaacttgtcacaatttgcaccaccccatgccaaatagatgttaccaaactaagccaacaagttagagaaaccatagccaagctaattaggctttgtgggaaagctgaagggcttcttgagaaccactactcaaccctaataggatcatatgagaaccctttaagccacatgaaactcttcccttactactccaactacttcaaacttagccacttggagttcaccatgttaaccactcacatcacacaagtccctacccaactagcctttgtggggtcaggtcctcttcctctcacctcaatcatgttggccacaca

SEQ ID NO: 21212 - DNA, 401 bp, Glycine max
caaaaagaacagagaaaacgggagagaactggccaaggagaggaaaagagtgttgcagattttggtgcagtaatggcaacaccaaaacagtcatatgagcagcaacaacaacaacaaccaaatgtgcagcgagtgaggacctcggggatgattaacagcaaccagagtccaatgagggatgacaaggaagaggagatgtcaagatcagctttggcaatgttccgagcaacggaagaagaacattgacaggagaaaaatggaggtgagggataaggttcacgcttatctcggtcgagtagaggaggaaacaaagcgcttggctgagattagagaagagcttgagggtctcacagatccattgaggaaggaagttgcaatagttcgaaagaagatagacagtg

SEQ ID NO: 21213 - DNA, 373 bp, Glycine max
gcgctttgtctgttataatcaacgcgctcctcacgagtgaatttctggttcggaaggatctgattgttagggtttggtatggggagaggtaagatcgtgataaggaggatcgacaattccacgagcaggcaagtgacgttctcgaagcgaaggaacggtttgctgaagaaggcgaaggagcttgcgatcttgtgcgatgctgaagtcggagttatgatcttctccagcaccggaaaactctacgatttcgccagctccagcatgaaatcagtaatggaccgatacagcaattcaaaagaagaaccttgtcaacttgggagttcaacctctgaaattaaattttggcaaagggaggcagcaatgttaaagcaac

SEQ ID NO: 21214 - DNA, 537 bp, Glycine max
  unsure (1)..(537): unsure at all n locations
tttgcatgcaaaaaccattgctccctcagaagaagatgaagaggccaacaacaacaacaaggagcttgaagaagaagatgaagctgagagagagaggctggagatttggagctccatccagcggaacaagaaggaggagcaagagaaatcaggagcctttgacacgtggagctcaatcatgtccctcaagggcaaagatgaaatctccaaatcaatgcctattacaccttatgttcaccctcttgtcaaaaggtcaaagagttgtttgagtgagaagagtctcgaaatctgcactgagagtctcggttctgagactggctctgatgccttgttgttctcttcttactcttcctcttctgagacaggggatgctgatgcagagcaacaacaacaacaagagaaagaacaagtaaaagaagaagaagaagaaggagaagaagagttatgcaattatgcttcagtggtggctacaaagaaggcttcggcttcggcttcaccaccacgcgctttcccttcaccacttncttcactctctca

SEQ ID NO: 21215 - DNA, 516 bp, Glycine max
gaataatcattttgtttgtgaatgcatgttaggatttccttttatttttgtccaattatataggtaacccttaaattttcccttcagtttatgcatgtttggatttccttttattttttccaattatataggtaacccttaaattttcccttcagttttttgagtttatatatgtattccctgaatcgatctaacatgaatagctttctaagggtactcttctcgggatgaggcaaaccatttttgagtttatatttgattccctgaatcaaaggtacccatccttcagttttttgagtttatatatgtattcccttttgtgatcacaacaatttggtgctgtcaagtgggttggtgttctttttctcaggggattgcaacagccgtagacgtttcaacacatagattgctaaccaagatagcattgctggaatttctcgcatgagatttgtctgcacaactccaggatccgcagcactaatatgcaacaatacggaaactgaatgtaaaaggtac

SEQ ID NO: 21216 - DNA, 631 bp, Glycine max
ctatttagcattatacatgagaagcttcctactgtatcgacttctactatttctattcttttgtcaacatatgctaaaattctgatgcacagtcaaccaccagaccctgaattacagaatcaaatatggacaatatttaagaaatatgaaagctcaattgaagtcgaaatacagcaaagatctgttgaatattttgcattgagtagaaaaggtgcagctctaatggatatattggccgaaatgcctaaattccctgaacgacagtctgcattgatcaaaaaggctgaagacactgaagtcgatacagcggaactaagtgctataaagttacgagctcagcagcaatcccaaacatcaaatgctttggttgtaacaggccaaagtcatgctaatggaactccacctgttggccaacttagccttgtaaaggtgcccagcatgagtagtaatgtggatgaggcagatcaaagattatcccaggaaaatgggactttgagtaaagtagattctcaacctccctctgcagatctccttggtgatctcttgggtccacttgctattgaaggccctcccggtatcagtgtccaccctcagccaagctccaattcaggattggaaggaactgtagttg

SEQ ID NO: 21217 - DNA, 654 bp, Glycine max
  unsure (1)..(654): unsure at all n locations
gaggaactccacggagttcgcgagcaacagtttggcgattgtcacgaagatcctagggttgctgtcgcagttcgcggcgccgattcaccaccggcggctgctaggatttccggagtggctcggggcggcggagcggaggttgcttaggtgaacagcagcgaaacaacgctggacgctgtggtggcgcaggacggtagcggacagttcaggacgatcggtgaggcgctgaaattagtgaagaagaagagcgagaagaggttcgtggtgcacgtgaaggaagggcgttacttagagaacattgatttggataagaatacgtggaatgtgtttatcttcggtgacggcaaggacaaaaccgtcgtcgtcggtagccggaacttcatggacggcacgccgactttcgaaaccgccaccttcgctgtgaaaggcaagggattcattgccaaagacataggttttgtgaacaatgcaggtgcatctaagcaccaggctgtggcatttagatctggttcggaccgttctgtgttctttagatgctcattcaatggcttccaggataccctctatgcccattccaatcgccagttctaccgtgactgtgacattacaggcacnatagacttcatattcggaaatgcagctgcagtgttccaa

SEQ ID NO: 21218 - DNA, 527 bp, Glycine max
atttttgcaggcagatgatgtggcagacttggaatgggtttctcactttgtggatgattctctcccggagttatctatattgtaccccattcattgttccaagaaaacaagagtatgggccgaaccggaatccagattgagcccggcccaaaccgtttcaaaagtcccgagaaagtcgagaactgaaaagcctagaaagcccaacactcgtgtctggtcctcttttacggtgtttgctggctccgttgggttcggcgagttggtgactaagaagcagaagaaaaaggttgaggcccaaagcggtggggcccagtctctgcgacgttgtagccactgccaggtgcagaaaacaccgcaatggaggatcggtccactagggcccaaaacactttgcaacgcttgcggggttcgattcaagtctggtcggctttttccagagtatagaccggcctgtagcccgaccttttgtggccacattcactctaacaaccatcgtagagtgttggagatgagatggaaaaaacaga

SEQ ID NO: 21219 - DNA, 648 bp, Glycine max
  unsure (1)..(648): unsure at all n locations
tatgggttggctttctacaaacttttatgattccatgcagccatacttggttgttacccatatattttgttgtgtctttaggatgttatggtcttttaatggttggagttggtctgatgaattttccaacctgtcctcaagaagctttattattgcagaaggacattgttgaggccaaggaatatttgaaacaaaaaggagttgatgttagttccagttgatgcagtctcatatctcatgatcttctgatttagcttctgaaattacctgattgggagttgcgaaagatttttggcttttaacttcatacacaaaatactaatgtggggtttgttttcgattttggcttatgtacatgaacttttcagtataaccaatggatagctttttctattggtaaaaaaaaaaaaaaaaaaaaaaaaaaaaaaaataaaaaaaaaaaaaaaaaaaaaaaataggaaaaaaatttggggaaaaaaaaaaaaaaaaaaaaaaaatataaaaaaaaataaattaaaaaaaatgaagggggggaaaatattaataattaaaaaaaataaatagaaataannggggggggccccccttttttgtggcttgtccccccggatattatttttggcccttgcttttgggggttacaatttt

SEQ ID NO: 21220 - DNA, 1008 bp, Glycine max
gtcccaaacttgttcatgaaacaatattgattttctttgtgaacttgttgatatacttaaaatggaagttctgggggaatagcatagtaggaggagtgaatcactagctggtcttcgtcctacatttgagagaattttagcagatgttcatgagcggttaacatttcgtgctcggactcatatacgggatgagatagcaaattacattccaactaatgaagacttggactaccctgaaaagctaaagaaatctgctgaaagtacttctgagatcaatcctgctgatgacaacccagatatttttaaaacatggtatccacccctggagaaaactctatcatgtctttcaaagttgtatcgttgtttagagtctgcagttttcacgggcttagcacaggaagcagtggaagtttgctcagcatctattcagaaagcaagcaaattaattgcaaagagatcatcacaaatggacggacagctcttccttataaagcatcttttaattttaagggagcagattgctcctttcaatattgaattttcagtcacacaaaaggagcttgatttctctcatttgctggagcatctacgaagacttctaagaggtcaagcctctctatttgaatggtcaagatcaacttcattggcgaggacactgtctccaagagttttagaaaatcaaattgacacaaagaaggagctggaaaagagccttaaagccacttgtgaggagttcatcatgtcagttactaagcttgttgtggatcctttgctttcattcgttacaaaggttacagcagttaaagttgcattatcatcaggtggtcagaatcaaaagctagagtcagttatggccaaacctctgaaggatcaggcttttgctactccagataaggtggctgaacttgttcaaaaggtcaggaatgctattcaggagcaactgccgggggtgattgataggatgaagctttatttacagaattcatcaacaagaacaatacttttcaa

SEQ ID NO: 21221 - DNA, 518 bp, Glycine max
gtttgtaggtaaagacgagaatgcagtgcgacagcttataagcatgataagtagtgacaactgccacgtggttgaacaagcctgctctgctctttcatcccttgcctctgatgattccgtggcattgcatctgatgaaagcggacatcatgcaaccaattggaacagttctaaaatctgcaggtctggaagaggtaatatctgtattgcaagttgtggtccagttggctttcacatctgatactgtggctgagaagatgttgaccaacgatattgtaaaatcattgaaaaacttatgtgcccataaagatccagaggcacaaaggctagctctgttagctgttgggaatttggccttcagtctggaaaatcgtcgcatacttgtttcttctgaaagcttacgagaacttctcttacgtctagctgttgcaactgagccacgtgtgtataaagctgcagctcgtgctttggcaattcttggagaaaatgaaaacctgaggcgtgcaataaaaggaagac

SEQ ID NO: 21222 - DNA, 539 bp, Glycine max
gaactaatgaagtaaatgaagatattatactcattgattaccagggagaatctcctgatgaacaagctctagtttctgcggcctctgcatatggatatactctttttgaacgcacatctggacatattgttattgacgtcaacggtgagaaactcagattggacgtattgggtctgcatgagtttgatagtgtgcgaaaaagaatgtctgttgttattcggtttcctgacaacgcggtaaaggtgttagtcaaaggtgctgatacttcaatgtttagcattttggaaaatggcagtgagagtaacaataacatatggcatgcaactcagagccatttgaatgaatattcttcacaaggtttgcgcactcttgtagtagcctccagggatctttctggtgctgaacatgaggagtggcaaagcaggtatgaagaggcaagcacttcgttgactgacagagctactaaactacggcaaacagcagctcttatagaaagcaatttaaagttacttggagcaactggaattgaggacaagcta

SEQ ID NO: 21223 - DNA, 1274 bp, Glycine max
cccacgcgtccgcccacgcgtccgataaaaacagaggtcctcgcagccattttctttgacactctccaaacatgttcgccaccttacgactcctctccttcttctctcactcctctcactactcaccagcgcccaatccgaggaccagcgtcaaatccttctgaacctaaaatcctccctccacaattcaaattccaaactcttccactcatggaacgccaccaattccgtttgcaccttcctcggagtcacttgcaactccctcaattccgtcacggaaatcaacctctccaaccaaactctctccggtgttctcccgttcgactcgctctgcaaacttccgtcgcttcaaaaactcgtgttcggttacaactacttaaacgggaaggtttcagaggacattagaaactgcgttaagttacagtacttggacttgggaaacaaccttttctctggtcccttccccgacatatctcctctcaaacaaatgcaatacctgtttttaaacaaaagtggattttcgggaacttttccggggcagtcgctgttgaacatgacgggtctgttacagttaagtgtcggagataaccctttcgacttaacgccctttcccaaagaggttgtgagtctcaagaatctcaattggctctacctatcgaactgcaccctcggatggaagcttccggtaggactcggcaacctcacggagctcaccgaattagaattctccgataacttcctcaccggcgattttcccgcggaaattgtgaaccttcggaagctctggcagcttgagttcttcaacaattccttcacgggaaagattccaaccggcctgagaaacctcacaaagcttgagcttttggatgggtccatgaataaactcgaaggggatttgtctgaattgaagtacttgaccaatctggtttcgttgcagtttttcgagaacaatttgtcgggggagattccggttgagataggcgagttcaaacgcctcgaggctctgtctttgtacaggaacagattgataggtcctattcctcagaaggttggttcctgggcagagtttgcttacatcgacgtgtcggagaatttcttgacggggacgattccgccggatatgtgtaaaaagggagccatgtgggcgcttctcgtgcttcaaaacaagctctccggcgagattccagccacctacggcgactgtttgagtttgaaacggttcagagtcagcaacaactcgctctccggcgccgtccctgcctcagtatggggac

SEQ ID NO: 21224 - DNA, 622 bp, Glycine max
  unsure (1)..(622): unsure at all n locations
tgcacgcgggggggaggtaagaattnggttcgagatcaataagggcaaaggaagaattgaagagacacacaaaaatattatttgctcaagtgaatggagccacgccttctgacaatattctttgtggttctttcattctcaccatttgttcagtccttggtgcgtcattacaagtttagtgtggtcttgaagaataccactaagctttgctccacaaaatcatttgtcacggtcaatggacaatgtccagggcctactctctatgcaagagaggatgatacggttattgtaaaggtcactaaccacgttaagtacaatattacaatccactggcatggaatcaaacagcttcgaactggttggtctgatgggccagcatatgttacacaatgtccgattcagccagggcagagctatgtctacaacttcaccatcaatggtcaaagaggcacacttctctggcatgcacacatcacgtggctaagagccacggtgtatggtggcattgtcatattgcctaaacgaggcatttcttatccatttcctaaacctgacaaagaaaagataatcattctaggtgagtggtggaaatcagatgttgaagcaattctcaatcaggctg

SEQ ID NO: 21225 - DNA, 670 bp, Glycine max
aaagaaatccactggtgttgtgcagtttgacacaacccaaaatcgatttttggctgctggtgaagatggccaaatcaaattttgggatatggacaacattaatcttttaacaagcactgatgcaaagggtggactacagacccttccacacttgagattcaacaaggaaggaaatcttcttgctgttactactgcagacaagggattcaaaattcttgctaatgctaatggtcttagatccttgagaacagttgaaactccaggatttgaagcattgaggtcaccaattgaatctgctgcagtcaaggcatctggctcttctgctgttaatgttagtcctgtcaactgtaaagtagaaaagagctcacctgtcgggccttctccaattcttaatggagtcgataccacaggtcaaaatgcggagaaacctagaactgtagaagatggagtagatagagctaaaccatggcagctgtctgcaattgtggatgctgtccaatgtcggttagttaccatgcctgacagtacagattcttccagcaaaggttgttcgacttttatatacaaactctggtgctggtgttttggcacttggttcaaatggtgttcagaagctgtggaagtgggctcgtagtgaacaaaatcccaatgggaaggcaactgccagtgt

SEQ ID NO: 21226 - DNA, 273 bp, Glycine max
cgatattttactttgggtacatgcttatagcgtcttatgcattttttgtggtaaccggcaccatcggattttatgcatgcttttggttcactaggctcatctactcctcggtcaaaattgattagatatagcagtcagcggtttgggccaatctactatatacttcttaaagggtgaagacagtttgtgtaaggattttgatattcaggtactagcatgttcaaatgtaacctattctatacaattttgaactgcgacgacagttattctttt

SEQ ID NO: 21227 - DNA, 345 bp, Glycine max
ttttaggtttttaaccggaggatggagcggttgattggggagatgaagattggagtgaacgggggagggtgggtggaggaggctttgaggagtatgcaggaggatgagacgtgggttgaagggtgtaatgggaataataataacggttttggggttgggttggagttcgggaagaacaaggttttggagatgatttttacgaggagtggtgatgtttcggaggtacattttttgaacatttagggcttcgaactgacatttgtttacaccacaaggaagaggcttgggcgtacttgcaggaatttaaactgaaagaattgttgtagagttactctgaatttatta

SEQ ID NO: 21228 - DNA, 430 bp, Glycine max
aagaaagtctccattttgtctctaggagaaacacttaagtatttttacttgcttttcgcggacagctctcttattcctttggataaatttgtttttaacacagaagcacatcctataccaatcaatttgaagaaatgagtatattcatcaaaggcattcaacacagttattaaaaatacagaccctgtcaccctggtctcacagagatgcttctttgaagtcagtctctcttacactgaccaagagtacttctggttgtaaaggaattgattagctgggttctcagtgataataaaaactgtgaaatattgttcgaatcatgcaacacatcagccaacacattttagagaccgtcccccgattatgactcactttcttgggtttacaatctcatttagaatagggcagttataaatccaagaaaatgaga

SEQ ID NO: 21229 - DNA, 397 bp, Glycine max
aactcacgctctaaacgcaacgcagcatcgttcgtgtatccactgcagttgcctcagttgacggtgttggtagggaaaaccatggcggacgtggtgcagtaccgtttggagcgcatggtggacgagctcgacgacctcgagcagcgcggcctcttcagccggcgcgagatcgcggagatcgtgaagcagcggcgaaagttcgagtaccggctgaagcgtccgagtcctctgaaggaggatttcttggcctacgtcgagtacgagactcagctcgacgctctccgcaggctccgcaagaagtccgtggcgcgcgaattgatgaagcaaggcaataagaagctcaagaagtctaagtccgatttcgctggattgcttaggattattgacatttacgagc

SEQ ID NO: 21230 - DNA, 598 bp, Glycine max
ggaacttactcatcttgaagtgaatggatgccacaatattggaactttggggctagaatctgttggaaaatcctgccaacatctctctgagttagcattgctttactgccaaagaattggtgatgctggtcttgtccaggttggacagggatgcaaattcttgcaagcacttcaattggtagattgttcaagcattggagatgaagccatgtgtggcatagctagtggctgtaggaatctaaagaaacttcatattcgtcgctgttatgagattgggaacaaggggatcattgctgttggtgagaagtgtaagttgctaacagatcttagcattcgattttgtgatagggttggcgacagagctcttattgctatagctgagggttgttcccttcattatctgaatggtagtggttgccatctaattggagatgctggagtgatagccattgcaagggggtgccctcaactatgttatttggatgtgagtgtattgcaagggtgtgtactacttttttgtgtaataccccccgcaatgtaattttccttcagttcattatagccttcatacgtttcattttacttatgaaacatagtt

SEQ ID NO: 21231 - DNA, 417 bp, Glycine max
acaagctcaagcaagcatgcaccgcaagctctcacctttgaagccccaattttgaaaagatataactggcctgacagaaactgagaggatgaaacgtaataatagtgtttatcccgctgcacttaactgtgatgacatcctgcatgagatcctacttcgaataccaccaccaactatctccaaattaattatcgtatcaaaaatatggctgcgtgtgatatgcagtccttcatttcgtcaatgctacgtgaggcaatggggacaaagttttcgacttttgggtttttttgtttgcaactttttatatcttggaagacctcgtgatggctatcgtcgccctcgttgggagcctgccctcccaatcttgtccacttgcaaagacggtgatgatttgaaactttctggaatcctcaaaca

SEQ ID NO: 21232 - DNA, 549 bp, Glycine max
cagagagcttggattgcagccaaggcaagttgctatatggtttcagaacaagagggctaggtggaagtcaaagcaacttgagagagactatggcatactccaatccaattacaacagtttggcttcccgttttgaagctcttaagaaggaaaatcaaacattactaattcagctgcagaagctgaatcatctaatgcagaagccagtggagccaggtcagagatgcacacaagttgaagcagcaaacagcatggacagtgaatcagaaaatggaggcaccatgaaatgtgaagctgagggaaagccaagcccatcaatggaaatatcagaacatttacttggtgttctgtctgatgatgacacaagcataaaggtggaagactttggcctagaagatgaacatggccttctgaattttgctaagcatgttgatggttccttgacttcaccagaagattggaatgcttttgaatccaatgatctattaggccaatcaaccactgatgattaccaatggtgggacttctggtcctgaatgaaacagagcaa

SEQ ID NO: 21233 - DNA, 582 bp, Glycine max
gtggcaattgggtacaccatagcagcttccataagcatgatggcagtcaaaaggtctaattgttatcatagtagcggggggaaaaatccatgcaaaatgaacagcaattggtacatgatttcatatggtgttgcggaaattatcttctcccaaattccagatttccatgagttgtggtggctctctattgtagctgctgtcatgtccttcacatactcattcattggacttggccttggtattggtaaagttataggacccggaagaattaaaggaagcctaactggtgtaactattgggactgtgacagaatcccaaaaaaatttggagaactttccaagcgcttggaaacatagcctttgcttactcctactcaatgatccttattgaaattcaggacacaatcaaatcccctccagcagagtcagagacaatgtccaaggctactttaataagtgttttggtcacaaccgttttctatatgctatgtggttgctttggctatgcttcttttggagatgcaagtccgggaaaccttctcactggctttggcttctataacccattttggctcattgacat

SEQ ID NO: 21234 - DNA, 296 bp, Glycine max
tctcgagccgaatcggctcgaggtatccgtaaccgtgtggaggtgtgtgcttgacttgagtattgaaattgttgattgttaattggaagtgaagaagaaggcaatgccaggtcctggtcctcaccttatgtatgccatgggttctggtttgtgtctcacaagcatcagcaatgggaggtttagtccccaccacacactcttctacaccatcaacgccttctttggccctgatgtcggttctttcacggagtggcttggttcactctttggtggctctgctcatgcttttggatctg

SEQ ID NO: 21235 - DNA, 395 bp, Glycine max
gtttcacgtttcagtcctgatcgagtaaataccaagaagcagcagcgcagtaacgacaccgtttcgatggggaactgtaacagcgaagcctcttcccaaactcagccacattccgatcaccatccccaaccacgctccaactccaacggcatcaccgtccttcctcccaattcgaagccctccgttggccgggtcttgggccggcccatggaggacgtccgctccacctacaccttcggccgcgaactgggccgcggccaattcggcgtgacataccttgtgacccacaaacacaccaaacaacaattcgcgtgcaaatccatcgccacgcccaaactcgtccaccgcgacgacttgggaggatgtccggcgagaggtgcagatcatgcaccacc

SEQ ID NO: 21236 - DNA, 412 bp, Glycine max
gcaagatattcgcagaaggagatttccttagaagaaagatcgactctaatctggaggaaactgctatgacatctttgccaagagatattcatggtgcgcctcccgaaagccttgttgttaagctagctgaaatccttggaaactacaagactcttcgaaaaatggctcttttctggtgcagggttgttgctgaactaaggaaactttggtccgaggaacaatacttaccaggagtcccccaggatgagattcctgatctgaagtcatgtcttctatatcaacattttcaagtaattaattgctgcatctctcggaaaaggttccgtattattgccaccgaatctttagactctatgatgatgcaagctaattcagacataaaagaatcaactgattgttgcgctggagctcc

SEQ ID NO: 21237 - DNA, 558 bp, Glycine max
aatcaaaactcttattcccaactggaaacatacatcaacggcagtagaataaagtcctgaaagtagttcttctgcagatgcattcatgaatttgttatggctgggcatagtattacagctgatgaactttttgtaccagctatttcggaacctcttgctacccaatttagcatatgaagaagatccatttagaggattagtagtgacacttgaagcccttgctttctgagaaggacatggtgtcttcaaatcttcagtttcagctggcagatccttttggtttggtccaatgtatgggtaagacaggtacttgctttttcttcgatctctagaatcaaagcagccttcaagcttctccggggcttcttcagtcaagatggtgtcttcaggcatttttgtctcatcaacagaattagtgtcttctcttcctaaggtcaaaaccacatccattgctgcttcctaataaaataaactaccaattctctctatgaatgaattctggaaaccacacatgcctgatctgagtaacggagaaacaatgcgagtgagagagtgaac

SEQ ID NO: 21238 - DNA, 691 bp, Glycine max
tccttcttgggaaacacgtgactctggatttgaagctaataaaactatttcttccgtattttcacttctatttctctcaggaatatcaacaggtatagctgggggtgtaaactgcaaatctattaccagtgaactgcagttaagcttttttgcatctgtatacactgaattaatttgagcagtttgatgttcttgtgcctctatcttttccctctgattgtgctcagactttccttcagacgcaaggcaacacaaattttgtgcagcttgaggagctgagctgtatttgctgcttaccccaataaaatttatctcaacattttgcagttgatgtactaaagttacttcttccaccttcctcttttgtgtcagttttctcccaggcctttgagagtcaccattcgaagtgtgtacattcacatctgataggccagagagtgattttctcttacgcctaactgcattttccatgctattggtctttctcttcttactgttggtatctggccaatcattaccctcaggtgttcccaatgtttcttcttttgcattaacctgggaagtagcaagttcagcctcatcatgataattcgctactctatatctgcccttgcggaacctcttgctacccaatttagcatatgaagaagatccatttagaggattagtagtgacacttgaagcccttgct

SEQ ID NO: 21239 - DNA, 381 bp, Glycine max
ggtggagaaagaggtcttgtgtgatctgagaatatgccttgcttgttattgttggtatttctgattcaatcatgggcagtgaaggcacaacaagtctacgataggaacatattcatattagcggggcagagcaacatggctggtcggggcggcgtgctgaacaacaccggcacggggatcgccacgtgggacggcgtggttccaccccagtcccgtcccaacccctcagtcttgaagctggacgcgcacttaacgtgggtggaggcccgtgagccactggacgcggacatcgattctaggaagacaaatggtgttgggccaggaatggcatttgcgaactcggtgttggagaagcacccagattttggtctgattggtttg

SEQ ID NO: 21240 - DNA, 481 bp, Glycine max
aagaaggttcatctcaggctgcactaccatcggcaataccaaaagaatccaatctttccaaaagctcagttgaaagtgataagtccaaggcttcagactttgagttagatcagggcccacttcagccagcacccttgtctaaagatccaaatcagttttcggagcaacacagatatttagcaaatgaggaatcccatggtagaatgaatagccagtggaaatcacagcattctcgtaggatgccaaaaaatatgcaggccaatagaccggcagagaaatcccatgggactgatgctgtgatgtgggcacctgttaaacctcagagcaagagtgagatcgtggatgaattgagtgagataagtaaaattgaggcagttaatcctctaaagagtgagcagcaggtgcataatttaaaaaataagagggcagaaatggagaggtatgttccgaaaccatgtgcaaaagaacatgctcagcaagg

SEQ ID NO: 21241 - DNA, 885 bp, Glycine max
ctttgtgtgaaaacgaaagccacaatactcttttctctctcccttctctttctagaatctgcgtttccttttgttgctctgcttcgcgttcgtgttctacgtcgtcgtttttgagctggttaaagggattctattctagggtttcacgcaagaagaagaagaagaagatgacgacgacgatggagagcttgattgggctggtgaaccgaatccagagggcttgcacggtgctcggtgactatggcggcgctgataacaacaccttctcttctctctgggaagctcttccttctgttgctgttgttggtggccagagttcagggaagtcttcagttttggagagcattgttggtcgtgactttttgccaagaggatcagggattgtgactaggcgtccattggtgttgcagcttcataaactcgaaagtgggtcacaagagtatgccgagtttcttcacctgcccaggagaaagttcactgactttgctttggtccgccaagaaattcaggatgaaactgatagagtaacagggaagacaaaacaaatatctcctattccaattcatcttagcatctattcgccaaacgttgtcaacctaactttgattgatttaccgggtctgactaaagtggctatagagggacaacctgagaatattgttcaggaaattgaaactatggttcgttcttatgttgaaaagcctaattgcatcatactagcaatatctccagccaatcaagacatagcaacttctgatgctattaaacttgccaaggaagttgaccccacaggtgaaaggacatttggggtgttgacaaagctagatttgatggacaaaggaaccagatgctttggatgtccttgaaggaaggtcttatcgcctg

SEQ ID NO: 21242 - DNA, 871 bp, Glycine max
tcgagcggctcgactccatttgactacaaaacagtctccatttgacacagtcctagtggtgtactacttattatggccacaccagcatccatcaccaatgtcactgtggagttccttcaattccccgcggtggtgacacctcctgcctctaccaaatcctatttccttggtggcgcaggggtgagagggttgaatattgaagaagaatttgtaaagttcacgggaataggtgtttatttggaagacaaggccgtgtcatcactcggtgccaaatggaagggcaaaagtgcagctgaattgctggactcacttgacttctacagagatatcatcaaaggtccgtttgagaagttaattcgagggtcaaagttaagaacattggatggtcgtgaatacgtaaggaaggtgtcagagaactgtgtggcccatatggaatccgttgggacttacagtgaagcagaagaaaaagctattgaggaatttagaaatgctttcaaggatcaaaatttcccaccaggctccactgttttctacaaacaatcacccactggaacattggggcttagtttctcgaaagatgagacaataccagaacatgagcatgcagtgatagacaacaaaccactctcggaggccgttctggagactatgatcggagagattcctgtttcccctgctttaaaagagagtttggctacaaggtttcaccagtttttcaaagagttagaggccaatcccaacaatgaaaactgagaacaatctttaggggacattggaaacaggaacaacaaaaaaatccccactttgtttgaatttgtaccccatttaataaatgagcaaaccagtataaataataaaaaaaaaaaaagaa

SEQ ID NO: 21243 - DNA, 415 bp, Glycine max
atcaattctcccttcataataaacccactgatcgcttctctttcctcttctctctctcagtagaaagcctacaaccttcttttatctgcgtttcctctctctctctctctctcgatcagtgctagacaaggactggtaaccaaaaattccaagaagggtacattaattcatggcctttgaggagcactatgtttctcaggaattgaaaaccatccccagccccatgacagtgacagaaaatttggatgggtgttttgattgcaacatctgcttagattttgcacatgaaccagtggtcaccctttgtggccacctatactgctggccctgcatctacaagtggctccatgtccaaagtgcttctcttgcaccagatgagcacccacaatgccctgtttgcaaagatgacatatgc

SEQ ID NO: 21244 - DNA, 709 bp, Glycine max
atcggattcatctgtttctgattctagttcctctagtgatgggaaacaccagaagaggaggagaaataagcacaagcatgggaagaagaggaaaattggacgaaagcagcggaagagaagccagcacggtagaactaagaaatcaagacacatgtctaggcggagctctgaggattcaagtgatgcacatagtgatagcgctagtggcagtagttctagcgatgagaaagctgatcgtcatgcctgaggtcgtaaagcacctgctgacaataaagcccaaagaaatctagacacaggaaagcaattttccaacccttcttgtcaaaggcaaactattcctgaacaaacaatggatcccaaggtaagaagaattgtggacaagcaatcacatgaagaaggtgaattctctccggagaatggtgcatttgtaataacaggcatgatactcaagctgaatttagtaaacctgctaagcaacatgctaattcagatgattcaaatcacaatagaggtgcaagtcctggaagaagtcctaccagggattctggggagctaaaccaaggacgtgctttgttgttggctagtcctggcaaaaaaagtcctggccaaaaagcatctgaacctcctgcccccaaacatggtcagggattttcaaaaagcccttcaccaaatagcatgcctaagcgtattaaaaaagggcgtggcttta

SEQ ID NO: 21245 - DNA, 684 bp, Glycine max
ggtgcatttgtgaataacaggcatgatactcaagctgaatttagtaaacctgctaagcaacatgctaattcagatgattcaaatcacaataggttttgcctcttgctttcttagcatctaataattattcatctcatgtaaattttgcttcaattaaaatgtcaactccatcctgggatttggacacatctctaattgtgctaagtttgtgtgacatcttatttaaccagaggtgcaagtcctggaagaagtcctaccagggattctggggagctaaaccaaggacgtgctttgttgttggctagtcctggcaaaaaaagtcctggccaaaaagcatctgaacctcctgcccccaaacatggtcagggattttcaaaaagcccttcaccaaatagcatgcctaagcgtattaaaaaagggcgtggctttactgagcgttatgcctttgcacgaagatatcgcactccatctccagagcggtctcctcctcattcatatcgttatggtgatagaaatataagaaggaactttgatagaaacacaagctacagaagttattctgggcgctctccaccacgacgttttcgaagcccgccagggggcaggaatcgtccaagataccaaagcagaagaagtaggagtaggagcatctctggcagtccagtgcgtgggcgttttagagag

SEQ ID NO: 21246 - DNA, 417 bp, Glycine max
ttctagttgtttgctctgtttcatttgcatgaggttgctcggtttatgattcacaccctccaatgttctgcatcatcttacaggctttttccttggtcgacaatctgattgcatagtctgatcattctgttgcatgtctgatgcacagtctaatcagacttatagcatagtctgatatccttttttgttatgtcttataccttgtttcatatgctattttctaacagtaccacatgaatatatttctggatttggccaatagagatgaattaattgttacaaacaggaagcctgtacacccccattgtcgtgcaattgacaatgatgattctgtaacaaattaagaagagagaaggtacaagtgtccaaggcaggtacacactaacttttagttttaggtttgattcgttccatatg

SEQ ID NO: 21247 - DNA, 1742 bp, Glycine max
  unsure (1)..(1742): unsure at all n locations
cgctgaattcatggatgagttactgtacatttttgtattgcatctctgctaaccaaaaaacgacgcgctgaactgtgccatggcaccgcatgatctccgccgtccgttcaagcgaccagcgatctccgatcaagagcggcgcagggaacagtctctgctccgccaggcacagagtcgccaagacgcccagcgccacgcgcgcttcttggcctccgccgcactctctctcccacccaaaacccccgaaccagaatccgaacccaaacccgaactcgcggaaaccgaagccagttcggattccggctacgagagcctcgacatcgttggagcgtcgacgctttcagctgcggaagctcgcaagtggttcgcgaagcagctcatgcacccggagtggatgatcgacatccccaacaacctcgcccaagactggttcgtcttcgctcgcccttccgggaaacggtgcttcgtcgtttcgtgcaacggaacgacgataagtcgtttgcggaacggtgccattctgcatcggtttccctccgccttgcctagcggggcaaggaagaaggacccctcctactctatactggactgcatctttcacgaggtggatcagacttattacgttattgacatggtttgttggcgggattaccctctgtctgattgcactgcggagtttaggttcttctggttgacctcgaagcttgcagagactggtgcctttgaccctccctcgtattatcacaagtataggttcagtttggttcccgtgtatagttgtgactcgagtggtctctatgctgcgtattcagcaccagtgccttatgtcaaagacggtcttcttttttataacaagcattctcactaccaagcaggaattacgccgttagcattagtttggaaggacgagaactgtagtcaatatgttttggacacagacagtaaaggacaggttccaaaccaacagcaggtggttttggagcttcaagaagatggaaaactgactacctcagatgatcctcctgtggtgtttggctgtttagatggaagctttatacaacagtcagggctgcattcaggatgtcttctacggttttcaattggagagggaggatttgttttgatggatgggaagcttgagaaagccgatctacattatcttggcaaggccaatcgagctcgtgcctctgctgatagtttctctaaggttatgttccaacacagtgttcgacactctcccctcagaattgaaggtctgctggaatctgtcggtttaccagttgatcaagaaagcaaagcttgtgatgttgagatggatggttgacaggaatgcattatgagttgcatctgtttttttatcctgagcgcaatgttaagatttttcaccttaaatttttggttcactaggatgcttatttctgtgaaggctttcataatttatattggggattcagaagattgataactaccacacttgctgaggcagagacttgaaatagtcatacctattgactattgtgatttgtaaacgaaatttcttcaacccagatgggagcaggtgcacatatgcatgttatccttctattgtctggttcatttgatgcctggtagtctaatcgttgtatttgattgagttttattatttcgagccatgtagtgtgtatggtgtagcatatcaattgtacagtctattaaaattttaaagttgaaatcactacatttatggagtataaaaaaaaaanaaa

SEQ ID NO: 21248 - DNA, 601 bp, Glycine max
atctgatggcaattcttcattgggacttaagcttgagttcacttccggcgaccaaagagcatctgtgcttctcacatcccgggcaatgaatcgtttctcaagcaaattcagcaaagtaatcatgacacgtgagcacaagggattatcctctggatgggttataaatgaaggtgtagttgcaatgaatggatacactttaacagaaattcatgcagcgtgctatagatcaaatggcaacgatgaaactgtggcttccccatcagattattttgcacttcttggccatatcacaatcaagacttctgactataagtcagattttcctgtgtcttcttcctggctagttgatggcagctacataaaatggacatcagaccctctgggttcaaagacccttgatcttaaaatttcttggaaactaaaaaatggacagaattttctatttctgaagtacaacgtgtacttggtgaaattatcaaaacaagcagatggtaatccaggtacaacattagaggatgtgaaggagtaccttggagtagcacaagtaaactggttttatgtttctgaccctcgagttccttctgacacttctagtctcaaa

SEQ ID NO: 21249 - DNA, 551 bp, Glycine max
ttggttctgggggttgacacgtcccgtttatcttccacactcagttcccaccgttccacctttccttctcagtcacacacactcacaccgagttgtgtcgagttgtgtcaagtgtgaactcaaaacatctctctcaatctctctccctgtttaggttttgttttggagtggtgttgctatctctatagctccatgaactttttctgacacaacccaacccaagaggaggagggggatgaggaagaagatcgaagaagaacaagatatgttgcttggaaaacgtcctcgggcaccgattatgaaaagaactacaagcatgagtggtggtttggccgtggaaaccaaaacaaccaacgaggaagtagtagtcatgtctgattcgcaacatgatgaggtggccgctaacaacaaactcgtcgatccacatgttgttgttgccatgggaacaccaaataataatgaattcgtgcctgaccacaccaaacatgtttctgaggccaaaggatcatatgtatatgctgatcgtttgatgggcatcaacatgagcatgc

SEQ ID NO: 21250 - DNA, 357 bp, Glycine max
gcagtcacacaaactcacacgatgttgtgtcaagtgtgaactcaaaacatatttctctctttctttgtttcgattttggagtggtgttgctatctctagctccatgaactttttctaacacacaacacaagaagaggaagaaggggaacaagaagatcgaagaagaagaagaagaaagttaagatatgttgcttggaaaacgtcctcgggcaccgattatgaaaagaactacaagcatgagtggtggtttggccgtggaaaccaaaacaagcaaggaggaagaagtactcatgtctgataacatgaaactcgtggatccacatgttaacgttgttgccatgggaacaccaaatgatc

SEQ ID NO: 21251 - DNA, 317 bp, Glycine max
caccaatcaaaacaaaacaaaaacaccgccatctctctctctctctctctctctgtgatcgcttgcggttcatcactgaggcagtaaaaaatgtctgacacagcagaccatgcagcatcagagtattccaatggtgacgaatcccctccaaagcccagacagaggttcagggacagatctaaggcgatgctgtccaaacaagctgtgcagaccaagcaaatgctttccaaacaggccgttaagcttgccaaacaagctgaagaacacgaaaggttcatcaacaaggtgacgcatctcgtgggggtcctcggttttgg

SEQ ID NO: 21252 - DNA, 411 bp, Glycine max
tcattgagagagcagggagttgttcggccttttacaggttctgaggatatatcagaaagttggagttatccaccccttaccgatactgctgatgctgctaaaaaggttcatgaagcacttgctgcccgagggtggaaactgaaggtatagaatgcaatttgaagttgacaatatactttttacaaaattatttgtttgtctaaatgggtagccattttgtttgatgggaagatattgccaatacataatattttattcataccacaaataggaaatatagatggtatgcatgtaaccattttcaccatagcaattttgaatgtgtaatgtaaagtaaagcatatgtttttggcattttcaagaatgaggcaaataaaaaaaatatattgaaaattttccctctattatctt

SEQ ID NO: 21253 - DNA, 469 bp, Glycine max
ctcaggtcggggtagtatttggtgtcggcgcagttgcggaagcgagacaacatccatctgcttctgcaaaagaattgctaggaatccataatttgttgccgttctgccgtcgtacaatgtcagaactactctagcattcccaactctacaaacacatcatcacctttttgcttttgtcttcttctcactaactcagacaactaccatggcctcaaaatccagacccaatctatctgaaaattccaacaaaggatcaattgcaactcctagagtcagtaaaactagcaaactagcatccaagccagaatctgagtcaccatcacctttgcaaaattcacggctttctgtggaacgatcaccacgatctgtgaattcaaagcccactgttgagcggaaatcaccaagaccctctgccaccccacctgataaacaaccccccagagctgcaaagggttccgagttacagaat

SEQ ID NO: 21254 - DNA, 404 bp, Glycine max
gctagaagaaagaatgaaagagagagagagaatagtaactctcgcacactctcacaacaacgcatactatagcgagtttggtaagagttgtttatggcgatttgatcgaaggaggtagtgcattaaaagccaccgtttggaattttaatgtctactatatataacttccgctgagctttaagactcagacacccatatcacgagtatttactgcaaaacgtttcgattcaccggttcacgtcgtttcgggtggctgcaagtagtgttagtatttaatacctcttaccttttccctgtgctgagcagagggttattctttcctcgctgggtttctcattcaagctcgcaacatacttttccacaaatgatggagtggccagcatgtaccgatgagtacgagaaac

SEQ ID NO: 21255 - DNA, 432 bp, Glycine max
caagaagaagagagagagagagagtagtaactctcgcacactctcacaacaacgcatgctatagcgaatgcgcgagcgagcgagcgagtttggtaagagttgtttatggcgattcgatcgaaggagatagtgcattaaaagcctccgtttggaattttagtctactatatataacttccgctgagctttgagactcagacacagcttgacaagtatttactgcatcgtcttttcgattcatcagggcccacgtcgtttggggtagtggcatgcccaatcaggcggttacttagctcttccctgtgctctgagcataggtttattctttcctcgctgggtttctcattcatagctgagcaacatattttttcccacaaagatggagtggccagcatgacggtgagtacgagagctcgtattcgcatgagcacc

SEQ ID NO: 21256 - DNA, 676 bp, Glycine max
  unsure (1)..(676): unsure at all n locations
gataaatcatcatttgccacgcttcatgatctcttccttagtattttcacaaccagagtagatattagcattacaagaacgagaagggtgactactatttactctggttgtgaaaatactaaggaagagatcatgaagcgtgataaatcatgatttgccaacaatagtgctctccctgaatcagattctgccattgcaaatgggataggccctccaaaaggagagagtaattatgaagctgcagagtttgatcctattgtgcatcacaatcaatgttgcccttgggttaatggcaatgttgctgctgctggctgtgctagttctgttccaagcacaagtagtgatgcaattgccctttgtggttggcagctgacgttagatgctttggatgctttgtcgctggggcacaatgcaattccaacagtaccgtctgagtctgctgcatccctgtacaagcagaatgaccagcaagcacctggtcaaaaactctttcacaaccactctatgagccaaagccatggtcactctgagattttgtttcgagtattgggtgtttccatttccttgattatagaggcgtatttgaccaaactatacgtggtatgcttgcatatttcagtttcccttgcttaaagttcagtgagattgtagcagacatgttgctntactcccggct

SEQ ID NO: 21257 - DNA, 545 bp, Glycine max
cctcagcaaagcacttgcttacaaacagctactgaagttgcccgtggtgatgtgggtgtcagtagtacaaactatggggaagaacttttcaatgcagaaactgtgactgctcaggctcgtgatggaatcagtttgggcatcagtggagggagtgttggaatgtgtgctagtcatgaagctgaaatccacggggctgatatatatgtgcacagagctgatagtgttgttggtgaaatggaacagagagtagaagatgctgaaaaccagggacagacaggtgagtctgttccagatccaggtctgatggatgagattatccctgatatgaacagggaagatcctattggtgatagccaggagatgatgtctcactctgcaggaagaacagacagtgggtcaaaaattggctgctctacagaatctgttgaaagtggtgaaaagattagtcaaaactgcaatcttctacctgctaatagtagtcacccttctcgttcttgtaatgctaatatttactctggttgtgaaaatactaaggaagagatcat

SEQ ID NO: 21258 - DNA, 891 bp, Glycine max
  unsure (1)..(891): unsure at all n locations
ctgattgatcacacaagaagtggagaaccacttgttattggattagtgcttcgtagtcatttattggtaattctgcagtcaaaggttgatttccagcatagccctttaccctctgatcctagaggtgggggcagatcaattaggcatgattctggtgaatttgcaaagcctgtttctagtaaaggaatatgtattgatgatatacatctaagttcagatgacttagaaatgtacatcgatcttgctccgtttttgaatccctcaccatatattgtaccagaagatatgtctttgacaaaggtatacaatcttttccgtcaacttggtctacggcatttatttgttgttccccgcccatcacgtgtgcttggtttgataacaagaaaagatttgttgattggggacaaggaaaatgtgaatacgttagagcttcagtcaactagtgtaagaattccgcaacagaataaaagattgatgacaagaaatatagatgtggagcgccctttgctaaacggactgcttcaaaatcagatacctgactaacactgcatgtagcatactcaaagtccttcccgcttccaattttccttgaagatcattctttattatttcttgtatccatgttcaaataggttagataaaccaatcttagggaatggggttgtagacagaacgccctagaattttgtatattagccactaggaaaagagaggaagacttcattataatgatagttgaattcagtgtaatctattaaagatctgaatcttcattccgtttttttgttcgaggtcattgctttcacgtttggaatattatattataaaattcattcaaaaaaaaaanaannannnnnnnnnnaaaagcggccgctctagaggatccnagct

SEQ ID NO: 21259 - DNA, 734 bp, Glycine max
cctcgtgttgttaaggtttcagacgtagtttccattctgcggagcaacaaacacaatggttttccagtatgtataacttttgtattaatcttgacttgagcattattccttgtgttttctaagttgtatttcacaatttactatgcaaggtgattgatcacacaagaagtggagaaccacttgttattggattagtgcttcgtagtcatttattggtaattctgcagtcaaaggttgatttccagcatagccctttaccctctgatcctagaggtgggggcagatcaattaggtaaggtttcttgagatttgagagtttggcattttacatctgtattcagtatttttattaaccccttaacttccaggcatgattttggtgaattcgcaaagcctgtttctagtaaaggaatatgtattgatgatatacatctgagttcagatgacttagaaatgtacattgatcttgctccatttttgaatccctcaccatatattgtaccagaagatatgtctttgacaaaggtgtgccctttaaaatcctctaaacaatttttttcatttctattctccatttttgttgtcagatgatcatgatgccttactgatcacaggtatacaatcttttccgtcaacttggtcttaggcatttatttgttgttcctcgcccatcatgtgtggttggtttgataacaagaaaagatttgttgattgaggacaaagaaaatgtgaat

SEQ ID NO: 21260 - DNA, 351 bp, Glycine max
  unsure (1)..(351): unsure at all n locations
cagaaaccgaaagcatggttttatttaagcaattagcatcactttcaacactcctcaccctattctttcttcaccttctcttagtagattcccaaatccttgaaactccatcaccaccacccgatccaacctcactggtccccaacattttaaacttcatagaccagaggctcgcacaggtcttcccaatcatccaaaccttcaagaacacaataacctcagaccctcgtggagtaacatcaacatgggttggtccaaacatatgcaactacacaggcttctattgcgacaacccaccggacaacctcactggcacaaccatcgnctcgatcgacttcaacggctttcagc

SEQ ID NO: 21261 - DNA, 576 bp, Glycine max
ttcatgcgtccgcggacgcgtgggctttgggaagctgaagaagacacatgaagctacaagggtgtttgagcacctagtgagtttgggtctcaagcctaatgcaaaatcatattctcttcttgttgatgcccacctcattaaccgggatgtcaaatctgctctggcagtgattgatgatatgagagctgctggatatgaaccatcaaaagagatgctaaaaaaggtcagacggcgatgcacacgagaaatggacaatgaaagtgatgccagagtgcaatcactggctaattccttgaattaccaattgggttcagaaaaccgacgggacattctgtttaatcttaattacagtatgggttatgcttgaatggatgcactgtctttgatgttcaaatgaattatttgaactatttggcatatctttttattgcacccatttcctaggaatacctctgtatattagtggatgctgctcaagttggcgggtcaggatgattcaagaacatcttcgcgcagtctttatttttgtatttatgttttatgaagcggggaggatgctgatgatggtattagctt

SEQ ID NO: 21262 - DNA, 272 bp, Glycine max
cccattacagtttcccctgtttgactaaataacctcctttactaccactggaaccgtttataaataatcctctactgtttattccttctggaatataccctctaaactcctcattaagagctcactcatgcctaacctatacaagtggatgaaaacattacatgactaacaattgatgtacaagtctgttctagtcctgtcgcaaattcacaaggcccattgataatgtatatgtctgagactatgtcccacgaaacagaaaaaacaagatc

SEQ ID NO: 21263 - DNA, 359 bp, Glycine max
taaaaacacttcctattttcacaacctaatctaacccttatcaaggagtttaacacagtttgtttggcattgtatacgagttgttgtaattattcttgtacttgagtttaattccggcgaataaaaaaacctaatctaacccttcgctctgctctcgcttcaactattcacaccaagatggaagctgtttgtcttcactgtggcgacagaggctttccagaaacattggttttttgcagccagtgtaaggcttatgcgctgcataggtactgtttaaaggggcctgtgattttcactgatgctgtaacatggttttgtgaggattgggcaacaaagctatgggtgccacctgctcttga

SEQ ID NO: 21264 - DNA, 1218 bp, Glycine max
gtggcgtttctggtggttggttgtgtgggatgcagttctctattgctagtcacggccttcttccttaacaggtactgcaactccaaacgcagaggaagccgcgtccatgactctggccgcttggatgacgatccacaggcacaggatggatctcgtgttcttcagaagcgcttgagccacgccataagcatgggaaatgggagccctttggaggagttctccctggagacactgcttcaagtcaccaacaatttctgtgaggggaagagaattgggcttggtagcttcggtgcagtgtaccattccaccctggaggacggcaaggaggttgctataaaaagagccgaagcctcatcctcaacctacacagttttgggtgggcaagggcaagtggacaaagacaatgcctttgtgaacgagctggaatcactctcaagactccaccacaagaacctggtccggttgttggggttctatgaagacagcaaagaacgcattttggtgtacgattacatggacaatgggagcctgagtgatcatctccacaagctccaaagttcagctctcatgtcatgggcagtgagaatcaaggtggctctagatgctgcaaggggcatagagtacttgcaccaatacgccactccaccaatcattcaccgtgacattaagtctgccaacatattattggatgccaagtggacagcaaaagtgtctgattttggactctctctcatgggccctgaccctgaagatgaggatgcccacctttcacttctggccgctggcactgttggctacatggaccctgaatactataggcttcaacatttgacccccaagagtgacgtctacagctttggggtggttttgcttgagttgctctccggctacaaggccatccataaaaacgagaatggggtgccacgaaatgttgttgattttgtggtgccattcattttccaagatgagattcacagagtgttggacagaagagtggccccacccacgccctttgagatagaggcagtggcctacgtcggttatttggctgctgattgtgttaggcttgaaggtcgagatagaccaactatgtctcaagttgtaaataacttggaaagagcattggctgcatgtttagccaagccaatactctctaggtccccccccgattctatttcttccccatagctcatctttcgctcccctgaatggattctc

SEQ ID NO: 21265 - DNA, 558 bp, Glycine max
attttagcaaatttgtactaccgaaacgtaaattaaaggaaaagaaaaaagaaaaaacaaaagcagagaagaacaaaaaaaaccagaagtttgttttactaaggtccaccatcccctcaaattcaagaaaccgaagctagagaactacgaggaagaggaggaagagcagcaacaactgtaagcacaaacagtcactttcaaacaccaacaactgtgtgtgtctaaactaagagtctgtaattggctggaagtttgatatgatgacaattttcaattcctatccttggaagcccttgataattcataaacatgatggaaaaccttagagtcagataacattgatctttccttgttttggtggatatatggctaatcattctttagttttagataacaacacatctgttagtactgttactgtagcagagcagccgttagtcattgggcatgagtttccagatgtggaaacctgccgaagaacactgaaagatattgccattgctatgcattttgatcttaggatagttaagtcagatcgcagtcgttttatagcaaaat

SEQ ID NO: 21266 - DNA, 387 bp, Glycine max
ctcgaccgaatcggctcgagggaacaaactacactgaagtgcaagctagcaatgtcgacggaagcagcagcaagagaatcattggattcagattccatgaagcccaactacatcctttcccaaaccctaagcgggcacaagcgcgccatctcggccgtgaaattctcctcaaacgggcggctcctggcctcctccgccgccgacaagaccctccgaacgtacggcttcacgaactcggactcggactccgacagcctgacgctgtccccgatgcaggagtacgaggggcacgagcagggcgtgtccgacctggccttctcgtcggactcccggttcctggtctccgcctccgacgacaagaccctccgtctctgggacgtgcccact

SEQ ID NO: 21267 - DNA, 615 bp, Glycine max
agttcctcttctctctcttcttctcctcttatccgcagcctttcaaaccctagaattcctcgaactccgagccttttattaacaatcccatgaggttctaaattttttgaggattttgaggttgcgtgagttcggatttggagttggtggggttgaagagggagggtttgtccgtggtcggtggaattcgagttccgtagtgtttttgttttcttttaaggttgtaattggtcgtgttcgaagatcagggttcggagatcgaaattaacggtgcggttttggatttgagtgtccgaaatgacttctctgagcagagaattggtgtttctcatactccagtttctggaggaagagaaattcaaagaatccgtacacaagcttgagaaagaatctgggttcttttttaacatgaagtactttgaggaaaaagtgcaggctggcgagtgggaagaggttgagaagtacttatcaggatttaccaaagttgatgataatagatactcaatgaaaatattttttgaaatcaggaaacagaaatatctggaagcacttgatcagcaagacaaggcaaaggccgtggagatattagtgggtgatttaaagatgttttccaca

SEQ ID NO: 21268 - DNA, 568 bp, Glycine max
ttcgcgccgcaagttccgagttcttgcactccttggaccaattcctcgttttgacattcattcccagaaaacttttccacacaccaaattccatatataccaaaattccaattttccttcacaaagaacacaacacaaacatgaagactcgcacctctgccaaaatctctgcaacatggattccaattttctctgtcttttccttcattattggtatgctcgtcacaagcaggatgtgggacccaccagaatcaaacgggttgcttcttgcgcagcatcagcgggaccaacaacaactacaagtgatctcaggggattgtgctaccaagaagatgttgcccaaggatgcagtgagcgaattgcagaaaacccatgaagccattcaagctttagataaacaagtttcgatgcttcagatggaactagcagcagctaggagttctcgtgagagtgggatctcggattctaattcttcaaccaccacttctggggaaggtgctccaaagaagaaggcttttatagtgattggcataaacacagctttcagtagcaggaagaggcgtgattc

SEQ ID NO: 21269 - DNA, 408 bp, Glycine max
aagaagttaaaaataaacgtatctgcattgcgttgctagttccgagttcttgcactcgttagaccaattcctcgtcttgacaacttttccacgcacaccttcatcttccaatcctccaccacaaacatgaagactcgtacctcgaccaaaatctctgcaacgtggattccaattttctctgtcttttccttcattattggtatgctcgtcacaagcaggatgtgggacccaccggaatcaaacgggttgcttactgcgcagatcagcgggaccaacaacagctacaagtgatctcaggggattgtgcaaccaagaagatgcagcccaaggatgcagtgagcgaattgcagaaaacccatgaagccattcaagctttagataaacaagtttcgatgcttcagatggaac

SEQ ID NO: 21270 - DNA, 572 bp, Glycine max
tcattttatgggggtcatgcatagggaccttaagcctgaaaatttcttgcttgctaataaggatcctaaggcacctctcaaagccaccgattttggattgtccgtcttcattgaagaaggtatagtgtatagagaaattgttggaagtgcatactatgtagctccggaggtgttaaagcgaaattatggaaaggagatagatgtgtggagcgcaggaatcattttatacatccttctaagtggggtgcctccattttggggcgaaaacgagagaagcatatttgaagctattttgggaggcaagcttgatctggagagcgcaccatggccttcaatttcagctgctgcaaaagatttgatcaggaaaatgttgaataatgaccctaagaaacgcattacagctgccgaagcccttgaacacccgtggatgaaggaaggtggtgaagctctgacaagcctttagacaatgctgttttgactagaatgaaacagttcagagcaatgaacaagatgaagacacttgctttaaaggttatagcagaaaacctttcagaggaagaaataaagggttt

SEQ ID NO: 21271 - DNA, 475 bp, Glycine max
cgtgctaggcatcaaaacacacaccattctcattcattcagccacaacaaaaaagtaactccctttgatttcacactttgctcattttcgttttctgattttcccacataaataaatctctcccttcttcttctcttacactcttctgtttcagcaatcaatcaatttccccactattagggtttttcatttgaaatgtggagagccaacaatggagccccttgaatccgaatcggttagctcctccgccaaggacccgctattgggtgaaccatcttcctctgttcaccccctcgatcatgatcctcaaccctcagatctcaatcacgttaccccggttgatgatgcacttggtgaggagcttcaggggaagttggatttgaaggatgagggtgaaagcgataataaaggttcgaacttggaagacgggggtgaaaaattgagcgaggataaaggttcgaacttggaagatgag

SEQ ID NO: 21272 - DNA, 406 bp, Glycine max
atttttgagcagattcctgttatttatgcgttgccaaaactgttcattgcttcatttacccttgtccttccgtttttccctacgggcacttcagaacgtatggaggatgaaggagatattgccacagcttttactttggccagacttttgtcaaacatacccatttctaggggaggacctaccagtctggtgacatttgacattcatgccttgcaggagagattctactttggtgataacattttaccatgctttgagagtggcataccattgcttaaaagaaggctccaggatcttcctgattctgataacatatcagttgcttttcctgatgatggtgcttggaaacgatttcataagcaactgcagcattttccaacgatagtttgtgcaaaggttcgggaag

SEQ ID NO: 21273 - DNA, 1168 bp, Glycine max
gcttctcttattcccttttctctctccttctactctccccctctttctcattttccggtgacatggagtccaagtggggtggcgcccccgccagcatcatggcggcgaatttcgacgacttcaagtggatcgcctccatgttcgatcccggaaacgacgacgtcaagcccttctccgacgcagctttccaaaaccaggatgcagtaactgcattttcaacttgtggtggagtaacagatgatacccttgttcgttcccaaaacctcactcccattcaatccaccatttctgcaactattgattctcagtcttccttttgtggtaccgttgggagcccagtgtctgctaacaaaccaaacgtgagagataatcaagtaaaaggggtcgccaccactacaagtggttcctcacgtgagccatctgatgaggatgatgaagcaggtccttgtgaacaaagcacaaacgctattgatatgaagcgccttagaaggaaggtttctaatagagagtctgcaaggaggtccaggagaagaaaacaagcccatttggctgacctggagtggcaagttgaacggctgagactggaaaatgcaaacctatttaagcagcttacagatgccagccaacaatttcgtgacgctgatacgaataaccgagtcctaaaatcagatgtcgaagctttgagagctaaggtgaaattagctgaggatatggtcactcgtggcacactcacccctaccaacaaccagattcttcaaaatcagagtccactaaacaccccacctcaactcaacacgaataatttacgccgcatgggatatgtttcgccaaccttcaccgtccatgggaatgatgctactgcttcatatggtggtggaatcacagttagtggacaaaattcaccgcttggtgggcttggaaacttggataatattccttgcagcgatttcaatagtggaatcaatagtaataatgctgtgagctctatgactagcatgtggccttaacgttattcttattgcaccacatgacttgtgttgtagtagtactgtccggttagatccaactttatgcatgtcttggttttattagatttgtggttatattgtggaaaatattatataggtaacaaaaatgtggtatctacgtgtaagaatccatctagaat

SEQ ID NO: 21274 - DNA, 543 bp, Glycine max
  unsure (1)..(543): unsure at all n locations
attcaacccaacatgcagtagatgttccaaccacaaaccaggccacggattctcacgcgccaagtatggaggtgaagtcaccagcattccttgcaagtaaggagccgccaggtgctgtaaaaaatcagacttttaactctgatgaagctaaatctgcgagcacaaatcaaactacaaatgctactgcaactgcaactgcaaccaatgtttcagtgagtgtccctgttcagaatgttccagatctgaacacgagttctaattcttcggtgaaggtggatttggtgaagggtactgttgtgtctaatgataattacaccgcttctctggcgaggaaacagaacaaccgtgaaggatcacgctaaggggaacgatgaatcgatggagtctctgatgaagtgtgatttttttgatggagagtgggttaaggatgatgcatatcctctctataagccagattcttgctctttgattgatgaacagttcaattgtattaggaatctaangcctgataaggattatcagaaatatatgtggaagccaaag

SEQ ID NO: 21275 - DNA, 1233 bp, Glycine max
gtggagttcctgtggaagaggggtattctgtcctgctttggccaaggctgtgaaaacaatgaagaagggagagaaagttctcttgaatgtgaagccacaatatgcatttggtgagagtggaagaccagccttaggagatgaaggtgccgtacctccaaatgcttatcttcaattggatcttgagttggtctcgtggaagaccgtgtctgacattaccaaggatagaaaggttctcaagaagactttgaaggaaggggagggatatgaacgaccaaatgatggagctgtagttcaagtgaaactgattggcaagttgcaagatggaactgttttcgttaagaagggctacgttgatgaacagccatttgagttcaaaattgatgaagagcaagtaattgatggacttgaccaagctgtgaagaacatgaagaaaggggaaattgcattgctgatcatacagcctgaatatgcttttggtccatctgggtcctctcaggaattggctaatgttcctcctaattccactgtgtactacgaagttgagctgctttcctttgtaaaggaaaaggaatcgtgggatctgaatacacaagagaagattgaggcagctgggaagaaaaaggaagaagggaatgccttttttaaggttggcaaatatgaaagggcttcaaagagatatgaaaaggccataaagtttgtcgagtatgattcctcctttagtgatgaggagaaacagcaaactaaggcattgaaaatcacatgcaatctcaacaatgcagcctgtaagttgaagctaaaggactacaaacaggcagagaagatgtgcacaaaggttttagagcttgatagtagaaatgtaaaagcactctatcggagggcacaagggtatctccatcttgtggacttggatctagctgagatggatattaagaaagcccttgagattgagccaaacaacagggatgtgaagatggagtacaaaattttgaagcagaaggtgagagaacacaacaagaaggacgcacagttttacggcagcatatttgcaaaaatgaataaactagaacaagcaagaacagcaacagcaaagcaggagccggtgccaatgactattgacagcaaagcttaaatttaaatttgagagatatctctgtctgtggtcgtctctgcatagtacgatattccaattgttgtgtcgtaagtcttggtaacataaatagctttgctctgtat

SEQ ID NO: 21276 - DNA, 693 bp, Glycine max
ccatcattgacacctgttaaagctcttgctctcctttttctttccacttcttcgctggtttcccctttctctctcttaaatcttctcattcttcttcttcttctccctcccgccacctcacttaccctcttcctaaaccctagcctcgccggaccaccaacaccaccgcgtcaatctgacccaaatctccgcgtccttatccaccaacaactccggtgcaccacctagccagcgccgacaacatctgcggcgtaccaccactacgtcgtcaagatcagcacaaccacacctagcaccgaatccagccaacaacctgcggccccgaactttccgcaaacccaaggcccaccacctccgaccaaacaccgcgcgccctcgtcaccatcaaaactccaccaccatagcccacctcaacccaaacacctaagcgcccacatcaaaaccctcgtgctacccttcaccctcacctcgtttggcatcagaatagcaccgcacgtgccggggtcgagccggacgagggcggcaaagcctccggcgtcgccatgattggagatttctggtttgggggttaggaatttcaaatttgggggttttagagcttgatagtagaaatgtaaaagcactctatcggagggcacaggcatatcttcatcttgtggacttagatctagctgagatggatattaagaaagc

SEQ ID NO: 21277 - DNA, 555 bp, Glycine max
caactttcgcccaacgtgactcctgtgaacgagtcttatgttccaccagagaggccaaagctgcaaggaaacctcagcatcttagatggaaccgaagctggtctaatacaagctagagctgcaattagtgaagcaagaaacggaaatcaaacacaagacaaagactatgttccagttggacctatgtacaacaatgctaatgcatttcacaggagttacttagaaatggagaaacagttcaaagtatttgtctacgaagaaggggaacctccagttttccacaatggaccttgcaaaagcatatactccatggagggaaatttcatccatgctattgagatgaatgaccaattccgaacaagggatcctgagaaagcacatgtgtttttcttaccttttagtgtagcaatgttggtgcaatttgtctatgtacgtgactctccatgactttggccccataaaaaagactgtcacggactatgtcaacgtcatcgcgggaagatatccctattggaaccgaagccttggagctgatcacttttatcttgcttgcca

SEQ ID NO: 21278 - DNA, 630 bp, Glycine max
gttatctaggaaggtgatagacatgcgcgagttgaggagagtcgcttctcaaggaatacccgatgctggtgctttgcgccccaccctctggaagcttctgcttggatatcttccgcccgatcgtgccctttggtcctctgaattagccaaaaagaggtcccagtacaaaaatttcaaagacgacctcctcacgaatccttcagaaatcacgaggaggatgtacaactccaactccaactccgctgctcttggtatcgatgatgcaaaatctcatactcagactaggctcttgcttgctagatcacgtatcactcggcaggaccaccctttgagtcttgtcaagaccagcatatggaatcagttcttccaggacacagagatcatagaccagattgaccgagatgtcaatcgtactcatccagatatacacttcttctctggtgattctctttttgcaaaatctaatcaggaggctgtaaagaccatattaattgtttttgcaaagttgaactcgggtataagatattttcaagggatgaatgaagaattggctcctctcttctatgtggtcaaaaatgaccctgacgaggaaaatgaaacctttgctgaagcaaacacattcttttggtt

SEQ ID NO: 21279 - DNA, 627 bp, Glycine max
cttattaagggttcaatagatatgcttccctaccagtaaaaatcagatgactctcaaaggcttggtatcacttgtcatcaatttaattggcctagctgagggaacaaggaacaatgatgccccccctttaccttgttacatgctatctagccatatacaaaataacaagcaacaatcatctgaatcagcatcagcatccaattttaatgaggatagttggtgttgtgtgtgcttgtcaaggttaaaggccaaagatgaaatccgtgtccttccttgctcgcacaaattccataagatttgtgtaaataaatggcttaagggtcgccacaagacgtgtccactttgccgtttctcaatgggagccgaggagaagtctcatcgtgccgaaatgttcactgaagagatgttaatatggttttcttctttccatgtagctggtatgtaatgatctaagtttcaccagtgaatctatttgtagttttctacaagcagagccttgctttgctttcaagttttgtttaaggcttgtgaatctgatttcgtgcaagctgaaacaaattgttatggcttatcatgcctgctatatatgaatgaaaatgtcgatgttcataaggggaaaaaaaaaaa

SEQ ID NO: 21280 - DNA, 454 bp, Glycine max
agcttagcgcatacaatagagaagatagcgaaaggggatccttcgatcacaccacaacaaaaatgacggactcgtcgggaacgacgctcatggatctgataaccgcggaccctactccggcgccgtcgtcgtcgtcgactgcggccgcatcttcggcgccgacgccaccggcatctctgccctcggcgttaggtaagcctccggcggagaagaaatcgaagagagccgcgctgatgcagatccagaacgataccatttctgctgccaaagctgctttgcatccagttaggaccaatatcatgccgcaaaggcaaaagaaaaagccagtttcctattcacaactcgctagaagtattcacgagctagctgccacttctgatcagaaaagttctcaacggcaattagtgcatcatgtgtttccaaagcttgcagtgtataattctgtggacccttc

SEQ ID NO: 21281 - DNA, 414 bp, Glycine max
ccagctaacacacttaaaacgaccaataatggcgtttgctcacgacttggagttggaatcctcttcttcccctctggtgttctcagtacggaggagtgaaccggagctggtggctccggccaagcccactccccgcgaaattaagatcctatctgagatagattctcaggcgggtcttcgtacccaaattccaatcatacagttctaccgtaacgacccatcattggcaggcaaggacccagttcaagccattcgaaacgctcttgcggaagcacttgttttctactacccgtttgcgggtagaattaaggaagaaggttcggatggaaaactcgtggtggattgtaacgaagagggtgtcatgttcatcggggctgacgctgatgtcacacttgatcagttcggtgatgctct

SEQ ID NO: 21282 - DNA, 839 bp, Glycine max
cggctcgagttcctgttttgaagaaaaagggacctgggaggatgcagtatgcagctgctactttgatgcggggttcatatgatagtgctggaattggcagtaatggttctggtgtcacatcagaacaggtgaacaatctagtctctaatttaaatatgttggaacaagttggaagctctgaaatgaatcgcatattcactcggagccagaagttgaacagtgaggccataatagattttgttaaggctctatgcaagggcttccatggaggaattgaggtctccatctgatccacgtgttttcagccttacaaagattgttgagattgcgcactataatatgaaccgcatcaggcccgtgtggtcaagcatctggcatgttctctctgatttctttgtaactattggctgtttggcaaacctttcaattgcaatttttgcaatggattccttgcgtcagttgtcaatgaaatttctggagcgggaggagttggctaattataattttcaaaatgaatttatgaagcctttcgtcattgttatgcgcaagagtagtgctgttgaaattagagaacttatcattagatgtgtctctcagatggttctatctcgtgtcaacaatgtcaaatcaggatggaagagcatgttcatggtctgatttcaggtattcacaacagcagcttatgatgaccacaaaaacgttgtactcttggcttttgaaattatggagaagattattcgagattactttccatacatcactgagactgaaaccacaaccttcacagactgtgtgaattgcctaattgcattcaccaatagtagattcaataaagagat

SEQ ID NO: 21283 - DNA, 425 bp, Glycine max
  unsure (1)..(425): unsure at all n locations
ccaggagggaggcatcaaaggcgtaacccgcaacccaacccttccccttccctcgaactccatcaccgcatcaccacaccagtcccctgcaccctcaaacaccagatccttccccccaatcccaacgatgaacgatttcgacggcctcttcacctccgatttcggcctcaaaccccagggcaaatccgcgccaatggctcctcaacccaagggatcttccaactccgcatctctcaacttcgatttcggatcgcgatctgcccgcgcctcctccaacttcgacgatctnctcgccggcgccggatccgacaatcgccgctccgattcccccttcgatttggattccatgtacggcggcccccctgctaggtccgccaactcgccgncgacgacggtctacgacaagccggtgtacgacgacgaca

SEQ ID NO: 21284 - DNA, 509 bp, Glycine max
aatccacaaaccattgggaaagaagatacatcaaactaattatctaccatgctttctgctattaattattcccttcttgcaaccattttcttagtgctaaccttaatttttccttcagaaggccaattgagttcaaccttctattctagcacatgctccaatgtgtcttctatagtgaggagtgctgttcagcaggctcttcaatctgattcacgaattggtgcaagcctctctcgcctccactttcatgattgctttgtcaatgggtgtgatgcgtccattttgttagaccaaggtggtaacatcacacaaagtgagaaaaatgctgctcccaacgtcaattccattcgaggctttgatgttgttgataacatcaagagctccctcgaaagttcatgccctggagttgtatcttgtgctgatattcttgctcttgcagcagaatcttctgtcgtccttgtcaggaggtccttcatggaacgtactactcggaagaagggatggtctaa

SEQ ID NO: 21285 - DNA, 561 bp, Glycine max
cattgatcggatccacccttcgaagaattttggaaccggtctcggcttcgccactggatctggaattaggccaattcgggcgcttattgagtcaggatttgatgctgcgaagaggtctgatgtgagactatattatggggccaggaaccttcagagaatggcttatcaggataggtttaaagactgggaatcttccggtgtgaagattgtgcctgtattgtctcaaccagatgagagttggactggggaaagtggctatgttcaggccgcattttcaagagagaagcaaatatctgacccactggcaactggtgctgtactttgtggacagaaacagatgaccgaggaagtgacatcaattcttgttgctgctggagtatccgctgataagatattgaagaacttctgaccaaaatggacttttgggcactgttgtatcattttttgaatttaaaatactccataattatttcattgcctttgctgaggatcaagcatctcagcgtggaatgtacaataaaaaacaattttggaattttagtctatatataagaatttccg

SEQ ID NO: 21286 - DNA, 704 bp, Glycine max
gagcctagccgctccctgccacccgtccgtaagctcggatttcggctcgagctggtcaactgtagggaaggccggaaaaccctcatcaagaatggtttggctaaaaggcttggataaggaaggatttgtgtggtacacaaactatgaaagtcgaaaggcacgtgaattatctgaaaatccacgtgcatcacttcttttttactgggatggtttaaaccggcaggtacgggtggaagggcctgttcagaaagtctctgatgaggaatcagaacagtatttccatagccgccctagaggtagtcagattggagcaatagtcagcaagcagagtactgtagtgccgggtacgcatgttctttatcaggagtacaaagagctggaagaaaaatactctgatgcaagtttaatccctaaacgtaagaactggggtggatataggctaacaccacaacttttcgagttttggcaagggcagtaatctcgcttgcatgacaggttgcaatatactccccatgagatcaatgcacaacggctgtggaaggttgaccggttggctccttgatcgctttttcttctattcagtatctcaacttgtggaaaataagggataataaacttgtttctaaagcctcagcctttctttttctttcgacatattgaattgtgctgagtctagttttatattactggtatcttatattttt

SEQ ID NO: 21287 - DNA, 428 bp, Glycine max
ctcaatactataacacaagaggctgcttctttcaaactcaggcatgggaaggaagaggatgctgctcaactctatgagcagctcgtcaaaagccagggaagcatagaagcactagttggtctggtaacaacagttgctcgcatggatgttgttaaggcagagctttatgaaaagcagctgaaggctctacctggtttaaagggaattgatgtggacagcttggagcgtacttctggagtgaaacaagttgatgctcctcgcgttggtgtccctgaaacatacgaggaaggaaagaataagacaaaatctaagaaaaagagaaagagaaagccaaggtatcctaaagggtttgaccctgcaaatccaggtcctgccccagatccagaaaggtggcttcccaagagggagagatcaacatataggcccaa

SEQ ID NO: 21288 - DNA, 806 bp, Glycine max
atagcatccaagttacatctgttcctatctacataagatatatacgaaggtatgtgaatctggtatcgatcaccagtgtcacaatttggtttggtgcaattgcattcgttttgatgctagcattttgctgttgtacgggttcagatagatggagaaacatagaggtcaaaatgcatggaaaaaacaaacaagttagcagcgagaataatgatcatcattcaatccctcttaaagactatggtaaacctggctcaggccaccatgacgttactgcagcagatgataacaatgatcatcattacatccctcgcaaggattttggtaaacatggctctgcccaatttcatgtcactgatgatcataataggtaccattgcgtccataatagtaattataaggaagatcgtacttgttatggccaacctggcggaggaattaaagttaatcccgggcccgggcattgataatttactcacaagaatcatgccaagcatcctggcgacgaattgaatatatatatatatatatatatatatatatatatttgtgattaatgtttgataattaaatcggtgatttgtatacatatatatgtacgtgtgcgtaggtaagttacgagaaattcttaactgtgttccttccaaggatgcaagaatttctcagtacccatataatcatagaactgagtgtatctcagtatctgtatgtgtcgcctttgatcagtgtatataccaataaaggagtgcttgtagtaattataatcaccacttgttaataaataaagatcgatctgatatagtttaatt

SEQ ID NO: 21289 - DNA, 812 bp, Glycine max
ttcacttgttacttaccaaaaccacttccaaaaagcctaagattaccacatagtcacattcacattgaagttaaacttgcattgaaaatggagggaagagatgaggatgtaagagtaggagccaataggtatggagagaggcaaccaataggaacagctgcacagacacaagatgccaaagactacagagaggcaccaccagctccattgtttgagcctagagagttaacatcatggtctttctacagagcaggcatagcagaatttgtggccactttcttgtttctttatgtcactgttttgactgtgatgggtgttgcaaaatctcccagcaagtgctccactgttggtgtccaaggcattgcttggtcatttggtggaatgatctttgcccttgtctattgtactgctggtatctcagggggtcacattaacccagctgtgacatttgggctgtttttggcacgcaagttatctctcactaggacagtgttctacatgatcatgcagtgcttgggagctatatgtggtgctgctgtggtcaagggattccaatcaaaccaatatgagaggcttggtggtggtgccaacactctcaataaaggatactccaaaggtgatggccttggagcagagattgttggcacatttattcttgtttacactgttttctctgccacagatgccaaacgaaatgctagagactcgcatgttcctattttggcaccattgcctatcggttttgcggtctttctggtgcatttagctacaattcctatcactgggactggcatcaaccctgctagaagttt

SEQ ID NO: 21290 - DNA, 702 bp, Glycine max
tctagttctagatcgcgagccgccgctcgcgatctagaactaggcacacgccagaaaacatggctatatggaccgggatgataacagagtggaatctcacagccgtttcaagtgcaacagattttcagcatcacacagtcagaggcatgaacaggatttaaggactacagaagcaattgattgtagtcagcaggcgatgcttatgacaactccagtagatgctgaaacctgggaaggctgtcctgtgcagtctctagatggggttgaaaccaaaacagctgaaaagcgtaagcgcaaaagccgatgggatcaaccagccgatacaaactcgcattctgatgccgttatgagctctatcggtgaaagccagaacattcccgaggatggtccaccagggttttcatgtccagtaggttcattaaatgcttccctaaactctggtaatcttgccttgcaaaatgcaagccgttctggatgcccctctgatatagttattggtcatccaaaagagaaatttaactctcacttgcctgtctcatatggaatgccatggtctgcccagcaatatggaacacctcatgctgaatttcctgagtgttgggtcactgcacctggcatgcctttcaacccatttcctccactacccccgtatccacgggacaacaaagactgtcaaccttctaatactactaatgctatgat

SEQ ID NO: 21291 - DNA, 714 bp, Glycine max
ctagatcgcgggcggccgcccttttttttttttttttttttttagaagtttaaatcaccagtgggtaaaaatttgagttatgagaaaccacttgacaaaaatatttttggagaagcaaatattccctctacttcattttctcctgctagtacttcacaaaggaactccttgaagcaatccttgtctgctgaagcttccaaccctggacatgcacaaggcagtaaaattggcccttcaagtagcttgatgtcatctctgcagcacatgtcttctgctaaatgattgcaaaatatgctatgaagctttgaagaagattctgtgcattgtttcccctattatttggtcaagaatattcaagtcattattaattcatggagactgcaaatgtgccagaaagttgacaaattgcatagctcctattttgaggccatttagtgttgcttctttcctgaggtgactacaaatgcttgtgcggtataaaacagacttcccaggcttggctcctgtgctgtacatagatgtcaaatttggcacacagcaatattttgtattcatgttttcatgtaacattaatgtgtgtagtagccctgttactccgatatgttacttgatgatgattatcattgtgccatacaataaatggcgacagagtttgttttaaaacttctaaattattttgtcaatattataaagcgcaaatgtattttcagtttc

SEQ ID NO: 21292 - DNA, 539 bp, Glycine max
gctaggtgtctagccttccttggcaaggtctaagggctgttacaaagaaacaaaagtatgataaaatatgccagaagaaattatcaactcctattgaggtactatgcaaatctcatcctgtagagtttgcctcgtacttccattactgccactctttgacatttgatcagcgacctgattatggattcttgaagcgcctatttcgggacctatttgctcgagaaggttatgattttgattatgtatttgattggaccattttgaagtaccagcaatctcaaaagaatgtagtcctccctcctttatctccagtccctggagcaagcagcagtcctgcaacgccaatcgatgttgacagccatcgaggtcttaatgcttattcaggggatgtcacagcagaacgcattaagtcaggcaatgttactggttctggtgttaaaattcagtttaaatcaccagttggcaaaaatttgggctctgaaaagcctctggacaagaatatttttggtgaagcgaatataccctctacctcatactct

SEQ ID NO: 21293 - DNA, 280 bp, Glycine max
cttttgaagtaccagcaatctcaaaagaatgtaatgctccctccattatctccagttccaggagcaagtaacagtcgtgcaattccaatggatattgacaatcatcaaggtcttaattcatattcagggcatgttaaagagcgtattagagctggtgatgctactggttctggtgttaaaattcagtttaaatcaccagtgggtaaaaatttgagttatgagacaccacttgacaaaaatatttgtggagaagcaaatattccctctacttcattttctc

SEQ ID NO: 21294 - DNA, 389 bp, Glycine max
caacaacacttctcttcttctttacacaaactcaacaacactcattcattgtgaaagtttcaaactaacacacacacttaaacaaattaaagaaagaaccattattacttcatcagttttttcttgctcagccaaaatgccgagaaaaggaatgagaagcattttcttcacatcaacgcccacggcatcactaccacctccttcccgtcaacgcactttctcagactcgttaatggacgaaaacatagaaaccgcagagaagctcataaccaaatgggacgattccaaagtcacaacaacaacgcaacttttcagcggcacgcgccaggaagccaaacagtacctaaacgccgtgaagggactacaatccgctatgcaagacctcgtcg

SEQ ID NO: 21295 - DNA, 963 bp, Glycine max
acttgaaagtcgaaattctctgttatgttgtcttggaacctacctctaaaacctcgcttctttgtcccaaacaaacctcgttagtcattactaatacattccctttctctctctcttctccagtttcaatgagatgagcaacaacaacagcaacagcatcctcgtcctcctcaacctgtaccttattattcacacactcttgtcacgcgcgcattagtgtctcaaatctcaattccgtttccccttcctcttctttcggagccacacacacgtacgtacatatatacgttaacacgtacgtaagttttatatagtaaaaagtattaattacgacatatacgacacgaatggcggcggcggcggctgcttttgttatcttcgtcgcgctgttggcggcggtagctggcggatcgccggcgactctgactttggaaagagcgtttccgacgaatcacggggtggagctgagtcagctgagagctcgcgacgagttgaggcatcgcagaatgttgcagtcttcaagcggcgtcgtggatttctccgttcaaggcacctttgatcccttccaagtcgggctctactatacaaaagtgcagttgggtactcctccagtggaatttaatgtgcagattgtcactggtagtgatgttctctgggttagttgcaactcctgcaatggttgtccgcaaacaagtgggctgtcagattcagctcaatttttttgaccctggaagttcatcaacatcttcaatgatcgcttgttctgaccaaaggtgcaataatggaaaacaatcatcagatgccacctgttccagtcagaacaaccagtgctcctacactttccagtatggagatgggagtgggacatcaggctattatgtgtcagatatgatgcatttgaacaccatttttgagggatccatggccacaaattctactgcgcctgtagtttttggatgtagc

SEQ ID NO: 21296 - DNA, 685 bp, Glycine max
atgacgcgtgggtcaacggggatgatgaatgggagcattatattattcttccttccgcgcaaagagtgagagagacatagttggatcattggttcatcactctttgtgaggaaggaagaataattaatggggatgatgaatgtgagcattgcggggttggattcccagatggctgcagagagagctgtggatgtgattggtcaagggtatgacctttgcagcgatataaggttctcggcttgtaaaaacaggttgatcgagattgagaaaacacaaagtagagaccttgtttttcccggtggggttgttgtcaagaatgttcccaactccatcaagtgtgacaagggtgaacgaaccaggtttcactctgatgtgctcccttttaatcagatgtctgagcatttcaacaaacagatatccttgtccggaaagattccatctggccaattcaatatcatgttcaacatgaaaaaatgttggcctacagacgcagcttctactaaaaaccttgcctatgatggatggttcataacattatataatgtcgaattagatagaaccaacataaccctttctgaaagtgtgaaaaaagaagtgccttgctcatggaaccccgcagctcttgctgaaatagtgctctaaacgaaaagtgattcttcaggttcattgaaaaatatggtaccca

SEQ ID NO: 21297 - DNA, 447 bp, Glycine max
cagattcgagcaattgaattgactggggttaagcaggagcatgtggctgtgtgtacgaaaccaaaatccaacccgagtcggaaaagtcaagcgcaagaggccaataaaggaaacggacggagggcacgggcgacacaagttccacatcaaggtggagcggggatgcgggccctatttctggatgggtccggatctagaggtgggaccggcgtcttcttgcctcggggtggtggagctactaccccatccgaatcaaccaacaagcacggtaaaggttgctccactgttcttatacctgccagagtagtccaggctttgcaactccatttcgaccaaatggctgccacgtctgggcccaaagctggtggcttccctcctctccatgatgttctagtgagtaacagggatggcatgtattcacttcagaagcccgagtcacggaaagcg

SEQ ID NO: 21298 - DNA, 419 bp, Glycine max
ccggcctcataactcatttattatcatctcaacaaaataactgcatacatcttccatccaactatatatcaaaacactctatggcgaggtgtgaatccgtttccacgacaatgcccctgaatgcaaaaatattaatagcacttatattccttgcattcgcaatcacggctaccacttcaactcgaatccttgatgaaatagaaacaccagaagaacccaacagtgctgccgaatcccctgttgtctctccacttccacttgttgcagaatccccagttgcggaagtcaaaggagttgaccaacaacatcacacgctctcatttttcatgcacgacattctgggaggctccaaccccacggccagagctgtaacaggcgtggtgacgaatccagctctgaacgctcaagtggcattcgcg

SEQ ID NO: 21299 - DNA, 422 bp, Glycine max
ggtacatatcagtatcaccgacgccggatttgatctaaccggaaagcaatggattaagctggtgcgcagattcctgactgaatggacaggagggccgaatgttgacaccatgagtgcttttgatgtatctggtgtttcgcgtccaagagcagatgtgaacctcttgcaaagtgagactgaaggcattgatgatgagaagattggattttatggaagatgcacgcttcatattattgaacctagatgtctgcccatatatgatcctcttgatgaaattggaagtcaagaagaaaaggaattcacctgtgccagggcagagggttacaagggccgtaggtgggatggttttcagaataatcagtgccaaggtggatgccttgttcctgaggagcagctaaatgcttggattcacattaatgggc

SEQ ID NO: 21300 - DNA, 827 bp, Glycine max
ggtagttcttaagtgaagcaaataaatgatggccattggtctaatgaacatagctggctcttgttcttcatgttatgttacaacgggatccttttctcgatcggctgttaactataatgctggagcacagacaacagtttcaaatataatcatggctgcagctgttctagtgacacttctgtttctcatgcctcttttctactatacaccaaatgttgtcttagcggccattatcatcactgctgtgattggtctaatagattatcaatctgcatacaaattgtggaaggttgacaaacttgatttcttggcctgtttgtgctccttttttggggttctgttcatttcagtgcctttaggccttggtatagcggttatcatatcagtcttcaagatcctgcttcatgtcactcgaccaaacactttggttttggggaatataccaggaacacaaatattccacaacataaaccaatacatagaagctttaagagttccttcatttctcattttggctgttgagtctccaatctattttgctaactcaacttatcttcaagaaaggattctgagatgggttcgagaagaggaagagcatataaaagctaataatggagctccattgaagtgcataattttagacatgacagctgtcacagccatagacacaagtgggcttgacactttatgtgaacttagaaagatgctggagaagcgatcacttgagcttgtgttggcaaatcctgttggaaatgtgatggaaaaattgcataagtcaaatattttggattcttttggattaaaaggagtctatctcacagtgggag

SEQ ID NO: 21301 - DNA, 443 bp, Glycine max
ggctcgagaagacaaggtacagatatacacataacaataatctgataaagcctcctccttccttctgttttgtcatcgtgaatgttcacgttttttcacctacacaaaaacaccatcaaaagctgtatctataataagaaccgagagtaagaaccatcactaactgcatatgcacagagagtgtgtatgagaacataaagcaaagtcattttgtgaaggtgaattgctgaagagatagcagatttttgaaggaagatgaataactctgtttcagaaaacagtttcatcattgagagtgatgaagaagatgaggagaaggatttgaataaaggtggagttgatggaaacgattctgattcttccaattactcaaatgaaaaccctccacagcgaaagcccagttcttacaacatttcatggcctcagagttacaggcaatctat

SEQ ID NO: 21302 - DNA, 395 bp, Glycine max
ttcacatacaccaacaccaccatcaaaagctgtattatttataagaactaagagtaagaaccataactgcatattcacagagagtgtgtgtgagaagtgagaacacaaagcaaaggtgaactgctgaagaggtagcggatttttgaagggagctggtgtttgaaggaagatgaataactctgtttcagaaaacagtttcatcattgagagtgatgaagaagacgaggagaaggatttgaacaaaggtggaggtggtggaaacgattctgattcttccaattactcaaatgaacaccctccacagcgaaagcccagctcttacaacatctcatggcctcagagttacaggcaatctattgatctatatagtagtgtgccatcaccaaacattggat

SEQ ID NO: 21303 - DNA, 357 bp, Glycine max
cacttctcaccatgtccttgatgcccaattctagggttcctcttctcctcttcatctcttccatattcttcacctcttttcccgggttgacgtttggtgcaattgtgtcgctgagatcaattgagatttttaaaacgcacgagcggctgaaagccactacaacggtgtatttcctatgcaaaggggagaacgagacggtgcttccagatgtcaagaaaccccacgccatttatgctttcaatggtcaagaatcttggcagcctttaagcagcttttcaagtaaaaaatgcaagcggtgtggattctatgaggaggacagcattacttcggatgatgcatttgacgaatggggagttt

SEQ ID NO: 21304 - DNA, 881 bp, Glycine max
  unsure (1)..(881): unsure at all n locations
aattctgttattagccattattatttcttcactttcggtgatccgcgtctcaagtcggcagctcgcagagtctcttgatcctggtttcctcaccctagggttagggtttggtccctcttcaattaacttcaatatctgcgagagagcgtgagagtgacgcgcctcccgagagacgccatgggaggtgacagtgccattgaggaatccgaaggggtcaacgtcaacatcaacgttcgctgctccaacggtttcaagttttccgttcagattgccgtcgattccaccgttagttccttcaaggacgttgtcgctcgcaactgcgacatccctgccgaacaacagcgcctcatttacaagggtcgcatcttgaaggatgatcaaaccctacgaagctacggtttggaggcagatcacactgtccatttggttcgtggctctgctcctgccaatccaactggtgggaccaatactagtagcaccgataccaataccaataccatattcccaacagataatgctagagttgctggtgcgaatgaaggtgagggtttgggagggcttggttttggagcttcactattccctgggctaggtgtcaatgggactgggggcaatggtttattcggcgagggatttcctgatcttgaacagatgcagcaaccatgtatttcaaatcccaattgagcgagagaaataatgaattcacccaccatgcagaatctaataaataatcctgaaatagtgcggaatcttataatgaataatccgcaaatgcaagagctcatggagagtanaccggagctagcacacatacttaatgatcccagcactcttcgccagacccttgaagctacaagggatcctgagatcatgcgtgaaat

SEQ ID NO: 21305 - DNA, 408 bp, Glycine max
tcgatttcttctcctacgttgatccgtgcctcaagggggcagctcgcagtcgcagagtctcccattcctggtttcctcaccctcgtgtcgatcgttctagggttagggttaggtccctattcaattcgcttcaatttctgcaagagacgctcctcccgagagacgccatgggaggtgacagtgccgttgaggaatccgaaggggtcaacgtcaacatcaacgttcgctgctccaacggttccaagttttccgttcagattgccgtcgattccaccgtcagttccttctaagatgccgacgcttgcagctgcgacatccctgccgagcaacaacgcctcatatacaagggtcgcatcttgaaggatgatcaaaccctccgaagctactgtttggaggcagatcacactg

SEQ ID NO: 21306 - DNA, 543 bp, Glycine max
tttctgtagttggtctcagtgaggagcaggcaatagagcaaaccaatggggatctgttggtttttacatcaaccttcaatcctatgaaaaataccatctctgggcgacaagaaaaaactgttatgaagcttgttgttgatgctgagacagataaggttctcggagcctcaatgtgtggacctgatgcacctgaaattatgcagggtattgctgttgcgttgaagtgtggagctaccaaggcacagtttgatagcacggtgggaatacacccatcggctgcagaagaatttgtaaccatgcggtcagtgacaaggcgcgtagctggaactggaagtgtcaaacccaagaccaatttgtaaaatgtttaaaacgaaaatacgatctgcttgatggttgtgtaaagatgcaaatgacttcttttggtgaccttcccattatagtatagatcacaaacacatctgtttttctttcccaataaaatgtttgtttcttttttctttgcgaatttcattttatttaaaacagtttgatttgttgccatat

SEQ ID NO: 21307 - DNA, 1072 bp, Glycine max
caccctcgacgtggagtacctccgcggctccatcgccgccgtccactccatcctccaacactcccagtgcccggagaacatcttcttccacttcctcgtctccgaaaccaacctcgaatccctcgtcaaatccaccttcccgcaattgaacttcaaggtctattacttcgatcccgagatcgtccgcaacctgatctccacctgcgtcagacaagccctcgaacaacccctcaactacgccagaaattatctcgctgacctcctcgaaccctgtgtcgaaagagttatatacctagattccgatctggttgtagtcgacgacattgccaagctctggagcaccagcttaggttctagaaccatcggcgcccccgagtactgccacgccaacttcaccaagtacttcaccgcagcgttctggtcggacacgcgcttcgccagcgcgttcgccgggcggaggccgtgctacttcaacacgggcgtgatggtcatagatctggtgcggtggcggaaaatcgggtacagcaagaggatagagaggtggatggagattcagaagaacgatcggatctacgagctgggttctctgcccccgtttctgttggtgttcgcgggacacgtggcgccaattgagcacaggtggaaccagcatgggttgggtggcgataacgtgaaggggagttgccgggacctgcacgctgggcctgtgagtcttttgcattggtccggtagtggcaagccctggactcgattggactccaaacagccctgtccgcttgatgcactttgggctccttatgatttgtacggtcacgctcactgatttgggttgctggtcgccggtaaattccccccttcactgtttttgtcacttctgttcatttaatttaattctcatttcggtcaattttattattattttgttctctcttctccttctctctactatgaacagatacatcagatatttactttacccatttttattagacttcgttacccagtccatcatttgtattctatgatctttctgttttgtgcttcgtgctctagaaataaataagataaaaaa

SEQ ID NO: 21308 - DNA, 785 bp, Glycine max
tctctctccatctctttctcgatatataccgtaaatccaatccaattcccaattttcgaatctaccctttctctctctacgatggagccttcctcgatctctccaccgccagctcccgcctgccaccgccgtccccttccccgccgaacccaacgaccaccttccaccacccattcccgaaccaccttctaaccacccaccctacgccgagatgatatacacggcaatcgaggcgctgaaggagaaagacggttctagcaagagggcaatagcgaagtatattgagcaagtgtatacgcagcttccaccgaatcactcagacttgttgactcagcacttgaatctcttgaagagcagcggattgctccaaatggtcaaaaaatcctacgccctccctagatctgtgcctcttaccggagctgcacccgcacaagcgcatgatgccgccacctctgctctgcagttgacttccccgaggcctagaggccggcctcgcaaggctcaaattccggtccaaaacttacctcaggacattaatgtgcaggttcagcagaatgccgagcccgtctgggccgcgctcggacttgcagatgagcccgtgcagacagaaggcagcagcaagaagcggggccgtccgcagaagagtgtcactcccggagcggtccggcaaagagaggacgtcctcccggttctgggaaaaggttgggccgtcctcccaaggagaagtctgtcactgcaacaacaacaacggatgtctctgggcccaagagacgcccgggccgccc

SEQ ID NO: 21309 - DNA, 531 bp, Glycine max
tctcgagccgaatcggctcgagattcggatacatcttccagagttactctcaagtcttaacacggtggtcttccttgatgaacacattgtggtacaaactgatctttcacctctgtgggacattgacttgaatggaaaagtcaatggagcagtaaaaacatgcagtggagaagataagtttgtgatgtcaaagaggttgaaaagctatttaaacttctcccaccctttaatatcccaaaattttgatcccaatgaatgtgcttgggcttatggtatgaacatttttgaccttgatgcttggaggaagaccaatataagctctacataccattactgggtagagcagaatataaaatcagacctcagtttgtggcagctaggaacattaccccccggattaatagcattccatggtcatgtccacactattgatcctttctggcacatgttgggattgggatatcaggaaaatacaagttttgctgatgctgagactgctggtgtaatccatttcaatggcagggcaaaacc

SEQ ID NO: 21310 - DNA, 372 bp, Glycine max
cgattctgttgtagcacatttcgaatatcacaagcacccaatcacatccattgagtggagtccacatgaagcctcttcattggcagtttcttcatctgataatcagcttacaatatgggacctttctttagaaaaggacgaggaagaggaggctgaatttaaagctaaaactaaagaacaagttaatgctcctgaagatctgcctccccaactattatttattcatcagggacagaaagacctgaaggaactacattggcacacacagattcctggaatgattgtatctaccgctgaagatggattcaacgtccttatgccttcaaatattcagagcacactgccatcgaatggtgctttgtagacgccccc

SEQ ID NO: 21311 - DNA, 691 bp, Glycine max
ctatatcttctatccatccctctcaaacctcctcctatatactacgtagaatccaacacaacactcacgaaaattaagaaaacactgctatattaatatcttcacaacgtaacctttgatctccacaacatggagaaatcgagagaagaaaagcttagccaagtttgggattgtggcagcaccctttatgattcctacgagctcaactccttcaaacgccaattaaacacggcaatagcgaattccccgagcaatagaagaaccctttccatgtctcatttacccgaacgttgtctctcatcactacaatcacagccacagccacccatgtccaacaacaagtctttcaggttctctcgaaccttccagaaactccttcgatttgttttcaagtcccgcaacaaactgaggatctctagcacccgtagtactactagtaacaatattagtactttccaagtggcagagaaatattccaatgaccgtttctacgttgtttatgataagtccgaaccggttctctccacaattcccgaacttccagagtttgaggtgggtgttctttcgccagatatcacttccttcgtcagaaagtcagcgtcggagcggcttatggccaccgctgctatcggtatttcgtgtgcttaacacaattggctcagtctttagatgatgataataattattatca

SEQ ID NO: 21312 - DNA, 963 bp, Glycine max
aacgaaactcttgatcaccataaccatgtcaatggcaacaacatcccctcacaccgccctcttccaaaaccgcaccaaccctttcactctctcctccttcaaacccacatccatcaaatgcgccacccaactccatacccaagccccgcccctcacccactcccaagatcgcgtcttcaacttcgccgccggtcccgccaccctcccggaaaacgtcctcctccgtgcccaatccgagctctacaactggcgcggatccggcatgagcgtcatggaaatgagccaccgcggcaaggagtttctctccataatccaaaaagccgaatcggatctccgcgccctcctccagatcccccctgaatactccgtcctcttcctccagggcggcgccacctcccagttcgccgccgtccccctcaacctctgctcctcccccgactccgccgtcgactacgtcgtcaccggctcctggagcgacaaggccgccaaggaggcgcagaagtactgcaagcccaccgtgatctggtctgggaaacccgaaaagtacacaaagatcccatcttttcacgatttggagcagaacaacaattctgggtatcttcatatctgtgccaatgagaccatccatggggtggagttcaaggactaccctgttcccaagagtggtgttttggttgctgatatgtcctcaaatttctgctccaagcctgtggatgtgtcaaggtttggggttatctatgctggggcccagaagaatgtggggccctctggtgtcaccattgtgatcatcagaaaggacctcattgggaatgcacagggtgtcacacctgtgatgtttgattacaagatccatgatgagaacgattcactctacaacacccctccttgctatgggatttacatgtgtgggttggtgtttgaggacttgttggagcaaggtcggtgggaggaggttgataggag

SEQ ID NO: 21313 - DNA, 375 bp, Glycine max
ctgctctctctaaccttttccccaaaccaacttacactcaaagaaagcttgttctccttctgcctagtaagaagcaacttgttttagaaagaaaagaaaaacagtgtcattgctctttggcacaataagataatagaaaatggaaagcgacaggaattgggagcagaacgcactcatcagtgagctaattcaggggttggaggtagcaagaaagttgaaggaagacttgagttcagcctcttcggttgacgctagggactcacactcactactgcagaggatattgtcatcttatgacaaggctttgctttttctaagatggaatgaatcagtgtccatgcaacaaccaactaaaacttcttcaccacagtcacc

SEQ ID NO: 21314 - DNA, 664 bp, Glycine max
tctgtgtctaacgttccatctcttcacgactctctcgctcgtcccttccaacgttaaccctttctttttctctttcttcattcttcacaccctttgtgccatcttctttgcctcctcattgtcgtaattcatctgaattctcctaaacttttatcttattccttttgtttggatgatcgatcaagggagagtataaaaaaagggagagcatttgaattgacactgggggtgatgaaatacgtgtctgaacattgagaccacttctctgaagtcattttgatcttaattgcgttttttggtggcttcttgaggagattaaaggactcaggtgaaagagtaacgtatctattgtgttgggtgttggtggtgtgtgttttttcaagggtaagcagatccaagacagagagaaaggttcctttcttagaaaaccggggtgcttaatttatgtttgagggtttgtgcttgaaaatggagaaaagagggaatgtgttgatggagaagtatgagtttgggaagctattaggtcaaggaaactttgcgaaggtttaccatgcaagggacgtcagaactggtgagagtgttgccgttaaggtgattgacaaggagaaaattctaaaaattggactagtggatcagacgaagcgagagatatcgattatgagac

SEQ ID NO: 21315 - DNA, 583 bp, Glycine max
tttttgaatttcagtgaaagatgacgcggaattaactcaaactggactcatctttgtatctgacaacgtaggaataccaaagaaactcctttataacaactaagcttacttgctgtttcgagtagcattatgctttttggtctgtgtctaacgttcgatctcttctcttcaaggctctcctcgtcccttcaaacgggagagcatttgaattgacactgggggtgatgaaatacgtgtctgaacattgggaccaccttctctgaagccattttgatcttaaatgcgttttttggtggcttcttgaggagattaaaggactcaggtgaaagagtaacgtatctattgtgttgctaataagcactgaaattgctggtggtgtgttttttttcaaaggtaagcagatccttgagagagaaaggttccttgcttagaaaaccggggtgcttaatttgtgcttgagggtttgtgcttgaaaatggagaaaagagggaatgtgttgatggagaagtatcgagttgggaagctattaggtcaaggaaactttgcgaaggtttaccatgcaagggacgtcagaactggggag

SEQ ID NO: 21316 - DNA, 328 bp, Glycine max
ttatcccacaacaccactccttcctagttcctagtacactatgttgtcactttccaacggacacctgtccactgccgttctgctcaaacccattttccttcatggcttgtccggtttcctaccaccttctgttgctcgtggcggttgtgctgacatgggtttggaggaaaatcacagcaggccccggggatgagtctaagaagaaacccaacaacttcctctccaaaacgaccgatttttcttgtattgctctttccgctttcaatttcctcctctgtttcattaactacttctactggtatacaagtggctggacagaagaaaagct

SEQ ID NO: 21317 - DNA, 361 bp, Glycine max
  unsure (1)..(361): unsure at all n locations
gaaaataacagcaaaaagtagcagctgctgcagctcccccgaagcttatctcagcagcagatactcaaccctgtttgagtagccgaggagaactcccatgggttgaatgataataaacataacctggtgttggtgttgaagcagattctgaatgcggaggaggagttgaagagacgaaatagtatgcaagtagttgcgatgcgtggtccctcggtcccacttcaaggggatggaacaaatgatactggtttgatgattaggcatatgcccccgaggttgggatcccagggaaatcttgttgctgctgatgtggatggtggtgaaggggtatgtttttgttttcttttctnttgcttttttt

SEQ ID NO: 21318 - DNA, 485 bp, Glycine max
tggtgctttcactgtccaatgtgcatcctgcttcaaatggaggttgattccaacaaaggaaaaatatgaagaaatacgtgagcatatccttgaacaaccttttgtttgtcaaaaagctcgtgagtggcgacctcatgtatcttgtgatgatccagaggatatttctcaggatggcagcagggtttgggccattgataagccaaacattgcacagcctccggctggatgggagcgactgctaaggatcagagctgaaggaagctccagatttgcagatatatactatatagcaccatcaggcacgagattgcgctcaatggtagaggtgcagaagctcttgatggagcatcactgagtatacaagagatggggtaactctctcacaggtctcatttcaaattccaaggccattacaagaaaactatgtgaggaagcgcttcgttagacttacctcttgatatgaaagtagcgagcctgctgaacat

SEQ ID NO: 21319 - DNA, 295 bp, Glycine max
tgtatcgcaatcgaagaaatctagattgagcatatagattgagcagcaatgtttatgtctccatttttgcctaaccattgttcatattcaaaagcctctgatgtaatttgcgtttttacactaaacattgctgacaacgactactagaattaggaatgaggaagaggatgacagagtcattttgttctttagttcggtcgcttacatatttttttgctgatcttgctgctgtacagcagcaagttcagcaaattaatgaaaccctctattttgaggggtcttcaaatttttgttt

SEQ ID NO: 21320 - DNA, 393 bp, Glycine max
agcaaattagccatgagtatcatcagaatgggactacttgtgtgctcaagcttgccccttttgagctgctttatggaactttttgttgctgccactgcttctcaaccacacttcaacaccgcgtcgtccgaggaaaataagatgcacaagaagaaagatgtatcaatcactgctaatgtggcagcccaaaagcactttcgacaaattcaacaaatatgttaaggggatcttgaattcaagttttggaggtagtatagtaatgttttgtgataatatttaggagtcatatctaattttctcaattaatgttgttagacttcttaaaattctgggcagaaatttccattaggcataagtttgaccactatatgtaaaccttaattgattggtgtg

SEQ ID NO: 21321 - DNA, 285 bp, Glycine max
ttgtgctcaagcttgcctcttttgagctgctttatggaactttttgttgctgtcactgcttctcaaacacacttcaacacagcaacgtcttccgaagaaaatgagttgcccaagaagaaagaagatgtatcaatcactgctaatgtggcatcccaaaagcactttcgacaaattcaacatatatgttaagggggtcttggattaaagttttggaggtagtaaaatgttctgataatgttgttagactttttaaaattttgggtagaaatttccgttagccataag

SEQ ID NO: 21322 - DNA, 370 bp, Glycine max
accaaccacactcatagaactacagcaaagtgactcaccaattcacacacataataaacccactgctcttctctctacccctccgaaacccgacccgaaaatgcgatccaaatcggatcccccggtgccccctccctcctcctccggcggaagcgactcctcctccggcgcatccatcgatccgatcttccacctcctccgcgtcctccccttcagcttcctccgcccccctcgccttcggcttaagctttccttctttaccctacccttcccgaacgccgactttgccctcctccttcctacctactttatgggcgggttcgggattgtttacgacatcattggcgagccccccggcattggcttcact

SEQ ID NO: 21323 - DNA, 511 bp, Glycine max
ggaactcctggagctgtttcctggaaagagatctcaggtactggctcttttaggaattggtcaaatagctatgagagggaacttcccccaaaacctaatcaggtcaagaaagggaaaacacgccggtggagcctacaatctcccacacaacaaaaccagatggagtattctcataataagttacccatgtatgctgctgcattcatgcttcctgccatggagggatatgataaaaaaaggcaaggtgttgacttgcttggaagagattttattgtcttggggaaactcatttatatgcttggggtctgtatgaaatctgtagccatgcatccagaagcttctatgctggctccttccctcctaaatatgttaagatccagggaggtatgccatcaccaggaagcatatgtgagaagagccgtgctttttgcagctgcatgtgtattggttgcccttcatcctacttacatttcatccaccttactcgaaggaaatgctgaaatttcgactg

SEQ ID NO: 21324 - DNA, 439 bp, Glycine max
agagctatgacgttcgcatgcacgcgtcacgtaagtctcggaattcggttcgaagctctctctctctcttttgatcatacgatttcgttttgcctaatctaaggcacaaattcaaacaaacaaggtcactcctcattcattcattcctcttttctttttctctgtcaagtgctgtctatcactcgttgttgatttcattccaacaacgtcaatttcacatttccttgtcttgttgtgatcactctttagtatttagcatacctgcaaagttgtactctttttttttccttccctttgttttgagctctcagattactcagcaatcacaatctctgttgtatcaggttttttcgatttggctgtgaccccttatgaatcagtgttttgtttgttttgaattgaaaatgcaatgagaaaagcgcccctgaccaaatggaaa

SEQ ID NO: 21325 - DNA, 542 bp, Glycine max
tctcaattctccttcgtacactctacacaacatcaacaacagtaacaacacaacgagtttgaggcaaggcttgggaatcatactcactaatactactattctaatgcaccccttttgaactttgataccctttcttctgaaatcttaatctcatagatgattggcgcagaatttacatgtactagggcatgaaaaccttcgagcttctttgttccgaggcggccatttccattgctccaacattgctgatcggtgagagaattgaccgatgaatcagaatcaattggacttaagagctcatcattctggatcaacacaatcagaggagtcggctctggaccttgaaaggagctactatggtcatcctaacccctccagtccttcacccttgcaaccttttgcaggaggtgctcagcattctgagagcaacgctgcctatttttcttggcctacattgagccgctggaacgatgcagcagaagatagagccaactattttgggaaccttcaaaagggtgtgctccctgaaactttgggtcgat

SEQ ID NO: 21326 - DNA, 567 bp, Glycine max
tcgtttcgcgtgggaactaattaacctttcttcttagttctcatggctaggcaatcatcctcatcttcctttagttacagattcaccaacgatgtgttcctcagcttccgagggaaagatactcgtcacagttttaccggcaatctctataaagcactctctgaaagaggaattaacaccttcatcgatgacaagaagctccctagaggggacgaaatcacgtcagcacttgagaaggcaattgaagagtccagaatattcatcatcgtgctctctgaaaactatgcatggtcctccttctgcttaaacgaacttgattacatccttaagtttattaaggggaagggcctattggttttgccagttttttataaggttgatccttctgatgtgagaaaccacacaggtagttttggagagtcatcggcttatcatgaaaagacgttcaaaagtactaataacatggagaagctggaaacatggaagatggctctgaaccaagtggctaatttatctggttaccatcatttcaaacatggggaagaatacgaatatcaatttattcag

SEQ ID NO: 21327 - DNA, 455 bp, Glycine max
gaaaaattggccatcagtggaataatattttgaacactggggtcaggatcatcaacctagctagctagtgtatacaacaacaatatgaggaagcccgaggtttctggaaaaaacaacaacattaataacaagcttagaaaggggttgtggtcacctgaagaagatgacaagctcatgaactacatgctaaacagtggacaaggttgttggagcgatgtagccagaaatgcgggccttcaaaggtgtggcaaaagttgtcgccttcgatggatcaactacttgaggcctgatcttaaacgaggtgcattctcacaacaagaagaggaactcatcatccacttgcattcccttctcggaaacagatggtctcaaatagcggcgcgcttaccagggagaacagacaatgaaattaagaatttttggaattcaacaataaagaaaagactcaagaacat

SEQ ID NO: 21328 - DNA, 534 bp, Glycine max
ggtgattctccacaaccacagggctcaggtgatgaagcaccctcccttggatcgcatggtgggcgagtttttcgagcgtaatgtgaaggcgcttgatgtgtgcaacgcaatccgtgatggggttgaacagattaggcagtggcagaagctgttggagattgttctctgcgctttggatcaaaagaggagcattggtgagggccaatttcgccgcgccaagaaggcgctggtcgatttggccattgggatgcttgatgacaaggacaccagcttcagtggctctatagcacataggaacaggtcatttggtagaaacaatgcttcaaaggatcatcaccacaataatccctttggtcattttagatcactttcttggagtgtgtcaaggaattggtctgctgctaggcagcttcaagcacttgggaacaacttgtcccctcccaaggccactgatattgttgccaccaatggccttgcattgcctatttttacaatgagttatgttatggtgtttgtgatgtgggcacttgtggc

SEQ ID NO: 21329 - DNA, 393 bp, Glycine max
gagataaaactcggagagaaagggtactagtacgtacctgcaggctgcagcaacctcgaagctagttcaaactagtgggaggttgtgtgcatagaagcacaaacaaattacagaaaaagtcatcatcatactcagaattaatacaaattaagcattgatcttgaattaatggctcgcggaaaggttcagctgaagcgaattgagaaccctgtgcacaggcaagttaccttctgcaagcgccgagctgggcttcttaagaaggctaaggagctctctgtgctgtgcgatgctgaaattggccttttcattttctccgcccatggaaagctctatgaactagccaccaaaggaaccatgcaagggctcattgagaggtacatgaagttcacacga

SEQ ID NO: 21330 - DNA, 1338 bp, Glycine max
ctctgctctattttggaacgtctcactccccgagatgctgctcgcgtctcttgcgttagcagtgtgatgtacatactgtgcaatgaagatccactgtggatgagtctatgcctaaaaggagcatctggtttccttcaatacaaaggctcttggaagaaaactgccctgcataatgagaatctgctagacaaatacaaagagtacagtcaaggacctttacattttgacgggttcaactctttatttttgtacaggagattataccgctgccataccacattggatgcattttatgcagatactggaaatgtgaaaagaataaaagacatcccgctgaaggacttttataatgagtatgatgcaaagaaaccggttatgctcactggattggctgatacatggcctgccaggcataaatggacaactgatcagctgttgctaaactatggagatgtagcatttaaaatttctcaaaggagttcccggaagatctccatgaagttaaaggattatgtctcttatatgaaagttcagcatgatgaagatcccttgtatatttttgatgaaaagtttggtgaagctgtacctagcttattgaaggattattgtgtgcctcatctttttcaagaagacttctttgatatcttagatacagaaaaacgaccatcctataggtggctcataattggaccagagagatctggtgcctcttggcatgttgatccagctcttaccagtgcatggaatactcttctttgtggccgtaaaagatgggcattatatcctccaggaaaagtgcctttgggtgtgacagtgcatgtcaatgaagaagatggtgatgtcaatgttgagactccatcatcacttcagtggtggctagacttttatcctcttcttgctgatgaagacaagccaattgagtgtacacaactacctggagaaacaatttatgttccaagtggatggtggcactgtgtgctaaatttggaaacaactattgctgtcacgcagaattttgtgaattccaacaactttgaatatgtatgtttggatatggcacctggttattgtcataaaggagtttgccgtgttgggttacttgctcttgatgaagttagttatgaaaatgtcagacagaatgtgtcatgtaatgaaacggactcaagttactctgctttgtcaaggaaagagaaaagagccaaaactcagaaagatgtagatgatctatattacaaaagagccatggatggtgtatctagaaactacaatttatggaaagatggattttcctatgatataagttcttatccatgtttttggatagagacagagaccata

SEQ ID NO: 21331 - DNA, 304 bp, Glycine max
  unsure (1)..(304): unsure at all n locations
nnnnnnnnnnnnnnnnnnnnnnnnnnnnnnnggctaaccattttcaaagggattgaatttctataccaccttatgttttcacataccaacaagggttctctacatttccacatgccccataagatcaaacgggatacaacttggtttcaaggggcccaaaacctcataacactaggccaactaaacctatgaaaattagatttccctaaaatacagacgatgatgcaacagcgcaacaaaaaaaaggacagactgggggcgggctcaagacctctcgatcatgctgcaagaacgtgccaaccga

SEQ ID NO: 21332 - DNA, 335 bp, Glycine max
  unsure (1)..(335): unsure at all n locations
aaaaaagggggcccccccctttttttttttttttttttttttttttttttttttttttgtttgttttttttttttatataagtagagaaagtagcagcctccgataagggaaaataacgagggaagggaagggaaagaaaagaaagtatgtgaatacgtaggcggtatgattgtctcaattttttgcgacatagaggaaccaccaccggtttcatcctgttgtttcttaaatcacgaaatggttatcgggtttttctttcgttttaattgattatgtactgcggngtaatgtttttggtttgcaaccataatttggttcaaagaaattaacacgg

SEQ ID NO: 21333 - DNA, 466 bp, Glycine max
tttcatttctctttttccaaacatggaaagcaaagccatctgtttctgcatcagagtgcgcaaaagcaagagcaaggaaagcaaagtgaaagatttagagaaactctcccatgtcaagcctaatcacaagggaaaaaccaaagggtgtacttcaacaactcctgttggtgatggtggtggcatcaatgttcatggagccaacacagttgctaacaatgatgtaggagtagctgctgctgagatgactgcagctcatacctctttgatgagtgccaatggagttcaagatggaagtggtcatggtcatgggggtgaatctggggcagatggtgatgttggctgaaatttcatactaaaatatttttgtgaagcagaaaacttagatgcagttctttaaatgtttttggatgtttttggtattgttattgaattataattgttgatctttaatgcaaacatttgtaac

SEQ ID NO: 21334 - DNA, 446 bp, Glycine max
gtttaacaacttacaatgccaaaacgaagctttcccaacaaatcatccaaagcttcctctttctttgttaaaatccaataatcttgacgtgaacccttctcatcccaaaataaaacccccaaaacccgaaccctatttaccataacttcacacattcactactatctaatggcacctctcacttatctcttcttcccacttttcctcctctttgccttaacacactcccgaagcacaccacactcctccaaaacgacactcctcgacgtcgtttcctccctccaaaacgcacacaatgccgttgccttcaccccccatcaccttaaccaacaccaacgacaacaagaagccttgcttctatcgtcgtcgtttggtattcacttacgttcccgagcctcaattcagaaaccctcccacagagactacaaattgcataacttatctcg

SEQ ID NO: 21335 - DNA, 472 bp, Glycine max
gaaagcttcaaggatcaagcttttatttgtcccggttctcatcgctcaatcatctggcctgtagacgatacaagttcgagaagcaagcaaagttggtagccactgctaggttggttcaattgacaaaagctagaagttgcagtatgggttcctacccacctgttgtaaattgagccctagggtacaaaatcaaggtcatggatggatgtccgtgtcatggaatgtcagtgctggctatttttctcattattttttacatattttttttactcattgtccctaggttattgttttttttttttcaatttatatatttttaaatcaagaggacaagggtttttttttttttcctgtgatggtgagatatataaatcagaaatctttcttgggggtccatgtatcataggggttgtgtagttcccatccatgctctgtacaactaatttttgtgtgaatcaacatattctgacag

SEQ ID NO: 21336 - DNA, 565 bp, Glycine max
cccattttctctcattcatctccatctcaaagggccaaaacaaaaactgtcttatataaagagaggtatttcattgtattattgttgtgattagtgataatgcaaaacgggattaaccggcaactatccctgaaggagaaactgaaatcttcgctatgctgtttctccggatccgttcacagcgacccattagagcgcggagaaggagggttctacagcaagctacgcataccaaaaacaccgatttctccacaggggtccacgtcatcaccgtcgtggttcaagataaggtcaccgacgtgcaccgagtacggcggtgacccgcatccacgtgtcagggggcggagcctgaagtcgaggatgggccgcaagctcctccaccaccgccaatcccagtccgctgacttcagctacgacccttcgagctacgcgctcaatttcgaggacgacagccccgaggagattccgttcaggaacttcagctcgcggttgccgccgtcgcctccgtcgtcaacgccgccggtggagtactccaccgggaaggagattgttgggtatagttgat

SEQ ID NO: 21337 - DNA, 545 bp, Glycine max
cggctcgagcggctcgagcggctcgaggccaaaggagagtaggcagtcacaattataccctttggctcccaaaggagagtaggcagtcacaattataccctttgggagccaaagggagcaaatgggatatcaatcaaattttggacaatgaattgaccaagcagattgcacaggctcatggcaaaactgcagctcaggtatgtcttagatggttatttgagcaaggtgtgactttcataccaaagagctacaataaagagagattaaaggaaaatttagagatatttgattggtcactcaccaaagatgaccatgaaaagattaatcaagtcaaacaggagcgtatgttcaagtacggaacagcagcattcccgcttcctgatctatttgatggggaaacttagtaatacattatcagcttcaatattccattttccttgggatttaggtttctcgtgtctgtgacacaataaaaggatgaagtgtaatctgtctttagaatacccttaaagaaactcaaaattgaaatcactggtttcactttt

SEQ ID NO: 21338 - DNA, 363 bp, Glycine max
tattgcctacattttctatatacttttgaattggctgctcccttttcaccccctctcccctcaaaaaatctaaagacacaaaacaccctcctatactctataatggtttcttctaagatcttcttcctttttctcctctttctagcacaccttcatcaacatgcatctgtggaaggagattccagtttgataaagagaacttgcaagaacaccaagtactacaatctatgcttctcttccctcaaatctgatccaagcagtccaaacgcagatcctaagggcctagctgtgatcatgattggaataggaatgaccaatgccacttccacatcctcctacttgtcttcaaagttgcctaccccc

SEQ ID NO: 21339 - DNA, 416 bp, Glycine max
gtttttcactccggcgtcgttttgatcagcttcttggggggtggtaagaatctgccctctttgtctctctctctctttttgagctttttgtcattggttcagatttagacccatttgtgatttgttccgcttttagaaatcttaggcttctgagatgaggaaatggagattgaatctttttcttaaaaagatcgtagcttcttgttaaagtttgttgttattggagacctgggcaagagtgtgtaatctaatcattaccctaggtagcctaattgtacaaaaatggcagtgtttttgtgacatttgtaggttcttaggggtttgattctttgtttcaagcttaatttgttttgcattcattctcttgttcgatatcaatagtgaaaatgtcatctgccggtgtctctactctaagt

SEQ ID NO: 21340 - DNA, 645 bp, Glycine max
cccacgcgtccgcggacgcgtgggctcaaacaactattctcccatttttttgcagtgggttgattgtgtttcgcaattattacggatgtatccttttgcttttgaggtttctgcggctttcctggtggacttcgtagactgcatgctttcttgtcgttttggaaacttcttatgtaacagtgagaaggagaggcagcaattcaatgttttcgaggcatgtggatgtctgtgggtatacttggctgatttgcggacatcagaaggaggttcccatgtgcatcacaatcctttttatgatccaccaaagcataatggtcctcttctgcccccagcagcagcattagcccctactttgtggccccaattccaccttcgttgggcatgtccagaagaagctcaagctggggagattgaagcacaatgcaggaagatagttatgaaatatgctgagatgcagaaggctaaagaaatggcagaaaggaaagctaaagaagttacaaattccatggagtcgttgaatgctgaattacgacgtgagaagcagctaaacagctcagctatgaacatggccaagagtatgagcaaagaaaatatggccataaagcgtgcaattcagtcaatggggtgcaaggttcatgtctctgg

SEQ ID NO: 21341 - DNA, 480 bp, Glycine max
ccgtcactggttttgaaacctttatgtcaagtttgaaaaataagtcacttcgcccaaataaacaagggagtggcgtggatctggttttaagttgtgtggataattatgaagcaagaatggctgttaaccaggcttgtaatgaattgagccaaacatggatggaatcaggtgtttctgaggatgctgtttctggccatattcaattacttattcctggagaaactgcctgttttgcgtgtgcacctcctcttgttgttgcatctggggtagatgaacgtacgctcaagcgggaaggggtttgtgctgcatctttacccaccactatgggggttgttgctggccttctagtccaaaacactctaaaattattgctaggctttggacaagtctccccgtatttgggatataattctcttaaggattttttcccaactatgcaaatgaagccaaaccctcaatgttcaaatgtagcttgtttgg

SEQ ID NO: 21342 - DNA, 400 bp, Glycine max
aaagaggagaaggtatagactatagagagagagagagagagagatctgatccggagcgatgagtgagagtgagaagcagagggtaacggggaaggtgaagtggttcgatgaccagaagggttttggcttcataaccaccgacgacagcggcgaggaattcttcgtccaccagtcctccatccgatccgacggcttccgcagcctcgccctcggcgagtccgtcgagttccttattgactccgatcccgaaggccgcaccaaggccgtcgacgtcaccggccctgacgaatcgccagtccagggcacccgcggtggcggaggaggaggaagaggaagctatggtggaggtggcggaagaggtggctatggtggtggcggacgcggcggaagaggtggatat

SEQ ID NO: 21343 - DNA, 463 bp, Glycine max
ctttctccttttcctcgtgttcacaaaatcacgctgcttaattattccttcaactaccatcatatcataccttctcaacagaaaaataaaaataaaaatgagatacatccttggagaacacaacattctgttcctcaaaagcttcgccttcacgatattattccttagttgcatagccattcggcttaacttgtgtctttccagcatcccttcttcactgaaatcaattccccttgaagggcatttaaaatttgatcaagttagcctaagccatgcagcaagggactttggcaacaggtaccaatataatccaatggcagtgctgcaaccagaatcagtttctgatattgtagccaccataaggcatatctggctgatgggtcctggctcccacctcaccattgcagcgaggggccacggccactcgctgcagggtcaggctcaagcccatggaggacttgtg

SEQ ID NO: 21344 - DNA, 265 bp, Glycine max
ggactttgaaaagagagtcaaagagtgcttgtttgataagactgttgtgtgatgtgtctttaggcagatatgaatttgtgtgacgggtattgcatggagttttaccagcatgtatggtacaatttaaaattggagaattaattgtttatttttcaatagttctctcagcaagctgacaaaaaataagtgattatttctccataataaactgaaccagtcacgtaacctttatgtcatggcagtttctaattctatagtgtgtaat

SEQ ID NO: 21345 - DNA, 391 bp, Glycine max
tcttccgcttgaatatctcaaagtttagatctaagaacgaacactattactactcagaggcacacgcagagcccagaaaagaagctctttctctctaacaacaatgcctcccactgacggagacttggatcttaggccaccttctcaatcttccttcacagccggcgactacacgttcgccgatgcggacaatttggagcattgcgctaagtatctcaaccaatcgctcgtcacgtttggtttcccggcttcgctcgatctcttcgcaaatgaccccgtttcaattgcgaggacttgcaattgcatttacttcttgctccagcagagacagcgcgacgtggagtttagagagtctgctaatgatcaaagacaacgactgttgtcctgacat

SEQ ID NO: 21346 - DNA, 993 bp, Glycine max
gtatatactcactaattggacaacccttctcctacctccatggctaatttcataactttcttcattcccctagccctaaccctccttttctcctccctcgtcactgccagttaccatcaaagcatctctccaagccttctacgttctcgtgagaagctcacgcaccttcgcttctatttccatgaaatttttactagcgacaaaccctctaatctcgtgatcgacccccccaaggtggtagccgactctccccttccatttgggtcccaagtggtgatcgaggacccattaacaattgggcctgatgtcgagtccaaacagataggtaaggcccaagggttttacctatccgcaacccaaaggcccggtttggagttggagatagtcatggggatggccttgaccttcttagaaggcgaattcaacggtagcagtttaagtgtattggggagaaacaaaatcttcaatgaggtaagggagttgccaattattggtggcacgggtgagtttcgcttcgcacgtggctatatccttgctaggactgtcaaggtcgattaccataaaggggatgctaccgtcgaattcaatgcatatgtctaccattattcttccaccagctcttcttcctcccccctccccctcaatcagggacttcatttatgtcatggagactactaagcttataataaactcagaaaagaaattagactacagaaggtgggggcataaatccaaagaccaagttgctaatttactcctctgaatctgtccagtactataaataaatttgctcttttcgtacacggaattaagtctttgttgtagtgcaagttgcgtcagctaaataatgtgccactcaaatattttttcttttggaaatgttgcccgttgattattatttgtattgtgcaattgaaaagatagagagaaagtggcccggagttgaaaacttgatatcattacaatgtgtaccaaaaatgtgaaagttggact

SEQ ID NO: 21347 - DNA, 924 bp, Glycine max
  unsure (1)..(924): unsure at all n locations
acgtccaaggcacccgtccgtaagctcggattccggctcaagctcgcctttgttggctttcgggtccacttcattgaaagagaccggagtgagcctgagcgatttgttgtanagttgcttcaacccggtggctatctcaaattaattgagctcggacttgaagattgtgtggacaaaattgatgctcagcaagtgtttggttatgcccttttcaaggatgggaaacatactcgtctctcttaccccttggagaagtttcactcggatgtctctggcagaagctttcacaatgggcgctttattcagaggttgcgggagaaagctgcctcacttgccaatgttcgattggagcaaggaacagtcacttccctggttgaagagaagggaacaattaaaggtgtgcaatataagaacaaagatggccaggagttgacaacatatgctcctcttaccattgtttgtgatggttgcttctcaaacttacgccgttctctttgtaatcctaaggtggatattccctcatgttttgttggtttagttttagagaactgtgaacttccatgtgcaaatcatggccatgtcatactgggagacccttcgccgattctattctaccctataagcagtacagagattcgctgtctggtcgatgtacctggacagaaggttccttctatttcaaacggtgaaatgggaaagtacttgaagacaacggtggctccacagattcccccccagctttatgatgccttcattgctgctgttgacaaaggcaacataaggacaatgccaaacagaagcatgccggcagatcctcatcctacacccggagcccttctgatgggagatgcattcaacatgcgacatccactaactgggggaggaatgactgtagcattgtctgaattgtggtgctgagaaatc

SEQ ID NO: 21348 - DNA, 411 bp, Glycine max
tgcacgcgtgcgtaagctcggatttcggctcgagttttaaagtcagctgcagctcctggccagccttcagggcaagtgttgcatggtgctgctggtgggatgtctccacaagttcaagcacgtactcaacaattaccagggtctactctggatattaagggtgagattagtcctgttttaaatcccagagctgctggtcctgaaggatcattgatgggaatgcctggatcaaatcaaggttgcaataatttgactttgaaagggtggcctctcacaggtttggagcaactgcgctctggtctactccagcaacaaaaacctttcatgcaggctccttaaccttttcatcaactccaaatgttgacaccacagcatcagcaacagcttatgctggcgcaacaaaatctggca

SEQ ID NO: 21349 - DNA, 368 bp, Glycine max
caagaaattttaaataaagcactgactgggctgctagaatcattagactgtgccactgtggtatccataaatttgtgaaaaaaggttgatttgctagtttagagcaataaggtaacgcaaaggggaagtctaactcaagtttctttggctctaaagtttgactctttcctatgaataataataaaaaaaaatcaagcaataaggatgcgattagatctgttgctttgttagttgttttttttatcgatttgatgttgtaaccatgttttcacctatgtttttttctcgctatcctccaattctagttctttcttaagtttattaaattttccttttcctttaattaataatttttattatttttattt

SEQ ID NO: 21350 - DNA, 406 bp, Glycine max
ctcgagcttcctaatatgcagcaggacttgccggtcaaaatcaaatggcatttgggatgggttcaccctttccacagagtcagccacctatgtttgctgcacagcagggttttccatccaccgaattgcattcccaaagaaacctgaattttcattctaatactatatctggcgcccgatctcaatttcatccgcgttcaaatgctaatcgtgggagaaaaacatttcatggtgcaggtaggaaagggtggcgtccacccaagtgaaggttgttattatttattgtgtgctctactgcacactgaactaaatttcttgtgttgggccattttgctaggaatgtactacacctgtaaatttcctgtaagtctctcttgaattttgaaatgaattcggttagttcctg

SEQ ID NO: 21351 - DNA, 522 bp, Glycine max
cggaatcggctcgactcttctgtcctttctctttcttttttttttcttctctcagtattcaccatctcttccaaaaatgaagttccaagattatgagcctccctctagcccaaaacacatgatcccaaaagtgaccttactagcaatcttggtcatactaatatttgccgtaacccctttatggtaccctttgttgagttactcttcacacttgaacatcaataagaatattccatcatcatcttcatcatatgatcaaaggcaagaagaaaacttgccctcaacatatgtggagaagtgtgacattttcagtggggagtgggtgccaaatccaaaggcaccatactacacaaacaagacatgttgggcaattcatgagcaccaaaattgcatcaagtatgggaggcctgactctgagttcatgaagtggaggtggaagccaagtgagtgtgagcttcccatattcaacccttttcaattccttgaaatagttaagggaaaatccatggcttttgttggtga

SEQ ID NO: 21352 - DNA, 383 bp, Glycine max
ccaaaaactaattaaactggaagagctgcctctattggaatttgaaatgctagcaactgctacaaataactttcacttggccaatatgcttggcaagggaggttttggtccggtatacaaggggcaattggataacggacaagaaattgccgtgaaaagactttcaaaagcatctggacaaggattggaagaatttatgaatgaagttgttgtgatttctaaacttcaacatcgcaatcttgtgagacttcttggttgttgtatagaacgagacgaacagatgttggtatatgagtttatgccaaataaaagtttggattcgtttctctttgatccactccaaaggaaaatactagattggaaaaaacgcttcaacataattg

SEQ ID NO: 21353 - DNA, 857 bp, Glycine max
ggccaaaccacaaacgtgcttctcaaaaccaagccatattttcccaatgccacattccaaatgtctgctaggccttatttcacaggccgtggcacttttgacaactccacaactgcaggtaccctaatctacaagcaacccttgaaaaattccagtgtaaaaaatctcacccttctcaaaccaactttgccaccaataaatgccacaagctttgtggcaaacttcacagcaaaattcagaagcttggctagtgccaaattccctgccaaggtacctcaaaaagtggacagaaaatttttcttcactgtggggctagggactagtccttgccccaaaaacacaacatgccaagggccaagtaataacaccaagttcgcagcctcggttaacaacatttcttttgcacttccatcatctgtttccatcatgcaggcctactattcaggccaggccaatggggttttcaagactgattttcctgccacccctttgaaccctttcaattacaccggaacgcctccgaacaacacaatggtcaccaatgacacaaagctggtggtgctcaaattcaacaccagtgtggaggtggtgctgcaggatactagtattcttggtgctgagagtcaccctttgcatcttcatggctacgacttctttattgttgggcaagggtttggaaactatgaccccaacaatgaccctgcaaagtttaacctgattgaccctgttgagaggaacactgttggtgttcctgctggtggctggattgcttttagattccttgcagacaacccaagggtgtggttcatgcactgtcacttggacctccacacaagttggggattgagaatggcatg

SEQ ID NO: 21354 - DNA, 362 bp, Glycine max
agattctttaatcaatgaagcactcaaatcaggattggcaccaaatgtctcagatgctcatactattaatggccttccagggacagttaccaattgttctacacaggatgtttacaacctgcccgtggagagtggaaagacctacctgttgagaattgtcaatgctgcactcaatgaggagctcttcttcaaaattgctggccacaagctcactgtggtagaagttgatgccacatatgtaaagcccttcaagattgaaacaattgtgatagcccctggccaaaccaccaatgtgcttttaaatgcaaaccaaaaatttggcaagtacttggtagcagcttctcctttcatggatgctccta

SEQ ID NO: 21355 - DNA, 400 bp, Glycine max
cttggctttagcggtgaataattcacaaaacatccttgtgttgttaacaaagttcgatcttgagtaaatacctcatttttattctctgttttacatgtgaaattctaatgtctataaataaagattttcaatattggtaatgtcattccttatttattcttatgtttctgattttcatcttctaatttattcctaaataggactattggagacatttacataaatattaggagattgtttaatacaaattatctctcccgctctgcacacacagttttgggttgcattcttaaataccctatctttaatctctgttttacgtgtgaaattctgattatagaagacattaacgtaattgaatctttggagattgttatactgatgtctataatgaaagatt

SEQ ID NO: 21356 - DNA, 456 bp, Glycine max
cttttccaccagaaacgcgtttcacaatcaagagaatttcgcacatcgtaacaacccaattcatcatttaaggtaggtatgcgtctctgtcatttaacatttgttagacttagactctataattgaacatcacttggcttggcagattcaccatttatgtgttctgttgtgtgtgtatgtagctcacacatacaattgtagttcagtccaattcttcaccatcaaattatgttgtcacctgaaccctgtgatccgaactttctgctgtgtctacccgatgatgtgtttggcatggtgtcacggttcctcttgcccagagatgtttgcaatctcagcctctgctgcaagagtctctatgctctttcatcctctgaaaaagtgtggttccctcagtgttacatggtgggagtggtgccccaaaaagaccttgtttgagtggagagagggtgtctcatc

SEQ ID NO: 21357 - DNA, 452 bp, Glycine max
tcatttggtctggcctgtgctactcactcagttactctttgacgttgtgtgccgtacaaagtgatgacgggtaaggctatgaacttgagccattccaaaacggtggttttgatctggctcatctccgctttctgcttcttcaccttgttccaaatggccctctacaactcatcacaaactccttcatcaacttctttagattctccaaattcaaacacggggcaaagatcaaagttgtatgacaagatggggagagatctggatgagcatggagctgctttcctgaaacatggtgaaacctctcagtcattgtctctttcggatatattcacactgaaagatggatctgtaactcctgttctgaagccggcaaatcctccggtgcgggctaatgtattgtatttgagcactgaaatctctgtacctatcgcggaggctgtcaaaaatgtttt

SEQ ID NO: 21358 - DNA, 582 bp, Glycine max
cgtgctcggaaaatccaaagccaaatttgaaattacctaacgtgtgttggcgttctgggttgacccaccctcctttcgttttcagcataatttctaggttttctatcttcgctcattcgccaatttacaattgaaatcgcaattacacaatctctctctctgctcgtgagctttctacggtttcgattcgatcattcccctcttgttttatggaggtataggtagatgatgggaaaacgtgtctcaagagagcactttcaacccaggccgtgttctgggaagacagagaatttaaaaaacaccgtgtttattgatgtagatgatcaagttgatgatgtggatgtggtgatcatagattacaaagagttcatgtctaaatcacatggatctggtgcgtcgagtagagacagggtatgtacgccgcagagtgttattagcattgatgatgacgatgacgaggaaagtgatgatgcggagtttcccggaggtgttgctggaggtgttggggaattggatagcgatgcctgctctagtaaaaggtctcctccagacccaagtggcttgcggaattctgtacacata

SEQ ID NO: 21359 - DNA, 903 bp, Glycine max
ttttcgtttacgcgtgggcttggagaagaaactttgtgtagcaaaaaattagaatgatgaaaaacaatagcccacaagattggcctgagccaatagtcagagttcagtccttgtccgaaaggtgcacagattcaatccctgagaggtatatcaaacccctcagtgaccgtccatctgatgatgccgttgctgttgatgatgccaacatcccaatcattgaccttgcagggctttatggtggtgacccagatgctcgagcctccacactgaagaaaatctctgaggcttgtaatgagtggggtttcttccagatcgtgaaccatggtgttagccctcagctgatggacatggctagggaaacttggcgccagttctttcacatgcctttggaggtgaagcagcagtatgcaaactcgccaaaaacctatgaagggtatggtagcaggcttgggattgagaaaggtgccattcttgactggagtgattactattatcttcattaccttcccttgtctttgaaggacaataacaaatggcccagtcagcctccctcttgcagggaagtgtgtgatgagtatgggagagagctggtgaagctatgtgggaggttgatgaaggttctgtccataaaccttggattggaagaggatgctctccagaaagcttttggaggagaagatgttggagcatgcctgagggtgaatttttacccaaagtgtccaaggccagagttgacgctgggtttgtcttcgcactcagatccaggaggcatgacactcttactttcggacgaccaagtccctggtcttcaagtccgaaaaggcaacaattggattacggtgaagccccttcgccatgcttttattgtcaatattggagaccaaattcaggttctaagcaatg

SEQ ID NO: 21360 - DNA, 567 bp, Glycine max
gtccgcagtatatgggtacaataactggcataagtgatttggattctttcggtggccaaattctcattggcgctctgtcaaggttggttgggatgaatcaacagctggagagagacaaccacgagtgtctctgtgggaaattgagccattaacaacattcccgatgtatccatcattatttcccctcagactgaaacgtccatggcagcctggcacctcatctttgcatgatgggagagatgaagctactaatgggctaatgtggatgagaggtggacctgtagaccaaggtctcaattccctaaattttcaaggagctggtatgttgccctggatgcatcagagactggatccaactttactaggaaatgatcagaatcaacagtaccaagccatgttggcagctggtttacagaacttaggtagtggatatctcatgaagcaacaaatgatgaattttcagcagccttaccactatctttaacaatctggaaacagtaattctcctttgcaacttcagcagcagcaaccaattcaacaatctgtgtcttctaacatgctgcagcc

SEQ ID NO: 21361 - DNA, 425 bp, Glycine max
gtcggatttcttttaagctttatgattggaatcctgcggaatttcctagaaggctacgacatcaaatattccaatggttggcaagtatgcctgtggagttggagggatatatccgccctgggtgtacgatcctgacaatttttattgcaatgcctaacatcatgtggataaatttactgaaagaccctttggagtatgtgcatgatattgttgctcctggaaagatgctatctggaagaggcactgcactagttcatctgaatgacatgatcttccgtgttatgaaagatggaacttctgtgacgaatgtcaaggtaaacatgcatgcaccgaagcttcactatgttcatcccacatactttgaggctggcaaacctatggagtttgttgcttgtggaagtaacttactgcagcctaagtttcgg

SEQ ID NO: 21362 - DNA, 401 bp, Glycine max
ctcattctcaaattaatattaatttaagcaagccaaacactatatcaaggggaaaatggcagaggctaatgtagtgctgttggatttctggccaagctcttatggaatgagagtgaaaatcgctttggcagagaagggaatctcatatgagtgcaagcaagaagacttggaagctagaagctctctgcttttagagatgaacccggttcacaaaatgataccagttttgattcataatggaaaacccatctgcgaatcactcaacattgttcagtacattgatgagacatggaaccacaaaccttcttctctccttccatctgatccttacaaacgatcccaagccaggttttggggcgattacattgacaaaaatgtatacaatgctgtgaagagggttt

SEQ ID NO: 21363 - DNA, 1805 bp, Glycine max
ctcgagcgattcggctcgagcattggtgctggctctgatgagattgagatctcacctcattctcagcctttggttggtgcatcttcctacatcaattgcaataacaacagcaccaacacatcatgttatagtacccctttgagttcttctccaaaggtgaacatgaacaagatccccacaatggtgaaccacttggtgaaggagggcatgcccccaagtttggggacaccaacgtccttgaattccaccgtggcggaattctcagctgatcctggctttgctgagagggctgcaaagctttcttgcttcggaagtcggagtttgaatggcaggaccacccaattgggactcaacattgctgaattggctcagagatcttctccattggtggaaaatgggaagaagcagctccctagagtctcaagtagtccatcactcaaagtgcttggatctcaaatgggtactcaggagaacaagaattctccattgcaagacctaatggaattggccaattctcaagaggaatccacaatctctgaacagaccccaaatggggacactggggtgaagccttccccttatgtgaattctaggaaaagaaaaggtccatccaaaggaaaagccaaagaaacttcagcctctattaacccccctatggctgctgaagctagtgaagactggaatgcgaaacgcagcaagcctaatgccggtgaggggaatgaaaatggccaagttaaggcagaggaagagtccaaagggggtaatagtaatgcaaatgatgagaaacagaacaagagtaactcaaaacctcctgaacctccaaaggattacattcatgttagagcaagaagaggtcaagccactgatagtcatagtcttgcagaaagagttcggagggagaaaatcagtgaaagaatgaagcttctccaagatcttgtcccaggttgcaacaaggtcacgggtaaagcactaatgcttgatgaaattataaactatgttcagtcattgcagcgccaagttgagtttctgtctatgaagttggcttctgttaacaccaggctggattttagtattgagagtctaatctcaaaagatatatttcaatcaaataattctttggcacacccaatattcctgatagattcctcagcaccacccttttatgggcaacaccctcagccaaacccagcagtccacaataacattcctaatggaactatgacccacaactcagtggacccattagatactggtttgtgccaaaaccttggcatgcatttaccacacctaaatgattttaatgaaggtggttctcagtatgcaaaaccattctctgaagatgacctccacaccattattcagatgggatttggccaaaatgcaaataggataacaccaatacaatctcagagtttcaacggctcaaatcaagtacccctatgaaaatcaagctctgatcaccattcattacggctgaattgaagcttggaggaataggaagactactgctgtacacaacaagaagggatttaatttgaacgaccccttgaattattaagccattgttatcactaggtctaatagaaccttcttttgtccttatgtatagccattttcttttcttaccctttccatgagtttaatttttaatcatcaggggcagttcttttcaaatttttttacaacttcttcactgtaaaatctttaggaccgattctgatttctcttggtgcaaattcttatttttacggcaccaattgtaagatatagtgcaaattaaaggagtttttctacaacccgctatt

SEQ ID NO: 21364 - DNA, 1057 bp, Glycine max
aagagcttgacggcgatgccccccgtccgtaggctcggatttcggttcgggggaaaaaggccccacttattcctgaagcactaataggaagaggtccagcatatgcattccaaagggaacttgatgctgctatagctgattttacaaaggctatacaatttaatccattggctggtgaggcatggaaacggagaggtcaggccagggcagccttgggagagtttgttgaggctattgaagacttgaccaaggcattagagtttgaacctgacacagcagatattttacatgagagaggaattgtcaatttcaaatttaaagagtttgatgcagctgttgaagacctttcagcttgcgtgaagctagataaggataatacatctgcctacacatatttgggtttagcattatcttcaattggtgaatataagaaagctgaggaagctcatctcaaatcacttcaacttgacaaaaatttccttgaagcatgggcacatctgactcagttctatcaagatttagctaagccaacaaaggctcaggaatgtataaataagatgctacaaattgatgggaggtttgcaagagctaatcatttgcgtggccttctgttccatgcaatgggtgagcacaggaaggctatcaaggatttgacaatggggtcgagcattgatggcagcaacattgaatgcttgtatttacgtgcttcctgctaccatgctgttggacaatacaaagaagcggtcaaggattatgatgctgcattggatttggagctggattcaatggacaaattcgtgctccagtgccttgccttttatcagaaagagattgccctgtacacagcctcaaaatttaatggtgatttttgctggtttgatattgacggggatattgatgctctttttaaggaatactggtgcaagaaattgcatccaaagaatgtatgcgaaaaggttttcaggcaacctcctttacgcgagtctttaagaaagggaaagcttaaaaagcaagagtttactattaccaagcagaaggctgctcttctacaggcttc

SEQ ID NO: 21365 - DNA, 423 bp, Glycine max
agcaagtgttgttggtgttgtagcaaacctgcaagagatttccatcagttaatttccttaaggtggagattgaagaccatccatacttggcaaaatcagaaggtgtgaactgcatcccagcctttaaaatatacaagaatggatcaaggattaaagaaattccaggaaacaaccacgatttgttggaaaaattagttaaattatatagcagctgaaggtaatcacacttcttcgaatcacaacatataggatgagacgaggaaggttagttttttaagaatggaaaggaagattgtccaaaattatatcaagctgtttatatctagcttcataaatttggtcaccttgcttacaagacagaggaaaccagagacgaaacatagcattgttaaaagctgtagaaaaatgtataggaaaagtgat

SEQ ID NO: 21366 - DNA, 456 bp, Glycine max
ctcagaattcgaccgttaaatttataacccaaaaactagtctcattcttcttcttccgttgcacaaaaaacatatttgtttcgtttatctctttctcctctatagtagtagctaaaaatggaggcgaagaaatcgggtttgaatctcccagctgggatgtccggaacctcactccggctggacactgcagcagcatcttccatctcgaccctcaattctccttcttctctccgttccatctctaatctcacctcgccttcgaaatccaactcggcttgcagcgacaggttcattccgtgccggtcctcctcgaggttgcacacgttcgggctcctggacaggccctcgccggtgaaggaagggagtaacgaggcttattccaggttgttgaaatcagaactctttggatctgactttgcttctccttctctttctctttcttcccctgcaggtgct

SEQ ID NO: 21367 - DNA, 1296 bp, Glycine max
cgtttttctcaccattggtggcacacaagccatagatataattttaccttccctagcacgtcctggtgccaacattctccttccaaaaccagggtacccacattatgaacttcgtgccactcgttgtcttcttgaaattcgacactttgatcttttgcctgagagaggatgggaagttgaccttgactctttggaagctttggcagatgagaacactgtggccattgttttcatcagtcctagtagtccatgtggaaatgtgttcacgtacgaacatttgaaaagggttgctgagattgcgagcaaacttggaatctttgtgatttctgatgaagtttatgcccatgttacttttggaagcaaaccgtttgtacccatgagggagttttcgtcaatagtgccagttattaccattggttctttctcaaaacgatggtttattcctggttggagaatcggttggatagccttatgtgatcctcaaggaatttttcaaaaaactgggattgtgacgaaaataatcgacaatctagagatcacttcagatcctacaaccatcgtacaggcatcgatacctggaatccttgagaaaactacagatgatttccattcaaataatcttaatatactgagggaggctgcaaacatattctacgacggatgtaaggagattccttgcttgacatgccctcacaaaccggagggagccatggttgtaatggtggagattaacttttcacaacttgagggcattgttgatgatgtgcaattttgcactaagctggccaaagaggaatctgtaattctttttcctggtgttgctgttggactaaagaattgggttcgggttagtcttgctgttgacctttctgaccttaaagatggccttagcaggataagagaattcagccttcgacatgcaaagatgtcctaagtcttgtcatatgaaaggggtataaggggtggtggtgcaggggtgtgttcacttcttaggtgtgttatgtaacaataagatatttatgtggctaaataataaattcacgtcctgatacaataatatatttattggggagtgccttatggatgcaggggagttgccatatgtggcagcgattgtataatttgtgctttctttagtgtcttgatcttgttggcttagctttttcctcctgtagcatttcacatggctactttggttttgcaagttattggtgtgtgtctcgattactggtgtcttgttcataccttatgttgaatttaagcatttcttattattaatggaattttagtttatat

SEQ ID NO: 21368 - DNA, 509 bp, Glycine max
ctgttattgattttaaagtggtttaaaactagttttagaagcaaaccagatttaaaatcagttttgaaccagaaactggatccaaaaaatcatttttttttgcaagatatggatctggatttaaatggatccggattggattttccatgtccgcccttaaaaataacctgtaattggaggtttttaagcggaaaaagttaaaataacagataaaaaaatatcttacattaccgagtgattgacgtcaaccgcaaaccatctccacttcttatctccggtctccgacgaactctccttggaatttgtactgcagaggtgctgccttttacaccaccagattttgcagattttagtttttaaggttatgctttttgggttctgcgactaatgttgacgatgatcatcactgcgctcatcactgccatacttgcgggactttgcattggcccaatcaacggcaggcggcggaggaagagggccgtggcgttcttccatccgtacaccaacga

SEQ ID NO: 21369 - DNA, 374 bp, Glycine max
cttttccatcaccaaaaccacacaagaattcggtgaaactccacttgaaacacagatgagggagcaaaggtgctgagcctaaaaactctgtgattgattccacagtaagagatttgaccagaattcagaaccttcacagaagggttatagaaaataggaaccaaaacaccatttcaaggctgcagaggttacagaaggagcaaccaacgcagtccttcaagccagtgtttgctccggccgcttcatcgacaagtccagtttccgggcagcttgtggcaaccttggaatccggggtgagtcttggctctggtgagtatttcatggatgtgtttgtggggacaccccctaagcatttttctttgatacttgacact

SEQ ID NO: 21370 - DNA, 367 bp, Glycine max
ctcgagccgatgggttctctctttattggaattccagccaaggaaatagttggctggtggcggatttgtttctgggtatctgtcattcctgctacaatgcttgccctttttatggagatctgtgcagagagtcctcattggcttttcaagagaggaagaaccattgaagctgaagctgcatttgagaagctcttggggggagtacatgtgaaacctgcaatgactgcactgtcaaagtctgacagaggcgatggatctgattcagtaaaactttcagaattactctgcggccgctatttcagagtgatgttcattggatctacactttttgcgctgcagcagctatctggcataaatgctgttttct

SEQ ID NO: 21371 - DNA, 601 bp, Glycine max
gtcccgacaagtaaatagcagtttcccatcccagcctcattctcctccattaatgccaatgcacagacacagagagagagaaagagaaagagtaactgagttgtattcaatattcacaatttctacctccaaagattaaaaagagagaaagaaaaaaaaagaagcctacacacctttcctccctattccttctacttctggcgccatttgcaccttcaaaactccatcttttttctttctctccttccatttctggaaacaccctcatggaaccaacaacaacattgaacaacatcatcaacaacaacaacactgttcctgcagggtcaccaccaccaccaccaccaccctcagtgcctcagccaatgaacatgaatgtcaacatgaacatgaacgtgggaaacacagaaggaacaacaccagcagttccaacaccaacacccgcgccaacaccagcaccaacaacaatggtttcctgcagtgccagctccaaccacaacaacaccgtggagtttggatttgtttgggaagaagaagagagggaggcccagaaagtatgatgcagatgggaacctgagagtgagtgcaacaccaccaccac

SEQ ID NO: 21372 - DNA, 574 bp, Glycine max
taaaaagagaggaaaaaaaaaagcctacaccaccctcttcttccctattcccttctacttctggcgccatttgcagcttcaaaactccatctttatttttcttctctccttccattattagaaacaccctcatggaatcagcagcaacagcattgaacaacatcatcaacaacaacaacactgttcctgcagtgtcgccaccaccaccaccaccaccatcctcagagcctcagccaatgaacatgaatgtcaacatgaacatgaacgtggtcaacaccacagaaggaacaacaccaacaccaaccccaacaacaatggttcccccaacaacaatggttgttcctgcagtgccagctccaacaacgacaacattagcagtagcaacaacaacaccagggagtttggatttgtttgggaagaagaagagagggaggcctagaaagtatgatgcagatgggaacctgagagtgagtgcaagaccaacaccaacaccaccatcgggttttactttgtccacaccttctgagtactcttcttccaaaagagagcgcggcaaacactacaacacaacttt

SEQ ID NO: 21373 - DNA, 497 bp, Glycine max
agatcaatgcataagaagtctgatcgccaccaccaccatcatcgccaccaccaccatcatcatcacaaacatcggcaccacctggatgatgagagaaatcacatgcaacaacactcccctaaattcaatggaaagcatgatgagaagttagacaaaactgaaaccgataaaaaggatggtggtcatcatgaaagtagagctatggtcgagaataatgatggtcaaattgtttgatttttgagaatgaatctgttgtggtggttctgtactgattggcagctgagtatctgatatccaaattaaagttaaaggaacaatttcattatttatgtcggatgtaatattgtcggcagttattgtctatggaaactttgttgggtaattgttggctgtgaacattaatttgatcctcattcaactataaaacaaaaaaaaaaaaaaaaaaaaaaaaaaaaaaaaaaaaaaaagggcggcgctcgccggacgaaagaatcgac

SEQ ID NO: 21374 - DNA, 549 bp, Glycine max
cattgaagctgatcaaagtcattggaagaaaattctgaagatgaaagcaaaaaaagatcaatggataagaagtctggtcgccatcaccaccatcgtcaccaccaccatcgccaccaccaccatcgccaccacttggatgatgagagaaactacatgcagcaacactctcctaaattcaatggaaagcatggcgaggagttagacaaaactgaaactgagaaaaaggatggtggtcatcatgaaagtagagctatggttgagaataatgatggtcaaattttttgatttttgagaatctgtcctgctatctgtttgtggtgcttctgtactggaattggtaacttactatttgatattcaaattaaagttaaaggaacaatttcattatttatgtcggttgtaatattggcggcagttattgacactattgaaactttgttgggtcattgttggctgatgacattaagttgatccttattcatctataaacagttgtatttgaagtttacaaaaagaatactcttgagggttcttgagggaaaaaaaata

SEQ ID NO: 21375 - DNA, 365 bp, Glycine max
aaaacccaattaatcaaaaattgagatacaccacttgcaactatcatcatgacttctgcatcacttcaccttctgcctcttacctattccgatcatgcaccccaaaagcctcgtagtgtgttacccatctttggtttcatcaacatgacaatcagcagcgtggtcacaatctaccgcgcgcacaacaacagcgacactcccaccggtagtgttcgggggttttgtctactttggttccttcttgttggattattgctttcgcttgtaccactccctacctaaatcttcatcatccaattcccataatattaaacgcaacgttaaaatcatcatttgggtcttgattagcaccatcatgttgggat

SEQ ID NO: 21376 - DNA, 847 bp, Glycine max
ggatatttcaataatacaggagattatgcttccgttctcctccgtgtaaaggaagaccatgatggggcagaaccctcaggaaactcagtttctgctataaatcttataagattggcttccatggttgctggaagtaaggctgagcattataagcgaaatgcagaacatctattggcagtttttgagaaaaggttgaaagatatggctatggcagtgcctctaatgtgttgtgcagcagatatgttgcgtgtactttctcggaagcaagtggtcgtggttggtgaaaggacgtctgaggactttgaaagcatgcttgctgcagctcatgcagtatatgatcccaacagaacagttattcatatagatcccaacaacaaagacgagatggaattttgggaagtaaataacagtaatgttgctctcatggcaaaaaataactttgcagtcaacaaggttgtagctcttgtatgccaaaacttcacttgtagcccccctgtcactgaccattcgtcacttgaatctttgctctccaaaaaaccttcctcttcattaacataagctattggttctgattagtaggaaaaatagtagctccctcttagagatcctccttttcgtctacagaactagttggttctgacttctctgtcaaataaactaataaaggtaggtaatattctccgttgagttgagggattgatgcatatccttttcgtttgcctgtgctcaacaagccataatttttctttaaatgtgatacagaatgatggaatcatggatatataattgtatatgtattatccaggcaatggttgaaataattatcttctccagttggggtctgttc

SEQ ID NO: 21377 - DNA, 580 bp, Glycine max
tgggaagtaaataacagtaatgttgctctcatggcaaaaaataactttgcagtcaacaaggttgtagctcttgtatgccaaaacttcacttgtagcccctctgtgactgaccattcgtcacttaaagctttgctctccaaaaaaccttcctcttcgttcacgtaagctattggttctgatgagtaggaaaatagttaacgtcggcgaaagctccctcttagagatccccctttcaatctacagaactagttggttctgacttctctgtcaaaataaagataggtaacattctctgttgacttgaggaattgatgcatgtccttttcgtatgcctgtgctcaacaagccatgatttttcttcaaatgtgatacagaatgatggaatcatggaagtatgtataattgtatatgcaatgtaagctatcgttgaaataattatcttttccagttggagtctgttctcatgtttatacttcatttttttctcgatgaacttgcacaagaaagtctcgatggcatggctaagaaatccttcatgtctgttcgtgcaatatgttgtagaaagctcaaaaggtttgcc

SEQ ID NO: 21378 - DNA, 232 bp, Glycine max
  unsure (1)..(232): unsure at all n locations
ctcaaacgacacttactctgtaatgtaagtgataagggtgcccaggtgatgggatctgaatcggatcagagaagtaccaattagcgattctgcttgtgtgctataatcctcttagttacgataatctgtttcttccttattattggaactgatttattgttatgttgaaagtaaggccaatnttaatatatttatatttattaaataaaattatatatttaataatatttat

SEQ ID NO: 21379 - DNA, 664 bp, Glycine max
gcagaaccagccctttgtagactactattgccagttaccaactcaaggggtgcattctatggtggtggtggtggtatgcagttcttcaagcaattggtggcggccatgtttgtcattggatggaacttggtgtccaccaccatcattctccttgtcataaaattgttcatacccttgaggatgccggatgagcagctggaaatcggcgacgacgccgtccacggcgaggaagcttatgccctctggggtgatggagaaaaatatgacccaactaggcatggttccttgcaaagtggcaacactattgtgtcaccttatgttaatggtgcaagaggggtgaccataaacttatgagtcaagaaattaggctgtgctcttgctcacacatgcatgtgtatttatttatatgattaacaaatgtgatgaatccgtgagtggtataagtagatatttgattttgtcatgaaagaaaatttccaaattttgagatctgatgttcctctggtcatcttgcattcgaagacctggtcatatatttctggcacagaatgtcttggcatgtgtataaaatttagatttgtcaaattttaaaggaacttatgattagtttttttcacttagaagaagatcaaaaaaaaaaattaaataaataaaattttatggg

SEQ ID NO: 21380 - DNA, 578 bp, Glycine max
ccgatcttgagatcactacaacacacccaaacagagccttattcttgagaaacaagtttcttcttcaaaacaacatgtctggaaccgtgattgtttttgactttgacaagaccattgtcgatgtcgacagtgacaactgggtcatcgacgaattgggtttcaccgatttgttcaaccagcttcttcccaccatgccttggaactctctcatggacaggatgatgatggagcttcattcaaaaggtaagaccatagaggacattgaagaggttctgcataggattcctttgcacccaagagtaatacccgctattcaagcagctcatgctttcgggtgtgatttgaggattgtgagtgatgcaaacatgtttttcattgagaccattctgaagcacttgggaataagggaatacttctcggagattaacactaacccaggttatgttaacgaagaaggaaggttaaggattttgccttaccatgacttcaacaaagcttcccatggctgcactttgtgtcctccaaatatgtgcaaggtaaatacaatttgttttttttggttatctattaccttatca

SEQ ID NO: 21381 - DNA, 406 bp, Glycine max
gtgaaagaagaagagaatgaaattgaagggtcaaacacaggctacaaagttggttaatctatacagattttgcgtttcgtcttcttcttcttcaatctctcgcttcaaccacttcactctcactaccaccgattacaataaattcaaattcgcttgcgcgaaagcgaagaacctccaactctcactctcccaacgcgccttcgtttttctttcccctcttaacgttgccgctaattacctccgtagttatcgcgtttctggcagttacatatgcagcggaagcattttaggtgtgtcaattgcatctgcaccaattatagctcatgccatggatggtgagctgcatatctgattggtattatgtactttagtttttctgtttattttcttagtaactgtcctcagt

SEQ ID NO: 21382 - DNA, 394 bp, Glycine max
gtactctcaatctcattcacctcaaccacttctcatcatctctatcaccccattttctcaaacacctacacaaaatgtgcttcctcaacacaaagtccctggctcacttcatgttgctaacaacaattgtagttggcattgcaatgggagattcatcaaaggacaaagaggaatgcactgagcaattggcaggcctagcaacatgtctgccctatgttgggggtcaagcacaagctccaaccccagattgttgtagtggtctcaagcaagtgctcaagaacaacaaaaagtgtttgtgtgttattatcaaagatcgcaatgatcctgatctggggggtttacagattaatgttccgttggccttgaacctgcccacagcttgcaatttcccctg

SEQ ID NO: 21383 - DNA, 781 bp, Glycine max
cccggttcattcaggctcgttctgttgcataacccactcgggtttttggctagacactggaaagcatcataagcatgcaagcgacgtcgttctgggtagccaagtttccatttggcgtaagggcgcagcagcacccaaccgtgaagagagactccatggccgagtgcaccgtccccaagtgggcccaaaaaaccgtcagcttgccccctctccggcgcggctgtcatcttgtcacttccaagatagtgaaggaaattgagcaagacctctccggcttcaagtgtggcctagctcatctcttcttgcagcacaccagtgcttctcttaccatcaatgagaattatgactcagatgttcgcgaggataccgaaaccttcctcaatcggatagttcccgaggggtcatctgcgccatggaagcatactctagaggggccagatgacatgccagctcatattaaatcatcgatgtttggttgtacactcacgataccgattacaaatggcaagcttaacatggggacatggcagggtatatggctctgcgagcatcgggatcatcctacctcacgaagagttgttgtcactcttaatggaatatgagagtgctaagatctgtttgctatacctcaccttcgtgatgaagacaatctcgctttgtaatttataacaggatgtgtgctaccgatcccccttttttgccaatgtaatttgagtgccttgatatgatatggacacaactgcagatagcattatgaccctttaatgcatataagtattcc

SEQ ID NO: 21384 - DNA, 295 bp, Glycine max
ccgcaacataaagtgcagcacaccagtgcttctcttaccatcaatgagaattacgactccaatgttcgcgatgatactgaaaccttcctcaatcggatagttcctgaggtttctttctttctatcaccaatttgatgcattcatctgctccatggaagcatactctagaggggccagatgacatgccagctcatattaaatcatcgatgtttggttgtacactcgcggtgcccattacaaatgggaagcttaacatgggcacatagcagggtatatggctctgtgaacatcggga

SEQ ID NO: 21385 - DNA, 487 bp, Glycine max
ctagttttgtgcatttgcctcctcttctcaagtctctttaatttctcaaaggaaaaagaagaagaaacaaaattttattttgagaaaaaaatggaggcattgaagatgaatcttttcttttttgtcatggccatgctgatcatggcagcatcagctgcagattcaccagctccaagtcccacatcggatgctaccaccttattcgtgccaacagcggttgcttcactcgttgctcttgcttttgggattctcttctgagtttctcaacaatgaagcaagcaactaattgtattgtatgggattcattgtgttttcatcatttttatgattcatattactttgtgacacattcatttcccactgtacttttttgtttgttatgtttatattatgggctttaatttgaatttgatgatgtaatattaatgtcatttgtttggtttcatgaatttgttcatgatgcccttcttcttttggttaaaaaaaa

SEQ ID NO: 21386 - DNA, 476 bp, Glycine max
atgtaatgacaaatgaagaagcatgtgaggttgcaaataagcgaatccttctttggcacaagaagtttggtgccaatggcccaacagcacgcagtgaaggagctgatcctgcagctcagtccgccgcagagtatctaactaagcttgccatccacaggggaagccaagataacatctctgtaattgtgatagacttaaaggctcaaagacatattaagagaaagccataaagtgaagtgatttacatctgccatattttcattttaaagctattgattttactgtattttagagtcattggtactttttagcccgtcagtttttcaccagggctaagctataagttatatatgctaatattcgtactgtacaaggatacctttagcttggatgtgttatcactctgtctctgagagctttccaagcataacaaactttttttttttttaattaagagccaatattttgtgttagct

SEQ ID NO: 21387 - DNA, 409 bp, Glycine max
agttgagagatctgaatctgctgtgaagcatcaaaatgatgtgcagaagtataatcacttgtctcaagcaatgcctcttggtcttgatgaattcaagagcagggcaattggttctaaaattaagtcaggtactaatccttctggaagtgtgatacatagattagagcctggtggtgctgaatacaattatgcttcagcatcaaagggagccaaagttttagcttctaacaaagaagccagaggtgcctctgacattctaagcagaaacaaagacaaatatcttcgaaatccgtgttcttcagaagagaaatttgttgtcatagaactttcagaagaaaccttggtaaaaacaatagagatagctaattttgagcaccactcttccaatttcaaagagtttgaattatat

SEQ ID NO: 21388 - DNA, 480 bp, Glycine max
cagaagtggttagaagcagcagggtggaaaatcaggacaatacaaagaatcagaatccccaaggctgaaaaagatgcttacaatgaatggaactacagcaagttccggctgtggcagctgacagattatgacaagataatattcattgatgcagatttgctcatcctaagaaacatcgatttcctatttggaatgccagaaatcactgccactggaaacaatgccactctctttaactcaggtgtcatggtggttgagccatcaaattgcacattccagctcctgatggatcatatcaatgagattgagtcctacaatggaggggaccagggatatttgaacgaaatattcacgtggtggcacaggataccaagacacatgaacttcttgaagcatttttggattggcgatgaggaagagaagaaacaaatgaaaactctgttgtttggcgcagaacctccaattttgtatgtccttcac

SEQ ID NO: 21389 - DNA, 418 bp, Glycine max
ttatttcgctcgtcagtatgagaatattgatgatccttgaaggattattacaaacgtgctgcattcctttgctaccccttcaaactccaactctacttccttgtcattgattttttggagtttatctgcctagacatgttgcaggaggttgctactacaaaagaatttgctgagctctcaagtctggttgattgaagataaacaagcatctttatggtggacagagggtgataaataaaatccagtcatcttggagcttgtatgtatcttctggaattggtggtataactatggtttgctcacttctctagtggaaatgtcataatggtgcgccatgcgccatgcgcctggaagaatttgttaccgtcttctagctgctggtgatacatgatgctagcccctttttttactacctcaa

SEQ ID NO: 21390 - DNA, 1282 bp, Glycine max
cttggtcatacaattgaacatgaagagatgctggaagttattaggctggaaggtcactctcttgctcaagaagacgcttttgtttctagggacattcatctcttacagatatgtagtgggattgatgagaatgctgtgggggcttgttctgagctcgtatttgctccaattgatgaaatgttccccgatgatgctccattggttccttctggtttccgcattatcccattagattcaaaaccaggtgacaaaaaggatgctgttgctacaaatcggaccctggatttgacatctggttttgaagttggtcctgcaacaactgctggtgcagatgcatcatcaagtcaaaacactcgatcggtgttgactattgccttccagttcccttttgacagcagtctgcaagacaacgtcgcggtcatggcacgccaatatgtccgcagtgtgatttcctccgtgcagagggttgccatggctatatctccatctggtataaacccatcaattggagctaaactttctcctggttctccagaggctgttacactagctcactggatctgccaaagttatagttactatttagggtccgacttactgagatcagattctcttgttggtgacatgatgctgaaacaactgtggcatcaccaggatgccattctatgctgttcactgaagtcattgccagtgttcatatttgcaaatcaagctggccttgacatgttggaaacaaccctagttgccttacaagatatcacattggataaaatatttgatgaggctggacgcaaggcattgtgtacagactttgccaagttaatggagcagggttttgcttatctgccagctggaatctgcatgtcgacgatggggcgccatgtgtcatatgaccaagccattgcatggaaagttcttactggggaagacaacactgttcactgcttggctttctctttcataaattggtcatttgtatgaaaaatccaattcgcgtgccctgctttttcccacttgaacataaaaatgaaagggttaaaagggagacaagacaagtttggggggaaaaagaagtcgtaaatttttgtataacacatcaggatcaggtttgcatttaattcgatttaatttatttcttatttagtgcagagaccaaattgaattaatcttgtaaattatttagtgctagagtgaagttgagacttttgaatgacacatgttgagtactttgtttttgtctctagtatctttcactcgagttgagctcatacacagaagaact

SEQ ID NO: 21391 - DNA, 562 bp, Glycine max
  unsure (1)..(562): unsure at all n locations
caccctttccgttttactccccacaaatggagacttagggctgcatgctntattcaagcagcatggcgtcggtattccaaaaaaganaaataatgaagcttcgtcaaaaggaagatgagtcagacgnagctcatgaaaatgttggtggcagttcctacagctttggtgctgcctngttagcctcaaagtttgctgcgcacaccctacgtggtgtacatcgcaatcgacttgccaagactgccagggagttagtgaaactacagaaaccccctgagcctgacttctctgcagatgatgctaactaaaaattttcatgtataactactctcttaaaatacttgttttcgttgactattatgattgaatttgtgaagaaaggtcgaaagcaaagtattacccaattatcctggttacagttgtgagggtttcaagacttgtaatgactcttgatctgtttccttgtaaataatagtaatcagccattttggctgtttgctaccgagcatgtaaacttatgtactattctcaattaatgaagttatagttcctggttggcagaatc

SEQ ID NO: 21392 - DNA, 387 bp, Glycine max
attcactaagattaaaataacacatgatggttcgatcagtgtagaaggagttgaagaacaaattaaacaggatgatctcaggttgtttcagccaacccaacactccctcatcgagcaacatcagctacagctcccaagtgccacagaatgtggtgacatgcacatacctaactcaactatgcaactcccccacttatctcactctcagctggtccagaacccttttctcccactccctaaccattttagccacagatatattttccatcacaatttctttgaacttctcaacctttctttttagaacacgccattgcttaaaaataaacaacaaccgcaaaaacaaactccacttgaacttttacccgctccttgtttattcaaaac

SEQ ID NO: 21393 - DNA, 444 bp, Glycine max
  unsure (1)..(444): unsure at all n locations
tgatgacaacattataatattttgaagtaataatgcaagggctctcatggactactacaatccttctttcataaattatgaccaattgggtggtcgtagtaatagggaaagttcacctcaacttattccaaatttggccatgcaaggtgatagctcttctttcattcgattagcaatggatgcaaccaaagccatgctggacagaaaatagctccaattgctggaagaactttcttggtagaactctatagtagtgacaatgaccatatattgatgttgatgtttttttttttatatttctattatacgtaatagcatgtatttattctatatatgggacgataaggtggaagaaagacaaggcttccattattattattatatatatatgtgngtcgaggattacccatttgacgaccctggttgcaattgagaggagataac

SEQ ID NO: 21394 - DNA, 370 bp, Glycine max
ctgaggctttctttaaatgaagaaaacacaatacgccaatttgcatcaatctagcaaaagtggacagaatgctaatctccaacttgttgaaacaaacaatgatgcaaagaggcacaatcctaagacattgagatctttgaagtatgctgccaagaaatgtgtagctgttttttcattgattatctatggcaaaagaataccagcctcatatgttgctggcaatgatgacaggaagaatacatccaaaattagaggggtggtatcatcatcaactgatttatcatttgagagtaccaccaagaattcatcaaaatggaagttttcttactcctatgcatcatccagcactgtaagtggacaacttggaatt

SEQ ID NO: 21395 - DNA, 508 bp, Glycine max
atcaattatgaaaccatgttggtcttcttccattccatcgactcttcgcatggcatgacctcatcttcgcgtgttgtggcttaacgtgcgccggaaatggaggaggagcagcagacttttgtgtccaaagcgagaaccgcctttcattccgccgcggccaaagcggagcgcgttctcttggatttcaaatccgatcgagatcacgataaacaatcgtcgcccaacaccttcaccggccaacaaccagaagctgaatctcctcacaccgacgaaaacgactccaagcttcatagtgaatcgaagcatataaagtggaggcctccacatttaggaattaagcaggattggcaagataaaataaagaacatccggagagggagaaaagaagttgaagatacagataaagttggggatgcaagcatggcaattccattttatgatgataatttgtacctcctgaatgtaaagaatgatctcgaggccaaggcttcagaagcaatgccctcag

SEQ ID NO: 21396 - DNA, 492 bp, Glycine max
ggattgggtatattttagtgcagagaagaccaaacggcaggaggtgtgatgttccactactagtactggtactagtatatgaaaccgtgttggtgttggtcttcttccatctactcttggcatgacatgactctcagcgtttcaatcctgacctcatcatcttcgcgtgtgcgcagggaatggaggagcagacttttgtttccaaagcgagaaccgcctttcattccgcggcggcgaaagcggagcgtgttctcttggatttcaaatccgatcgagatcacgataagcaatcgtcgccaaacaccttcaccggccaacaaccagaagctgaatctcctcacaccaacgaaaacgattccaagcttcgtagtgaattgaagcatataaagtggaggcctccacatttaggaataaagcaggattggcaggatagaataaagaacatccgtagagggagaaaagaagttgaagatacagataaagttggggatg

SEQ ID NO: 21397 - DNA, 697 bp, Glycine max
gttggttctgataagtcaccagaacagcgtgccctgcttgtggaatcaaggaggcaggaggttttattcttagataatgagattgccttcaatgaggctattattgaggaaagggagcaaggcattcaagaaatacaacagcagattggtgaagttaatgagatcttcaaagatcttgctgtgcttgtccatgagcaaggagccatgattgatgatatcggctccactattgagcattcccatgaagcaactgcgcaagcaaaatctcaacttgccaaagcttcaaagacgcaaagatcaaattcatctttgacatgcttgcttctggtgatattcgggatcgtgcttctaatcgtcatcattgttcttgctgcttagtcatagactctggattctattacaaatcaaatgctcttacatactgagttgcagatacgatctcccttgctgatgactacactgaatggtgatttaccagatctcacgaatgaccggaatttgtctcatcaggtttcagtacatgacgtgggaatattcacaacattagtgtctcgttatttcgttgtgggtatatgttctacttggggctttaaggatgtatcacaacctgcctgttgtgtaagttatctttttggttccttaataaaagatatatattaaattgttctttacctgtatatgcaacttcaaaattagc

SEQ ID NO: 21398 - DNA, 511 bp, Glycine max
cccacgcgtccgcccacgcgtccgcccacgcgtccgttaaattccaactcttacaagctagcttttaccaatctttcacaactcttgttcaaggcgaaacagcttataggatgaagagcaaaatcttgaaggcactaccaaaagcagttgcagcagtcaccgtgacatttcaaaaccatccattcagcccaggcagggatcacaaatcaaagcctatcgtatctatgattccccatgaagctagaagaaaaacccacgatagaggcaataacggcattgatgaaatttattcccaagaacccacttcaccaaaaatctcctgcatgggacagatcaagcacaagaagaaacaaatcaaaaaatcaaagtcaaagagcaagtccatgacaaaagaagcgaggaacgttgctagcaaaaaaacatcctcagcttccagagacatagaggtaaaaaagcacgtttccacgtttcacaagatgttattattccatggggcaaagccaaaatctga

SEQ ID NO: 21399 - DNA, 549 bp, Glycine max
  unsure (1)..(549): unsure at all n locations
aatcaatgactataactggttgcagcacgggtccgggtcattcgataggaaacttgtgcaggaaggaattgcaaggacaattctcgccttgcctttggaggatcagcagagtattttgctttcatgggttgcaagtttcttgaaaactggtgatggctgtcccaatcttcagagagcttttcaggtgtggtggcggaggactttcattaggccatatgtggaaggccaaactattaacgtcatgccagatacgtgatgatatgtttatgattcatgaatatatcttagaatggttttggaatttgaattttctcttttgaggtgactattctaagcaattataaatgttatgttgatttgccaatgtggcttacctccagctgctaactagtactgagtcctgtatatatggccgtttcatgtatacaatcactcgttgaattgtaactttcagtaattatacaaatactaaggatttagtttttctnnnnnnnnnnnnnnnnnnnnnnnnnnnnnnnnnnnnnnnnnnnnnnnnnnnnnnnnnnnnnn

SEQ ID NO: 21400 - DNA, 866 bp, Glycine max
tggatttggaaacttctcctattattatgttagaaaagattttagccttccacgttttgctcagatgatgtggcggcttaatttttttgtggccttctgttgtattgtgcttaacaatgactatatgctctactatatatgcccaatgcacacgcttttcactttgatggtgtatggagcattgggtatatataacaagtataatgaaattccctctgtaatggctgcaaagattttggcatgctttcttgtggtgatcttggtttgggaaatccctggattctttgacatattttggagcccatttgctttatttttgggttatactgatcctgcaaagcctgatctccctcgaatgcatgagtggcatttcagatctgggcttgatcgctacatctggataattggaatgatttatgcctattttcatccaaatgttgagaaatggatggaaaaattggaagagagtgataccaagaggagagttaccatcaaaactggcatcgtttctgttgcattatttgttgggtacttgtggtatgaatacatatacaagctgggcaaggtctcatacaacaagctccacccctacacctcttggattccaattactgtatacatttgcttgagaaatttcagtcagcggcttcggaatttctctttaaccctctttgcgtggcttggcaagattactttggagacatacatttcccagtttcatatttggttaaggtctaacatgccaaacggacagcccaagtggcttctttctcttatcccggagtatcctatgctcaacttcatgctaacaactgctatatacgtctttgtatctcatcgactttttgaattaacaaatacactca

SEQ ID NO: 21401 - DNA, 648 bp, Glycine max
ctcgagacgcttcatcgcacctggtggggtccacctccaccaccagcacatgctcctacctctctttttccaattcgaacaggaccttctttaatcgccacccattcgataccaccctctccctccggttccgattcaacggttctagaagatgcctcggcgggtccagatcgaagatcccaaatacgacgacgttcctgacgccgacgaaccggaggaaacgatccgtttcaaatcctccaacagcaacgtctccgacgaccaagaacccttcatgggcatcaaggttcgccgaaaagcctctctccacagagaccacaaaggagactacctcaacgtcccttcccaccctttcctaatcaaaattctacagaaacaaggggacaatgaggttctgtttgcggacagggttctgaagtttacgggctccgggaagatgaaacgctgcgttctgatgatcacggattctgcgatttacatcgttgaccctgaggtggacgcgctgaagcggagaatagtgcttgcggcggtggagagggtttgtctgagtgaactgagtgataattttttcgcggtgattgttccgtcggagtatgatttgctcatggctagtactcggaagacggagattgtcacggtgctggtcga

SEQ ID NO: 21402 - DNA, 555 bp, Glycine max
ctcacaagccacaatttcaacgccacaccaaaaattccactgcaccaccaccctccccatttgtacttttcttctcattctctttccactcccctgcattctgcacacaatctagctttacgtgcttctgggcaaccgcataaggttaaactgttaagcatatcattgaaatccttttgggattggaacttgatatgatcatttgtattggggagtaagaccttgttacttttgcaaatgctaaattttaataggatcagaagtcagcccaggacaaccagatctatgtctttgggaggcatggattacgtggatccaaaaaggaaaggcaattttgttggaaaagtttttcttgctgcagcattaacggcattatgcattatcatgatcaagagatctccatctttgaatcccccgagtccgttttccatccatgaaccaggtgtcactcatgttttagtgacaggaggtgcaggctatatcggctcacatgctaccctacgacttctgagggaaaattatcgtgtcaccatagtggataacctgtcacgagga

SEQ ID NO: 21403 - DNA, 620 bp, Glycine max
ctagctcattcttgtacgaaacgcttacattatcccacctctgccatccttgtcttttaagcaaaggctaataccaaatgcaaatactatccccactgaccaaatcttctttctcatcattcatgaattttgcttcttcattcagtttttcacccaggaagttctcgcctcagtagtctctaagttcgatctatactgaagggtacgttcaaatcaaatgggttcattccagacacccattggaatgagaagttcaacattgctagagacttcatgtggattcctgttgcaggaactgcagataatatgggatgaagttggagaagataagtttgaaagggagaaagttctgttagatttggagcaagagtgccttgaagtttacagaagaaaagttgacagagcaaatatatctagagctcatctgcatcaggaattggccgaggctgaggctgaatttacccaccttcttttgtcccttggtgaacgatctctaccagtccggccagagaaaagggcaggttcactaaaagagcagctagattcaatcactccagcacttcgggaaatgcgtctgaggaaagaagagaggttaaaccaattccgaactgtgcaaggtc

SEQ ID NO: 21404 - DNA, 810 bp, Glycine max
catcaccatagtttaattacgctcgttcgaattttcttgtccgcgccagacatggctgatacccaaccgcgaccaaacgacgccgttccttcgaaggagcgcctcggcacacgatgctgtcactgcctctgccaaactttctggatccttttggttctcataatcaccatcgtcatgcttgcgattcttgtcttgtacatcatcatcacaccacgctccttcaggttcaccctgattgacgcgaacctcacacaatttgattacaccgccaacaacagcactctctactacgacctcgttctcaacatcaccgcgcacaaccccaacaagaggctcaagatctactacgacgtcgttcgggcccacgcgctttaccggcgcgtggagttctccgccgccgacgtcaacatgccctggaacggctaccttcaggacaagaagggcacgaacttcttcggcgctgttttctcgggacaacgtgtgatggggctgaatagagaccaaatcgcggaagataaaaaggatgggatgttccctattgaccttaagattcattttactatgaggttcaggcttgatgattttcagctaggtcactactatcccagaggcacgtgtgagctcaaggtacctttgacttctaataatggaaataaggtggcttcttttcaccctgccatgtgcgaaatcgacttctgaatctctaagtacatattttgatcttgtctactgaattcgtgaatgtaaatttgtaattcatgatactatattttagaggcagatgattttttttagaataatagcaaaaaa

SEQ ID NO: 21405 - DNA, 393 bp, Glycine max
ctcgagccgattcggctcgagctgctgggacagcgagaaaaccttgccgaataatctttctgctgaatgaggtttctgcaaattggacactgttacgggacattattatccagaatgggctccaataaattgtcgagttcatcggcaaccaattcacataactgaagggaactatgtcaggagacaagatgtaagcatcgaatatgatgcctgcacaattcctaatgattgtggatctctggtggttgctcacgtcggaaatcacaaacaaattgttggtttccatgttgctggcagcaaaggaagattgggctatgcttcactaataccatatgttgagcctgtggtacaagcccatagtgctgaagtctatttagacttctttcctgtgga

SEQ ID NO: 21406 - DNA, 394 bp, Glycine max
caaacattgcattacagtaactctcaactttttattctctttctgttactcctttcccatttgtcgggttcaacattctccacgcccattttactgtcactcacacacatacacacacatacaaaagctataacaacagatcaccccaattcgctctctcgcctccttcgcaagcaaccaactgggttcgttcttttctttacttttcttcttcttctctcctgattctcgctcgccgccggaggctcgtgcgcgcgtcacgttgcgcggagtgagcgatcattggtttcgagtcacgagggtcatcatcgtacattcctcggatcgaattgtgaagatgggcgcgtgtggcgcgtttttcgagtcggcggtgaattcgggcggaaaatgcggc

SEQ ID NO: 21407 - DNA, 938 bp, Glycine max
cacacacaaggcagaaccaaatagctcattagtgagtttttgagttcgtgtgtcctttctttgtgtgttgcaaggttacaagatggaggatcaaaatgcatcatctaatggattgggcaaggtgttccacaaggttaagccctaccttgctatgatgtcccttcagtttggctactccggaatgtacatcatcaccatggtttctttcaagcatggcatgagccattgggtactctccgtgtaccgtcatatagttgccactctcatcatggccccttttgcatttgtccttgaaagaaaaatacggccaaagatgactctcccggtgttcctgaggcttgcggctctcggtttccttgagccagtgcttgatcaaaacttgtacaacatgggaatgaagaacacctcaacaacgtttgcatcggccaccgttaatgtcatgccagccattacttttataatggcactgatttgcaggttagagacagtgaacttgagaaaaatacccagcgtagccaaggtagttggaacagcagtaacagtctcaggagctatggttatgactttgtacaaaggcccggctcttcagttcataaagggacaagcagcaacccaccatgaaagtggcaacagcacacaaccctctgaacaaaactgggtgcttggcacagtagagctcattgcaagttgtggtggttgggctagcttctttatcttgcaatctttcactttgaagatgtacccggcagagctctcggtcacagcttggatttgctttttgggcatttttgagggtgcaattgcgacccttatatttgaacgtgacatgagcgtgtggtcaataggcatggactcaaggctccttgcttgagtttattctggtgtggtatgctctggaatggcatactatgtacaaggagttgtgacaagggaacgtg

SEQ ID NO: 21408 - DNA, 248 bp, Glycine max
gtcagaaccagatagctcatcagtgagtttgtgagttcctgagtgtgtgcaagtgtgctttctgtgtgtctcaagcttactagatggaggatcaaaatgcatcatctagtggattgggcaaggtgttccgcaaggttaagccctaccttgctatgatgtcccttcagtttggctactctggcatgtacatcatcaccatggtttctttcaagcatggcatgagccattgggtactctccgtgtaccgt

SEQ ID NO: 21409 - DNA, 399 bp, Glycine max
tggaagcccatagcatgtttaagagctacgtgtgaggctttcactaattgttggacactcatcatcgttgggtcgttatcattatcatatcatcaacttcaccatttcacctcactcactcttttctctattaaccctcttttcgaagaagctaacgccaaaacgatgtcgtatgtgcctccgcacctcagaaacccgagttccaccaccgtcgccacccccagaaccccctccgtaaccctagacaaccaccaccaccaccaccacaagctcgcattcgcctccaacaccaccaccaattgctctccatctctctcctccttccacaacaatgcctctcgccggagctccgccgcgcctccctcgccgaggattctcgccaaccccgacaccatcttt

SEQ ID NO: 21410 - DNA, 1016 bp, Glycine max
ctcctttcttagttgctacttctgcatctccccttcccttctttcattctttgtcacaaaactacaaagtcactgagtttagtgtttcgccaaaaccaatggatgatgatattgtaggactcggttttcgtccaacagaagaagaacttgtggacttttacctcaaacacatgttgctcggcaatgatccccgtgcccacgtcatccctgtcattgatctttgcgatgtggaaccttgggatgtaccagccctgttgatttcaagtattcaagaagtaaaaggtttaacaggacaaccaagtgtggcttctggaaagccactgggaaagaccgtgacattaggacaggggacactaacaccgtcattgggactaagaagactcttgtttactatcaaggccgtgtttcctgtggtgtcaagtccaactgggttattcacgaatatcatgctgttacctttcatgaaaaccagaggacttttgttttatgttgcttgatgaagaaacctgggaaaacaactgaaggcggaactgatcccctgatctgtgatgaaggggagcccagcagaagcatgatttctgactatgaaaatcagccaacagcagaaggaattgcatctgaaggtacttttacaggaatagaggcaatctttcaggcaaccccttgggcagagaattgcttctccccaatacaacagtctccgactcttattgagcaggaaggagcatcctttccaaactatgcatttaacaatgcctattttagaaatgaagacaacattatgcagactccatttgaaactacaaaggaagatgaattcctaaatttaatcttagccgatgaaagtatagtgatcaatgaagaaaataagcatgatttcgtcaatagctctacccaatcagagtcattgaaaagggtatactgtgtaagcagtgatacagatgctgaagtcatctctaaactggatgacaatattgtggatatttcaacagcatgtaatgattatcctaattcag

SEQ ID NO: 21411 - DNA, 392 bp, Glycine max
agtagttgctctgcttcatcatcttctctctatctttgttgcaaacttaccaacacagtactgagtttaagtgttcaccagtaagaacaatggatgatgatattgtaggactcggttttcgtccaacagaacaagagcttgtcaacttttacctcaaacacaagttgctcggcgatgatccccgtgtccacgtcatccctgtcattgatctttgcgatgtggaaccttggaatgtaccaggtaactaactcaacacccctttggcctttttcttcctcttctctttacttcactgttgtttgtttgattctttccttgttttcaaaattagtgatattagcatcgtcatcagctatacgatttggtgacccagattggtttttcttcagccc

SEQ ID NO: 21412 - DNA, 245 bp, Glycine max
gtttaagtgttcaccaaaaaaaacaatggatgatgatattgtaggactcggttttcgtccaacagaacaagagcttgtcaacttttacctcaaacacaagttgctcggcgatgatccccgtgtccacgtcatccctgtgcattgatctttgcgatgtggtaccttggaatgtaccagtgagattagcatcgtcatcagctatacgatttggtgacccagattggtttttcttcagccctgttgat

SEQ ID NO: 21413 - DNA, 400 bp, Glycine max
accacacaaagtacacttctttctcctgaatcttctgcttgggcggctccttcgccttccatttccggatctatagtttcatcaactcagatccatttacccttaaactttccaagtttcggatttgaatttgaatctctctacatgcgatgacgtcaacgtcttcttcagcgcctcattacaggtctctcccctcgccctcatcatctaactccactgcctcctatttcgtcacacgccccgcgacaaccacgcgctcttctttcgccacgcgccgaccatgggaagaggtgttcgcgctcttctcattcacgcgcccttactcgatcggcgaagcgacgatgcgcgtgaggcgcaacctcgttcactttcgcgtgaactactttatgatcgtgctgtt

SEQ ID NO: 21414 - DNA, 736 bp, Glycine max
gtgtacgaaaaggaaagagatagaagattcaaagcgagtacgctgtgtacgcgttggttcatggtttcatcttgatcatggtcacgatgtaaccttaactgataaaaccaacacaaccacacaactcaactccatctccagcgttctcaactgagtcttctctgccactacttctacaaaaaaacaaaaaaaatctttgttttgtttcttcatttgtttttcctccaccaccttctgaggtgaccttgaaagtgatttcattggaagcaattgataccagttgacatttgaagcagcttgtacttcattcagttatgacttgttttcctttattattcagtaagtcgtcgtcttcttctgcgagacacgaaccagaaattgatgaaggcattcataatgttaaactctactcctacaaagagctaagaaatgccactgaagattttagtccagccaataaaattggagagggtggttttggttctgtctacaagggacggcttaaagatggaaaagttgctgcaataaaagttctttcagctgaatcaagacaaggggtgaaggagttcttgactgagattaatgtgatctccgagatacagcatgaaaatttggtcaagttatatggttgctgtgtggaaaaaaataacagaatattagtctacaattaccttgagaacaacagcctatcacaaactcttctaggtggaggtcacaatagtctctactttgattg

SEQ ID NO: 21415 - DNA, 378 bp, Glycine max
tttgatcatgttcacgatgtaaccttaactgataaaaccaacacaaccacacagctcaactccatctccacgctttctcaactgagtcttctctgcaacttcttctataaaaaaccatctttgttttgtttcttcacttgtttcctcgtccaccttctgacttctgagtaagtcgtcttcttcagcgagacacgatccagaaattgatgaaggcattcataatgttaaactctactcctacaaacaactaagaaatgccactgaaaagtttagtccagccaataaaattggagagggtggttttggttctgtctacaagggacggcttaaagatggaaaagttgctgcaataaaagttctttcagctgaatcaagaca

SEQ ID NO: 21416 - DNA, 406 bp, Glycine max
cctcaagtcaaccttggttctggaccacacatcgtaacatcatcgagtgtctgatctcgttcgcaccctgcttcttagtcctctctctcaccatttaacaattacactggaagaaaaatgggaggttgtctatcatcgaagcctaaggcagtagataatggctcagcttccggcaataccaactgtttcatgctgtatgcaagagcactctcaatcacatggggagaaactccagaatattggatatgggttcagcagaaagaagcaagtggcacaataatagagttggctaaactaaaaaaagtttgctggctagaagtgcgtgggaaatttgacattagaaagcttttaccaggaattctatatcaagtgtcatttctaataatgttggaagattcatctgaag

SEQ ID NO: 21417 - DNA, 477 bp, Glycine max
caacatttcaagcatttgatttgcaaattgcaaatccctccaccttttcaaaatcttttgtgatcttttccaatggccaccttcatcttaaggtctaacaaagcagtgcatgcctttggttggctttgtctgctactgatggttcataagggtgcttcctatgattttgttgttggtggccaaaagggttggagtgttccaaatgaccccagtttcaatcccttcaatcaatgggcagaaaaaagccgttttcaaattggagactcccttgtgttcaactaccaatctggccaagactcagtgctctatgtaaagagtgaagactatgccagctgcaacattgattcaccttatgcaaaatactctgatggccacacagtctacaagctaaaccaatcaggccctcacttcttcataagtggcaacaaagacaactgcaacaagaatgagaagttgacagtgattgtgctagctgac

SEQ ID NO: 21418 - DNA, 506 bp, Glycine max
caaatacaccatgaagtcattgacctacctaccctttttcggccaggagcacgcgtgagtgcttttaatgtataccactcatttgatggtacacagccttcaacatcaattaaaagacctgttccgatgcaaggagctgttttacaatcatcaaaaccagacatggaattttgtagagcgcttgaaggaatttgtggtgatcagtcagtgcctcaccagtgtggccatggctgctgtgctgctccagatggtagaaagtccgaaagctctttgttgggacccgaatttgttgaattttcggaacccccatctttcccaaattttgagttggctgcaatagctacagacattagtaaccttgcttggcttaaaagtggattggagagtagtagtgccaaaatgatgggcaacacctctggaagggtagtatctaatggatctcaagtacatattggccattaaaatgccaaatagatcatcattcctattctgagtgaggactggat

SEQ ID NO: 21419 - DNA, 306 bp, Glycine max
aactttcctctctctttttctctctctctctctctccttgacgtgcttgtatcaatggctaaagccttgttggcatcagtgccgcttttcctgctcctagcagtgagtagtagtgtggttgctgaagagcttgaaactcttccaccttcttaccctcaccctcactctcccacacaagctcctcttgcacccaccagcaagtgctcctcacccccaccaccaccaccaccaccaccctccagcaccagctcctgcacctgttcatccaccttctcctcctacctatcataattaccctttttaccc

SEQ ID NO: 21420 - DNA, 675 bp, Glycine max
ctgtagacaatggggaattggatgaatttggtcctctcatgagacagccattctttgatcttcatcgaagctatagtaacttcagtaatgaatacacgaatggctttgggtacgaaggagactggggtcctcatccggctgagatcgaacctagtggaattgaactttttgagtaccatgatgatgacgaaccctctgaagatgtcgacataagcatcaagggcaagaggaaagatgatggtggcatctttttgagactaagaattgctgataaagaaggtcgcatccgaaatatttatttcccatttgacatagagctggacacggcaataagtgtggcaactgaaatggttgcagagctggacatgactgatcaggatgttaccagaatagcagatatgatagatggggaaattgcttccttggtacctggatggagaccaggaccaggaattggtgggactccccggtttgctaatcaagggttatggcacaattggggggctaatcatacctctaagcggttcttttctggaatttttttaaaccatccaaataacaagaacttggaacttctcgattggtggaaggccatgatgtgcttcaatgcatggaccggttggggagattacctttcaatctgaagagtatgacaattaatgctagaggggatct

SEQ ID NO: 21421 - DNA, 409 bp, Glycine max
gcaactgcaactacaacaacattcattcattcacagctgtcacgccgtgaacggaaaatggcaacggcgagacgcagtttcccgcctatcaccgaatgcaacggaacgacaccgtgcgagtctgtggccgccgacctcgacggtacgctcctcatctcccgtagctcgttcccgtacttcatgctcgtcgccgtcgaagccggcagcctcctccgcggcctcatcctcctcctctcccttccgttcgtcatcatcgcctacctcttcatctccgaatccctcggcatccagatcctcatcttcatctccttctccggcctcaagatccgcgacatcgaactcgtctcacgcgccgttctccctcggttttatgctgcggacgtgaggaaggagagcttcgaggtgttcg

SEQ ID NO: 21422 - DNA, 1175 bp, Glycine max
ggtgatgctctgaaacctccgtttccgtgcttccaagaactcctttaccaacctcctggttcagacggaatcactgatgcccccatttttcttatacaggtgacccgtttgaagtgcggtggtttcatcttggcaattcgtttcaaccacgtcatggttgacggagttgggctcattcatttcacactcaccgtggcagggatagcacgcggagccatgaaggagcctccattccaacccgtgtggagcagggagcttctcttcgccagggatccgccacgtgtcaccttcaaccaccgcgagtacgaacaactcacagactccaacgatgccgtttcaacagacttcgagcagcgttccttcttcttcggccccaccgaaaccgcctccatccgcgccctcctcccccgtgacctcgaccaacgcgccacaacgttcgaggtgctgacgtcatacgtctggcgctgccgcacgaaagcgcttcaaatccctccaaatgaagatgtgagaatgatgtgcatcgtcgacgcgcgtggaaagttcgatcctcccttcccggcggggttctacggcagctgcttcgcgtttccggcggcggtgacgggcgccggagatctctgcgagaaaccgctggagtacgcggtgcagttgatacagaaagcgcgcggcgaggtgagcgaagagtatattgattcggtggcggatttgatggcgagtgagggaaggcctttgttcactgtggtgaggtcgtgtctggtgttggatacgacggaggctgggttcagaaatttggactttggttgggggaatgcgctgtatggtggaatggctgttgctggtgctggtgctttccctgcggtgaactttcatgtgccgagtcagaatgccaagggcgaagaaggaattctggttttgatttgcttgcctagccaagtcatgaaagcctttgctaaagagttggatcataacatgcatgcttcagaagcaacttcattaattaattaattaattaattatgacatgagatctttggttggactcatccagtgctgtttacgtattatcaagttacttgaaccttggagtattatcactgtgtgccaaataaaaattgtgtgttaacaataactcttctatcataattaattacgtttcttaattaaaaaaaaaaaaaa

SEQ ID NO: 21423 - DNA, 491 bp, Glycine max
gacaacgtcaccttcataaatggaaggacacgcctttcccagaacctgcatggtccatcttcttgttccatagtttcttagctaacaaaaatttacacaaactagtgtccctccgacagcactttcttccttaataactccaaaaactttggtacctttcaatcaaccaccgaaaagttagggactttaatttttttaatttttttttttatatgaagatgtgtgattgatcgattccctagtgaaggggtaaggggggtcatgtctttcggtgggttaagtattgctttgagtcttgtctttgggtgtcttctgctggctctgtgtgctcagctttactatttcttatggtggaagaagagaaggacacagatggatattgagatggatgcaaagggggcggtttattgggggtgctggaaggccaccccttgtgccatgatgcatggtggcaacaacactggaagagggggtgtgaatagcagggacat

SEQ ID NO: 21424 - DNA, 940 bp, Glycine max
tcggttacaagcaaatagtaagaacaagaacaaggcctgctttgtgcttttggccttaagcttaggggaaaccgcgtattgaaagaaagagacacagccaagggcttcttcttcttcttcttcttcttcttcggataacgtgttaagggaacactcttgttataaccgcctaccgtttctcctgcaaaacagagcttgattctcaatacaccattctttcttctcctttcgaagcactgccaaataaaaatggagtggcctgcgtgtacggacgaatacgaaaagctcataattcggatgaacactcccagggttgtcattgacaattccgttttctcctcagctacgctagtcaaggttgacagcgccagaaggcatggtattctattggatgctgtagaagtgctagctgacctgaacctttcaattaagaaagcgtatatttctgctgatggcaagtggttcatggatgtttttcatgtcaccgatcaaaatggaaacaagataatcgacgagagtgttttaaaatatattgaacagtcacttgggaacattcactatggaagaaccaacctctctaacggtctcactgcgttggaattaacaggaactgaccgagttggtcttttatcggaagtgtttgctgtactggctgatcttcaatgtgatgtggttgagtctaaggtttggacacacaatggccgtattgcctccttaatctatgtaaaagattctagttctgggtctgctattgaggactctcagaaaattaataagattgaattgcgcttaagaaatgttttgaagggagacaatgacattagaagtgcaaaaatgtctgtctctatggccgggatgcacactgaaagaaggcttcaccagttgatgtttgttgaccgtgattatgagaggactccaattcttaaattgacttctgata

SEQ ID NO: 21425 - DNA, 1349 bp, Glycine max
ctttggtgggtgatatacctcaaggcctaccaaagaaattgatgcccggcatcaatttctttggtgggtgatatacctcaaggcctaccaaaattttctgttccaaaatcttttgagtatgcacagtccttaattccaactgctcttctcataactggtgtggctatattggaatcagtgggaattgcgaaggcattagcagcaaagaatgggtacgagttggattcaaatcaagagttgttcggtcttggtgtttccaatgttcttggttcatttttttcagcataccccacaacaggatccttttcaaggtcagctgtaaatcatgaaagtggtgcaaaatctggtgtatctgggattgtttcaggaattataatgacctgtgcacttttgtttctaacaccattatttgagtacatacctcagtgtacccttgctgccattgtgatctctgctgtgataggtctggtagattatgatgaggccatttttttgtggcgtgtagataagaaagattttcttctttggaccattactagcactacaacattgttccttggtattgagattggggtccttgttggggttggggtttcacttgcgtttgtcattcatgagtcagcaaatccacatattgctgttttgggtcgtttgccagggacaactgtttataggaatgttaaacagtaccctgaagcatatacatacaatggaattgtaatcgttcgtgttgatgctccaatttattttgcaaacacaagttacatcaaggacaggttgcgtgaatatgaagttgatgttgattgttctaaaagacatggacctgaggttgaaagaatttatttcgtgattctagagatggcacctgtgacctacatagattctagtgctgttcaggctttgaaagacttgtatcaggagtacaaattacgggacattcagattgcaatatccaatccaagtccagaagttctgcttaccttgtctagatccggtctggtggagttgataggcaaagaatggtactttgtgagagtacatgatgctgttcaagtttgcttgcaacatgttcaaagcttgaaaggggcatctaacagtccacaagcaccattctcttcagtagaggacaaaccaagtttgtttgcccgattatcaaaagagagaggggagaagctttcaattaccgacttggagtctggtaatggcaggcctccactccctgaggagagagattccaaattggagccattgttgtctaaagatcattgaagtctactttgtatcataaggtaaaaagtgtatttagccattctttcagaaaaaataaaatgaataggttaaagttaaac

SEQ ID NO: 21426 - DNA, 555 bp, Glycine max
gatggcaaacgacaatgaaattctgaagtccagggaaatcattgatgacctcaacaagaagcttacaaactgtatgagcacaatagatgctaagaatactgaacttgtaaatctacagacagctcttggacaatattatgctgaaattgaagctaaggaacatttagaaggagatttggctcgtgcaaaggaagaaacatctaagctttctcaactgttgaaagatgcagactgcagagcaaatgtattgatcagtgaaaaagaagaaattttagcaaagctttctcaatctgagaaggtacaatcggaatggagaagtagagtaagcaagcttgaagaagacaattccagattgaggcgagctcttgagcagagtatgacacggttaaatagaatgtcagtggattctgattttcttgttgacaggcgcattgtgataaaattactgatcacttatttccagagaaaccacagcaaagaggttttggatctaatggttcgcatgctgggattctctaccgaggacaaacaaagaataggtgttgctcaacaagg

SEQ ID NO: 21427 - DNA, 534 bp, Glycine max
ccgggttctccgtaactcacagtcagttcgccgaatatgatgaggaaattaatgaggaggatgagagactaatggaagcatttgcattgaaggagcctggtcagcagaaaacacttgctgacctcattgtccaaagaataaaagaaaaggatgcgtctgttgcttcagaaaatcgacccgttccaaaattggataactccataattgacatatacaagggggttgggactcatctcagcagatatacaataggcaaaatacccaaggcattcaaacacattccctctatgcaactttgggaggaggtcttgtatataaccgaacctgagaattggtctccaaatgctctttatcaagccactaggatttttgcttctaattttggtgcaaaaaaggcagagcgcttctacaagcttgtgttgcttccaagagtgagagaagatataaggaagaacaaacggctgcattttgctttatatcaaactctgaaaaaggctttgtacaaacctgctgcattctttaagggcatactgt

SEQ ID NO: 21428 - DNA, 491 bp, Glycine max
gaaaatgctggcttttttttttctttctcgtctagagaagtctgacattgttttgttcccgaactctttgctctgctttttggagggttttgaaaaaaatttgaagagatttattagcacttcccagcaataacacgattagcctctcttctcagtttcaattcgttttcaattcttgccgcatcgatttccaaccctaatattctaccatgactgagtactgggtcagccagggcaacaaatggtgcgacttttgcaaaatttatatatcaaacaaccctggaagcataaggaatcatgagcttggccaacgtcacaaagataatgtttccaagaggttggctgctatgagaaaagagaatattgctaaggagaaagaacagaaagaaactgctcgtgccattgagcaaattgaagcataagcgcaacgtagctatcaaaaggataaagtgaagtttgaggagacgagagaatcacatgaattggatgac

SEQ ID NO: 21429 - DNA, 403 bp, Glycine max
agcttgctgaagaaggagcagtttctgcagagacttatagtgcaacaatgaatgctttaagagagggggctaaaagggtcggtattatgaaaaaaaatgttgcaaaagtcacacctccaaacactcagggtaatggaagctgcctgaaagaccattgcatgaatagcccttcatcaatttctgatgtcatcccatcattatggccttgggcaagattcagtgtctcatcacttcaatcttaatgacctggggctttctgttactgatttgaattcccctagtatggctcctgtttctattcaccgtgatggtggccctccaaataacacttattgatttgaatcacccttgtaattattagtttatttggttcagatttactggtcattgctttatttgacta

SEQ ID NO: 21430 - DNA, 415 bp, Glycine max
caacaatgctagattttatccatatttcaaggattgtataggagtaattgatggtatgaacattccggctcatgttccagccaaagatcaatctcggttccgcaataagaaaggtatcctatctcaaaatgtgctggcagcatgcacatttgacctgcagtttatatttgtttatcctggttgggaaggttctgtcaccgactcacgagtgttaagggcagtccttgataacccagatcagaatttccctcaaatacctcaaggaaagtattaccttgttgacaagggatatttaaatacagaagggtttattgctccttaccaaggggttcggtaccagcattatgagtttagaggcgctaatcaattaccaagaaacgcaaaagagctgttcaatcacaggcattgttttctg

SEQ ID NO: 21431 - DNA, 622 bp, Glycine max
tgatctttaacacctacatatggtggatgaacactttctctatgaaagtcttacgaggatcatttgatgaaggttccacagagtacgatgaggttcctcgcccaatagcatatgggagagtcctcaagacatggtcaaaatgggtagatgacaacattgactcaaatcgaactaaagttttcttcagcagcacgtcccctcttcatatcaagagtgaggattggaacaacccagatggtataaaatgtgccaaggagatcactccggttctcaacatgtcaaccccattggatgtgggcacagatcgtcgcctttttacaattgccaacaatgtcactcagtcaatgaaggtgccagtgtacttcattaacatcacttctttgtcagaattgagaaaagatgcacacacttctgtttacaccatacgccaaggcaaaatgctaactccagaacaacaagctgatcctactacttatgccgattgcatccattggtgtttaccaggattacctgacacttggaacgagttcctctatacaaggatcatctctcaattttgacctacaacaaacaacctatagatattcttcacacatactttaattcttttttccttttttcc

SEQ ID NO: 21432 - DNA, 633 bp, Glycine max
aagcgcgtaagagtaggagtaggagcacgtaagacagagcagagaagattgtttcaaatttcaatgcaaagggcgttgcaatcgatcaacgatctacagttgcgggacccaccaaactaccaactacagctccagtggcagcgccgcactcgtcttgtctcaaacaaatgcaacaagcggttattcttatagttattgaggaggagtagtacttataagaggaagcagatttgattctgattctaatttatttgattctctattatttataaattgaaaagaaagtcacgctggcggtgaagaacgtttctgcggcggccgaggaggaggaacacatgacgctgatttccgatgttgagaaccttgcggatgccgaaatccccgacaccgcacatcaaattagcaccgattcatggtttcaagtggggttcgtgctgacgacgggaatcaacagcgcgtatgtgcttggatattctgggaccatcatggttcccctgggttgggcagggggtgtggttggtttgattctcgccactgcaatatcgctctacgcgaatgctcttattgctaggctccatgaaatatggggaacaaggcatattctatacagagatcttgctggatttatctatt

SEQ ID NO: 21433 - DNA, 1090 bp, Glycine max
ggacatgcctgctcctggccagggaagcagcatgattggtggtggatggcagctagcatggaaatggtctgaaacagaaggtgttttcaagagaatatatttacaccaagaaggtggtccaactggatctagtagacgtgggtctctcatttcacttccaggtggtgatggtgatggtgagattgtccaggttgccgctctagtgagtcagtcagccctttacaacaaggagcttatgcatcagcagccagttggaccagccatgattcatccatcccaaacagctgcaaaagggccgagttggagtgacctttttgagcctggagtgaagcatgcactgattgtgggggtggggattcaaattcttcaacagttctctggtataaatggggtgctctactatacacctcaaattcttgagccggcaggtgttgggtatcttctttcaaacctgggcctcggttctacttctgcgtcttttcttatcagcagcgtgacaaccttgttgatgttaccctgtatagctgtggccatgaggctcatggatatatctggcagaagaaccttgctgctgactacaatccccgtcttgatagtatcacttctcatattagtaatagggagtcttgtggaattggacagtactataaatgcttttatctcaacttcgagtgttattgtctacttctgttgtttcgtcatgggctttgggccaattcctaatatcctttgttcagagatcttccctactcgagttcgtggtctatgcatagctatatgtgctcttacattttggatatgtgacatcatagtcacctactcgctcccagttatgcttaattctgtgggccttggtggtgtctttggtatgtatgcggttgtgtgcatcatagcttgggtgtttgtcttcttaaaagttccagaaaccaagggcatgccactggaagttatcattgagttcttctctgtcggggcaaagcaagctcaagttgccaacaatattaatacctgactttacatacgacccattggatttttttcaatataaaattattttgaatctatgaatatcttgtttttttcctcttta

SEQ ID NO: 21434 - DNA, 655 bp, Glycine max
cccacgcgtccgatgacttgcacccatgcagctctaaagaggaaagatttcctccagttaggtttcaagtatgacaacttgctaatggaagaaagtgcccaaattttagaaattgagactttcattccaatgttactccagcggcaggaggatggtcatgcacggcttaaacgctgcattctgattggtgaccatcaccagttgcctcctgttgtgaagaatatggcttttcagaagtacagccacatggatcagagtctatttaccaggtttgtccgattgggcattccttacattgaactaaatgctcagggaagagccaggccaactatagctaaactttacaattggagatacagagatttgggagaccttccttctgtaaaggaggaagtcatattcaatagggcaaatgctggatttgcttatgattatcagttagtggatgttccagattaccttggtaacggggagacaactccatctccttggttttaccaaaatgagggagaagccgaatatgttgtcagtgtctatatatacatgcgtcttttaaggtatcctgcaaataagatatcaattttgactacatacaatggtcagaaacttctcattcgtgatgttgtaaataggagatgcgttccatacgatttca

SEQ ID NO: 21435 - DNA, 600 bp, Glycine max
ggctgcagctgaggcaatagaaaagggacgacaaggcaggggaagcaagcctttaattccatcttccatggattttatcccaggtggtgttatgcagtttacttctggtgaagtaaagccaaagaaagacctgctagctgaagatattttgaagaagaaaatgtaccctaagagggaagagtttcaatggcgccctttcctcttctgtgcaaacgctttgatcttattgatccatatatggggaagccgccacctgctccacggattaggagtaagatggataccttgatttttacatcagattcagtcaaaggtaccaaagtggacgggcctgttacttcaaagaaagacatctcatctttgcaacaacctactaataaagacataaccaaaagtattactgaaaatgaaactgaagaggatgtggaagtcgaaaatattgaaaggccagttgacctatacaaggctattttctccgatgattcagatgatgaaggggaagaccctagcaataggagagtagagaatcaagaaaagaaagctgaagtagctaatacagcattgagccgtttgattgctggtgattttcttgaatcattg

SEQ ID NO: 21436 - DNA, 766 bp, Glycine max
gtatgataatgggtgcagctttgtcaactgtttactataatcttaatctaaggcaccccacactggatttgcccatcatcgactatgatttggcactgctcattcaaccaatgctcatgcttggcattagcattggagtggccttcaatgtcgtagttgctgactggatggtcacaatgctgcttcttgttctctttttaggaacatccacaaaagcattcttaaagggtgttgaaacatggaaaaaggaaaccataatgaaagaggaagatgctaggaaacaagcgacaaatggtgttggttctgaagtagaatacacaccaattcccagtggacctggcagtgacattgcaaaggacaccagaaacgaggaggtgtctatgcttgaaaatgtgtactggaaggagtttggacttcttgtttttgtttgggtttcattccttggaatacagattgccatggtttgttactttcttagtaattacttgaattcccatgtcagtaattaacatgttctacaaaagatcagtctgtaccctggaatctttctaatttgactcctaaacatttcctattggtaatggcaacagaaccagacaagcaaatgttcaacaatatattgggtactgaacatgttgcagattccaatttcagttggggtatctggatatgaggcagcttccttgtataaaggacggagacaaatttcttcagtgggagatcaagggaaaacttttacttctcagcagctaactatatattgtat

SEQ ID NO: 21437 - DNA, 293 bp, Glycine max
gtgtattctacttcagaaccaacaccatttcccagtggacctggcagtgacattgcaaaggacaccagaaacgaggaggtgtctatgcttgaaaaggtgtactggaaggagtttggacttcttgtttttgtttgggtttcattccttggaatacagattgccatgaaccagacaagcaaatgttcaacaatatattgggtactgaacatgttgcagattccaatttcagttggggtatctggatatgaggcagcttccttgtataaaggacggagacattttcttcagtggga

SEQ ID NO: 21438 - DNA, 689 bp, Glycine max
gaagctttgaataaatcacttaaggatttacttgatggaattcaagaagacttcgctgctgttgtggattgggcacacaagattgaccctttacgctgcatatcaatgcatggaactacagaacgctatctctctggtcagaaagctgatgcagcaggatttgtacgtgatttgcttcgtgacctggagtctcggatatctatgcagttcaaccgatttgttgatgaagcttgccatcaaattgaaagaaatgaacgcaatgttcgccaaacgggtgtcctaccctacattcccagatttgcaacccttgcaactcggatggagcagtacatccagggtcagtctagggatttggttgaccaagcatatacaaaatttgttagcataatgtttgcaactttagaaaaaattgcacaaacagatccaaagtatgcagatatttttctttttgagaactatgctgcttttcagaatagtttgtatgacctcgccaacattgtgcccacattggccaagttttatcatcaggccagtgaagcctatgaacaagcttgtacacgccatattagcatgattatctactatcaatctgaacgccttttccagtttgctcgaatgattgaagactcgatgttcactgttgcacctgaagagattcctctctagcttggacttgcatatatggatct

SEQ ID NO: 21439 - DNA, 213 bp, Glycine max
gaagcaacccacgtaaagtaattaccagttcgaggcacgaaggatggtggaaaacacaggacaaggaggaggcatatggttccagttgttccaccccaaaacggcgccgttcgcgtcgtcacaagacgctctttgtgttcctgtgggtggccacgctggcctcggtgttggtgtggcagaggaccaccatcagcgggtttcttgtgctcggcg

SEQ ID NO: 21440 - DNA, 779 bp, Glycine max
cttgtcaaggtgaaccttgtcggctgctggaatttgacggataacatagtttcagtattggccacactacacggaggaaccctcgaattgctaaatcttgatggatgcaggaagattaccgacgcaagcttggttgcaatcgcggataactgccttctgcttaatgatctagatgtgtcaaagtgtgcaatcactgatgccggtatagctgttctttctagtgccaaacagcttactttgcaagtgctttctttgtcaaactgttctggtgtaacaaacaagagtgcgccttccctaaaaaagttgggccagaccttggtggggttgaatcttcaaaactgcaattcaattggctgcaacacagttgagttcctagtggagaacttgtggagatgtgatattctggcttaatcatgttagaaactagaaacaaataaaactggctaaatcagggaaggagatagaattgtgtacaggtcacattcagcatacattttggctgatatttctatcaagggtggattggtggcagtttggtgatatgggtgttttccagggaactttggcttgttcctttatgacccatttttttcgcaagcatttcgaaatgcttgttccaacttaaaccctttaggccttggcttactggggcctcttctttcatgactagggtcccctgagaatacagttactaagtcttggtttgtgcatgcttatgctaggtcttattttgtactgctggatgttgacaataaataacatgctttagcttctgtcgc

SEQ ID NO: 21441 - DNA, 1063 bp, Glycine max
catgaagatagctacaactggagaaaatatggtcagaaagacatccttggagccaaatatcccagaagttactataggtgcaccttccgcaacactcagggctgttgggcaacaaagcaagtgcagagatcagatgaagatcccacaatgtttgacataacttacagaggaaatcatacctgttctcagggaaacaatgccgttctgccacccaagtcaccagaaaaacatgagaaaccagcacacagtcataacattgacattcaccatgcacaggcatcacaagaaagccttgcaaagttcagaagtatcttgtctgtcaacacagataatctgaacaatggagatatggcatatcctttcactttcccttcaacttcatttggatgcatgaaacaagacaaccacagcttgattccttgggccctggagaacgagtccttcttaagcgacctataccaaacacaccttttatccacaacaataccagaatcaaactatttcccatctccaactttccagatgaatgtgtttgatgggatctacagcaagccacattcggaatccgatatcaatgagatcatttccaccaacacatcagcaaccaattctccaattcctgatttcaatttctcacttgatccagtggaaattgacccaaatttccctttcaataccccaggacttttctcctgattgcatttcactataaatggaatactataagcacatagtcttcctaaaatgggacaacttcagacagcagtaaaattgtagaataaagaatgagcaactgcagcacttatgaaggtccttgtggcttgtagtcaatatcagaattacaattttggctccgtgttagcaattagcagtatgcactttcaaataaaatagtttctgcaaatttgcattggtacaacctacaagacacgtctttagtagaagggcattaaaagggagcagataaaaaattacacatcaaaattggatacgctggccaaaactctgtaatttcattccaattgatgacttagttacacaaatatccatatatatttacagc

SEQ ID NO: 21442 - DNA, 256 bp, Glycine max
  unsure (1)..(256): unsure at all n locations
nnnnnnnnnnnnnnnnnnnnnnnnnnnnnnnnnnnnnnnnnnnnnnnnaccaatgcaaatttggagagactattttatttaaaagtacatactgctaattgctaactcagtgccaaaattgtagaataaagaatgagcaacgtgcagcacttatgaaggtccttgtggcttgtagtcaatatcagaattacaattttggcactgagttagcaatttggagagactattttatttaaaagtacatactgctaattgc

SEQ ID NO: 21443 - DNA, 704 bp, Glycine max
cccacgcgtccgcggacgcgtgggtttgtcttccacacacacaccccactgaccacactcttataagtgcttccgtcgtccaaacacttttttaaaaacttttctcaatatctcaaaaatcagtatattctcccttgttcaatcaattactcttcttccttcccttccttccttccttaaacccaatcgaagaaaaataaaatgttgttccacaatccaccacataccgactgaaaaaaaaaaactcagtttgtgggtttattatactttgattgattaattaattattagttattagttagttggttaatcaatggaagagtgtcacacggtgttcggaaagtacgagatggggaggcttctcggcaaggggacgtttgccaaagtgtattacgggaagcaaataagcacgggcgagaacgtggcaatcaaagtgatcaacaaagagcaagtgagaaaagaaggaatgatggaacagatcaaacgtgaaatctccgtgatgcgtttggtgcgacacccaaacgtggtggaaatcaaggaagtgatggccacaaagacaaaaatcttcttcgtgatggaatacgtgcgtggcggggaactcttcgccaaaatctccaaaggcaaactcaaagaagatctcgcccgcaagtattttcagcagttaatcagcgccgttgattactgccacagcagaggtgtatccc

SEQ ID NO: 21444 - DNA, 535 bp, Glycine max
cctttgcgtccggttgttagccgccacgtcccgggtcaggatttttaacccgtttccctttcccacgcgtccgcccacgcgtccgctcaaaatcagtatattcccttttgttcaattactcttcttccttccttaaacccaatcaaagagaaacaaaatgttcttccacaatccagcacataccaactgaaaagaaaacccagtttgtgggtttatactttgattgattgattaattaattattagttagttagttaatcaatggaagagtgtcacacggtgttcggaaagtacgagatggggaggcttctggggaagggcacgtttgccaaagtgtattacgggaagcaaataagcacgggcgagagcgtggcaatcaaagtaatcaacaaagagcaagtgagaaaagaaggaatgatggaacaaatcaaacgcgaaatttccgtgatgcgtttggtgcgacacccaaacgtggtggaaatcaaggaagtgatggccacaaagacaaaaatcttcttcgtgatggaatacgtgc

SEQ ID NO: 21445 - DNA, 694 bp, Glycine max
agcatatatttatctttattctcatggagaagtctcatatgctgcatcacaaccagtgctcttatatgctgctgctgtaatggttttgatattcccctttgatatcttttatttttcatctagatatttcttcttaaggacactctggcgaatagtttttccattacaggcaatatcattcgcagattttttcttggctgatatcttaacttccatggctaaggtcttttctgacttggagcgttcagtgtgtagaatggtccatcgacaggttgccacaattgcttggttggaagctgattctgtttgtggcagccactctgttgcaatccctttggttcttgttttgccttatcttttccgcttaaaccaatgtctccggcagtacaaagatactggagagaaaactactcttctgaatgctttgaaatattcgaccgcagtgcctgtgatttttctttctgcccttaaatatcacgtcttccctgagaggtggacaaacttttataggcctctctggcttctggcaggtgttgtgaaactcatcatactccttctactgggatgtgaatcgagattgggacctaagtggcttcactcgaatattcaagtttaacaagccacatctgttctcacatatgttacatggaacgagatgggtttacttttgggtgattggaagcaatctggtttt

SEQ ID NO: 21446 - DNA, 417 bp, Glycine max
acattgtcgacactcgacagacatataaagtaactgaagctcaaaacggtgatggaagaaccgaacaagacagagaacgaagatgacagggacgaatcagaacaacgagtgtggagttggggtgctggaaccgagggacagttaggaacaaagattcttcaggatgagcacttccctcaactccttcaccaattctctctctcctccatctcttcccttgcctgtggcggtgctcatgtcatagccttaacctctgctggaaaggcactatcatggggtaggggcaattctggccaactgggccatggggaggttgtgagtaacactttgtatccaaaggctgtaacatcattggatggctatttcataacccatgtctctgctgggtggagccactctggttttgtttcagatact

SEQ ID NO: 21447 - DNA, 561 bp, Glycine max
  unsure (1)..(561): unsure at all n locations
ccccgcagaacacattcttccacttcgtctgctcctcgagcgcgtccctcctacgcgccgcgatctcccactccttcccttacctgaacttccagctatacaccttcgacgactcccaggtctcgggactcatctcaagctcaatccgctccgcactggattgccccttaaactacgcgcgctcctacttggccaacctcttgcccatctgcgtgaggcgcgtggtgtacttggactccgatctcatcctcgtcgacgacattgccaagctggcagcaacaccattgggcgaaaacaaggtcctggctgcccccgaatactgcaacgccaatttcacctcgtacttcaccccaacgttctggtccaacccttcgctgtctctcacgttcgcggataggaggccgtgctacttcaacacgggggtcatggtcatcgatttggagcggtggcgggagggggattacacgacaaaaattgaagagtggatggagctgcagaagaggatgaggatctatganctgggttccttgccgccgtttttgcttgtctttgctgggaaca

SEQ ID NO: 21448 - DNA, 671 bp, Glycine max
cgtttattcatgtcctttttggttgttttctttttctttttcggtacattacatctattattgagtttgtgcatcccgcgagtgtgacttggaccgtattcttttaatcatgctcctgcttcgcgtagtgactcatcatacttctgccaaattactatgtatatttcgttcataatagctatttatttattgttaaactaccctgtgacagattctacagcttgagagaagattacaagaccaatttcaggtcagatccacgttagaaaaggcacttggattcagatcttcatctctcgttaattcaaatgagatgatgatacccaagccagccacagaattaattagggaaattgcagtgttagagttggaagttgtgtatttggagcaacaccttctctccttgtaccgtaaagcttttgatcaacaattatcttctgtatctccgacttctaaggaggaaagtgtaaagttccctctaacaacacatagcgcacgattcatcaatttttctatgcctgaggtcttaaccaagagagaatgttctacagtacaatctaatgagcataataagcttgagactttgagaaaggagtatgacagatatgagcctgagacttttaggaaagaacagagtagatatctgctagaagaaaagcatttagattctg

SEQ ID NO: 21449 - DNA, 408 bp, Glycine max
ggaaaagagggtgctacgacgccgttctgtgtattatccttccccttccccggtcagccgtgttgttttgttcggaatctgaaatcggaaattggaagcagaagaatagtcttcagagaagggtaaaatcgatgagtaggaacgattccaagtacttctccaccaccaagaagggtgaaatccctgagctcaaagaagagctcaattctcagtacaaggacaaaagaaaagatgctgtcaaaaaggttattgctgccatgactgttgggaaggatgtctcatcattgttcactgacgtggtgaattgcatgcaaacagaaaatttggagctaaaaaagctagtctacttatatctgataaattatgcaaagagccaacctgacctagcaatacttgcagtgaatacat

SEQ ID NO: 21450 - DNA, 456 bp, Glycine max
  unsure (1)..(456): unsure at all n locations
tacctattcactattccttaaaaaactcgaggagatggcaacaccaagagaactaatcatcaattctcatcttttttgggcttgattttggagggatcagcctctcgtgatcaacatggcttgatctccacaagattatccctttgacacttcaagtactaccaacattgattaaatcagactagtgaaatgtcaaaagaaaaggactcagctgacaatcaagtggatacattttctgagccagtcatgttggagagatttcatacacttatggagattgacaatctgcatcttgaaccagattgggatccgattgctgaacttgatagcatcttatctgatagttataatatgtcttccatgtccactcactcagcaactgtttcagaaattgaagtccatggtccaaatgtggcagctatccttgaaaaatnggagacccttttggagaccctc

SEQ ID NO: 21451 - DNA, 423 bp, Glycine max
  unsure (1)..(423): unsure at all n locations
ctcgagccgcaaaatcattgcagcctcctctggttctatgaaagatgatgaagttgctcaactagctttggatggtataaaatgtggcgattttattgtttcttccaatttcgagggaattgcactatccctagcaactgcaggtttatcccctcagaggtctttcttaatggcgtttcttgaggttgttgctgctggaatcctacggattgttgcactaggtacgcagtggacttggtatggaagcatagagaaatatcacagccaaaggaagggtaagtgttgcacaaaattatatatctatgaagggatgaggaaatcatctcttattttgtcttaatttaattctcatttggccaataacttngttaagattaacaaaaaagtgttacttattctatctatctatggggttctatagtt

SEQ ID NO: 21452 - DNA, 619 bp, Glycine max
  unsure (1)..(619): unsure at all n locations
cagttgtaaggctgttanaacataacatcatcaaatttttaagttctaaggtccttcccccctgtatactattgtgtttgcttgcaacttttgggtatggatgctgctgcaagtcaaagtctctatccattgcaccgttgcaaaactgttcacctggttaggcatgcgcaaggagttcataatgtagcaggagagaaaaaccatgatgcatacaattcttatgagttttttgatgcacacctaacctctctcggctgggaacaggttaataatctgcgaaagcacgtgaaggcaagtggactttccaaaaatattgaacttgttgtcatttcccccttattaaggaccatgcaaacagcagttggagtctttggtggtgaagcatacactgatgggattggtgagccacctctgatgacggaaaatgtcggacacagtgatcatcctgcagtttctagtatgaactgccctccattcatagctgtggagctttgccgagagcaaataggagttcatccttgtgataagagaagaaccattagcgagtaccggaatatgtttccagcaaatgatttttcacttattgaaagtgacgaggacattttatgggaatctgatg

SEQ ID NO: 21453 - DNA, 280 bp, Glycine max
ctgtatactattgtgtttgcttgcaacttttgggtatatagttttgcaagtttcaactgttagctcctcctagctgttgctactaacgctgattgaccacgtctctatgcttgatttgtgtgattgttttgtctatttagcttgtctactattaaataacacaagggtatggatgctgctgcaagtcaaagtctctatccattgcaccgttgcaaaactgttcacctggttaggcatccgcaaggagttcataatgtagcaggagagaaaaaccatgatg

SEQ ID NO: 21454 - DNA, 618 bp, Glycine max
ggatgatcctgtcatagtgaaaaatgtcccttactataaggctaagaaggctctggagacagaggttatgaagattgatcctccaccaagaccgccaaattggggtgagcttgaccttccattgaatgcatcatcttggagtgaggaggatctccaagatccagataagttctatgaaatgactgttcttcttaatgcccaaagagaaatctctgataagatcttggatgcacagtgggaaactaaatggcgtcaggacaagttgaatgagatgttggaggcaaaggtgaagccttacattcaggatatagacaatgcagttcttcctgagcctattttattaaagcctcaaaatcaggaaaagagacaacggcggaggtggttcttcttttgacaacatggataaagctactgtatgcttgaacatgcttgtttgtagtcctaattttttgttataatctgtaactatttatacactgttggatccccccacaagcacacatgtgcctctgttgtggtcatcatttttgtggaggaaacaattgtttgtgacacaagaaatacaagaaaagtctagagaaacatgcaagaagcaacaaaagtcttcttcacccggcc

SEQ ID NO: 21455 - DNA, 696 bp, Glycine max
ctagttttcagggttttgctcttgctccaagtgataatttgtcttctagttcaacggagtattatgtgggtaaaggtgttggcaccatagcagatgaacgcaaaggagggtttattcatctcccgagccgtcctagcatcaatgcaaatggggttcttggccaaatattgtttgatgtttgtgtgcccaagaatgttgaggattggtgtatcaggtcaaattccaagaatgcactagtagcaggtacaaggaagcatgttccatttaatccgataaaatgcattcggcgttcaaggttgtaagattgttgtgttgactgacagaagcttaaggagaattatgcttggaaggttgtgttgtcttcaaggttcaaaatttttagggagatctaatgggcaaaagagatgtgtagtagtattaatacctgaaataagaggctaacggactatataggttaccacctaagctgttcttttagcactgtggacttggtaatgtgattgagcagtttgcctttttcttaatgtaaaattgtacagatacttcaacaacaacaacaacgccttatcccactaggtggggataaaaacaatgttttgactgagatcaccttgataagattatagggggaattataattgtagccccaaattctgatcgtaaagaaagtactaatgactgcttctgagctcaata

SEQ ID NO: 21456 - DNA, 437 bp, Glycine max
acctgctgtgtcttcctctaatatgtgcagttttctctgcagttgacacttgaaaccacaatcacaatgatctcaatcacttctactgaattgaactacttagtcttccgttacctccacgaatcaggttttactcattctgcatttgcattcgggtatgaagctgggattgataaaagcaaaaatgatgatagtgtggttccaccgggtgctcttgttactttcatacagaaaggaattcagtatcttgagctggaagcaaacttgagtggtagtgatgctgacatggatgaggatttttcatttctacaacctctggatcttatcacaaagggcccgactgaactacacaatatagtaaaagccaaaaaggaaaatctacgtcagcataaatttgaatcaaataaaataatgaatgacttgagtcagatgactca

SEQ ID NO: 21457 - DNA, 683 bp, Glycine max
gcaagtagcagcagcctcaaagtgccctacaccctcctcacttaagctctcatcctgatccctaaaatgaagatcaaacaacaatctctcttctcagcctcaattttactagttatagcacttattaccttcttccacaccacttcagcccaactcacaccaattcaagccccagtttcatcacccccatccccaccacaacaacaaccacaaccaccagcattcacaccaccctctccaccagccactgctccagccccaggattcaacacagtacccttagtccccgtgacaccaagtggcgcccccacacccaccatcccaaaagcaccatccattgacatagtccaaatcctaagaaaagcaaagagattctccgttctcattaggcttctcaaaaccactcaactcatcaaccaactcaactcacagcttctaacctcaggctcaggagggttaaccctcttcgccccagaagacagtgccttctcaaaactaatagctggtttcctcaactctcttagtgacagacaaaaagtggaacttttacaattccacacactctcttcctgcatttccatctcaaacttcgacacactcaccaaccccgttcagactcaggccggagacgaccccaagcggctccagctcaacgttaccacgtttggtggcagccaggtgag

SEQ ID NO: 21458 - DNA, 429 bp, Glycine max
ccagccttctgatcctaatagcaattggaactctaacaaatcctcttggagtgctgggaacgaaaacaagaaatctaattggagttctggggatcctggaaatacagattctaactggggcaacaaaaataattgcatttctggatctggtgatgctaatcaaaacacgtcttggagaaagcaatagcagctggaacactgcaaatgcctcaagcgatgatggtaatgaaggttcaaatgaaaattctgatggagtaggtggtgggaactggagaggtggttaccggggtagaggtggctccgacagagggggttttagaggtagaggttttcggggtagaggagagcgtggcggtttcggtggacgaggggagcatggaggctttggtggccgaagggaacgaggaggctttggtggtagaggtagat

SEQ ID NO: 21459 - DNA, 464 bp, Glycine max
ctaatatccgtatggaagttgaaatcagtgatgctttgcggtggccatggagctgctcagctctttgaggaaggaggacatactggagctcttctctcatggcttctgttcccactgcgaggatattctgcatactcgaattacaaaccttcgtaaaagaaagttggatgaaacttcatctccggatgaagaaggctttgaatcttctggggatcatgtagtagacaagccagtgaatattggtaatgtttcaaattcagaatctttgactaaaaaccatgaaaaacaatgggatagtcctaggaactcctcacaaaggcgtgattctactacaccaatgaaggatgatatcaaaaacattttttattcttcacctaagtgtttagtaggctgcaaacaatctgatttcaagttgttgttaaatgatggaatttgtggagattcttcatttgaaaatggtgggt

SEQ ID NO: 21460 - DNA, 453 bp, Glycine max
ggtaaaactcccttcccaccactcccatcaacttttttccgataatggaagaataacatagacgtgtagctcttcctcctcccactccatagtgttgctactccttcaattcccaaaagcaatgtcagagcgagacatagcttgggatttccatctccgtaagctctctgctagcggcagagactccaacaccgccaacgatcctgcttccgattcatctcttcttccttcggtgaagaagcttcatgaaatatgcaagaacgagtactccgaggacttggtagctagggtttatccatccattaacaagatttttcagcgcgccgtcgctttcctcttttaatttcgaacctccaatggccgtcttttactcgaaaatctttagttttacccggactttgtggagggtgttctttatgatgcggatccttgtctcaggacaattttttgttt

SEQ ID NO: 21461 - DNA, 1012 bp, Glycine max
agagttaagaagaaagttgctttggtgctcagacgctccactctccaagaggttagaagacaaagtagcactaatcaccgggggagcaagtggcatcggcgaagccactgcaaggcttttccttcgccacggcgccaaggtcgtcatcgtcgacatccaagacaacctcggacacttcctttgtcaaaacctcaacttcggcaacaacatttcctatgttcactgtgatgtcactaacgataacgacgttcaaatagccgtcaaagctgtcgtttcacgccacggcaagctcgacatcctcttcaggaacgccggaatcggtggcaattcggactcctccatcatcgcccttgatcctgctgactcgaagagggtttttgaagtcaacgtcttcggcgctttctacgccgccaaacacgccgctgaaataatgattcctagaaagatagggagcattgtgttcacgtctagcgctgtttcggtgactcatccgggttcgccgcacccatacacggcgtcgaagtacgcagtggtgggtctgatgaagaacttgtgcgtggaactggggaagcatggaatcagagttaactgcatttcaccctatgctgtggccactcctctgctgacacgtggaatgggaatggagaaggagatggtagaggaactgtttgcggaggcagggaacttgaagggtgtggttctcaaggaagaggatttggcagaagcagctttgtttcttgctagtgatgagtcaaagtacgtgagtggggtcaacctagttgtggacggaggttacagtgttaacaatactgcttcggctgaagtagctttaggaaagttttctgctgattaagcccaaattgtaagctttcatatttgagttccttcgaccaaaagccaaaaggtgtgttttctagtttgaattaaaataaaataaaaaagtgaaagtgtgtgtaagacaataatacaatatttctgttatttagcaaaaagtgcagttacttttagctgg

SEQ ID NO: 21462 - DNA, 361 bp, Glycine max
cattgctctattccaaggccatacacctgctattcctttggatgataccaaaggagtggctgagccacctgatatccagaacagagaaagcgacaataaggtagaaagtattaatttctgttttggatcaaatccttcaactgaaaacgtggttcaaaacatcatggacatgaaaggtaatattgatgatcccatgaattatttctcatcgttgaacttcgaaggctgtaactttggggcgtttaatgaattctcccaacctccatgtgaagattcagaagcttctttctctttccccatgtcgggatcctataattatgctcccaaatttgacagcgacaatttataataatgttactct

SEQ ID NO: 21463 - DNA, 364 bp, Glycine max
ttgaaatcctggccagagcagctttattagatagcaatagcatattgcatatttcttggtttctcctgttgcagcggaccatgatttagtagtgtttatgcagaatcaatgatgatgagctccacagattttacacagcttctaataatgactcttcatgcttccttacctcaatcaagaagacaataagttggcgggacagttacagatttctttcaggggaagagctggaaacctggtcaaatatggttttctggcaatggatctgatttttcgcacagaacttgcctcattgtaacgctgaggatagcctgtcgctctatggcatctgaagacagacttcaatttgctcaggcagttagta

SEQ ID NO: 21464 - DNA, 375 bp, Glycine max
gcatcactggtttcacacttgcgactttcagtactcctattatcagtttcattgggaaattcagcttcactccaagaaaattttgtccaatgtctcaacttgaattcggacagaacattcccatttaacccactaatttacacaccaaaaagtccttcattcaccagtgtccttgactcctccggcaagaatcaaaggcttttggtgccttcaacaccaaaaccaaagttcatattcacaccaacccgtgattcccatgtgcaagcagcggtaatctgctccaagaaacttggcattcatcttagagtgttaagtggtggccatgactttgaaagagtctcgtacgtttcagaattcaaagccccttcatagttg

SEQ ID NO: 21465 - DNA, 673 bp, Glycine max
atttctttttcttcttcttcagacaatcatttgcttttggatggtaactcgtacccacttttccattccggaattgggcactggtagcttagctcgtgtaaatgtgtgtctggctttggaaatccatgaataaaattatctgagatttgagagctttgagctgcgaagatggtggctaattgactttgaggtcaacttgcaaggtcatgaggtggagttgcagtgagctacatgtaggagcaacatgattgagcaattcatcaatttcgttattaggcctcccagggcggagtataaccctgatcagtacctatgggaaaaggaattcacccttacaggtcgaacataccaaaggcaggatttggagctcaagaacaccagaggctataccttgaagtgtagtcattatcttccttctcctttccctgaagatacttctcttccttgtgttatatattgccatggaaacagtggatgtagggcagatgccaatgaagctgctgtaattcttcttccttcaaatattactgtttttacccttgacttctcggggtcaggcttatctgatggagactatgttagtcttggttggcatgaaaaagatgatctcaagatggtggtgtcatatttgaggagcaacaaacaaatatctcgtataggtctttggggacga

SEQ ID NO: 21466 - DNA, 585 bp, Glycine max
ctcccagccccaaggtgtgtttgtcttgcagatccaacacgcctcaaccacactctctctatttatatccaactgtcccatcctcactcgcaacccttttccccttttatcaattcaaaccacgccttcccctgttcacaacctagcttgcccacaccaccatcacaacacaaaccattcctctcttgcatttaaacaaaaataaatatagattctgggggcatttcttggattctggttctcgttggtcacatccatcaaacacccctttgattctttcttggcgtgcgtcaggttcaattcatttttatggcaaccctgtcagagtaataagacagttaccgtgttgtacgtgtccttcaaacgtcacccacttcaacacataaaccaacgtttctccctccccagttcccagcagatttattatttattcatcatactaaacccaccggacccacaatactaccattgcaattgtttgttacattctctgggtcagttgggtaatactaatttatatggggaattgccaagctgcggaagcggctacggttgtgattcagcatcctgggaacaagatcgaga

SEQ ID NO: 21467 - DNA, 259 bp, Glycine max
atctgttttccaacaagaccgcaaaggccaagtttctgccatgacagctctcaaagagcttaggaaaattagcaatcttttgtctgagatgtgaggcgaatcatgtatgtatataaatattgtaattacagttcatagtggcaacagaattaggttcttctgctgctctttctgaacccccaccaaaattttgcagagagatatgtgtaaatatatttattcttgttacataataaagaaacttatattatgcctaaaa

SEQ ID NO: 21468 - DNA, 324 bp, Glycine max
atcctctctatttttgttcttctgtttaaaggatgaatatcaataacattattttctggctttggcttctactcccatacttgatgttagcttcttcttcctctttctgcaaccaccatgacacctctgccttactacttttcaaaaactcatttactctcaacacttcgcttcattatgattatttttggctctcttattcttcaaagacagagtcatggaaaaacggaacagattgttgtgagtgggatggggtcacgtgcgacaccatctcaggccacgtgattggtcttgaccttagctgcagttatctttaaggtcaac

SEQ ID NO: 21469 - DNA, 630 bp, Glycine max
ttcccatcccatcattattagctggctctataaccttcttctcaatactcctccactctctttatattcacctcaaaagtctcactcttttttctcacttctatattccataattaatccttcttttgtttctttctctccttcaatctcaagtctcaaaccatggcgtttagaggaggcactatgttgatattaacaatgatggcattacttgagattcagatatgctcatcggagataaaccgtggaaactttccaaatggcttcgtatttggcactgcctcttcagcttttcagtatgaaggggcagtgaaagaagacggaaggggaccctctgtgtgggacactttttcacatacttttggcaaaataattgatttcagcaatgctgatgctgcggtggatcattaccaccgatactaacaagatatacatctgctgaaggacatggcaatggatgcctatagattttccatttcttggtcttggatttttcccaatgaatatggccaaatcaatcatgcaggagttgatcattattataaactcatcaacgcgtcactagccaaacgaattgaaccatatgtgactctctatcactgagacctgcctcaagctctcgcaaaacaa

SEQ ID NO: 21470 - DNA, 475 bp, Glycine max
gtttcgggatgggacttataggcttatcactgatctttctcacactcttaaggagaagcatgtgagtgggtgcttcgtcaaatcgattagtaatgagcagaattcaaaggggtggatccaggttaagggtcactctgttgtttcgggtcaagcaagcacctcccagaattacagttactttgataggttcacttgctactcaaggaatgttgctgcgactaatggcagggttgttgcggacaattcaacttttgtctgtgaattgtgaaaattctttgtagtttcttttttttccgtacatctatttattatgtagtttcctgcatagttttttttttttctaggggaaggaatgtgtagtaatttatgtagtatgagagtatcttttgaatctgcataatgtatgtattggttccatacgtgccactgtgcctggatctagacagtagacactgaaggaagacacaagctactg

SEQ ID NO: 21471 - DNA, 598 bp, Glycine max
ttgcagcacggctcctagaaactgaagaagctgaaaatgagaagagagatggagatgttgatgatggcgaagctaaaaaggcatccaagaaaaagaaagggctcagcatgcaagatcttcaggacgagcgatttaaagcaatatttacaaatgaggaatttgagattaaggattcctcacaagaatatctggctttacatccaatgggttctaagaagcaaacatccttgttaaaggaacattttgaacctgtcatgtcagatgatgatcaaagtctaagtgattctgatgcatcaacatcatcacaagatgaacctgcaaatggaatgaaagacaaatctcgggttccaagaggtgtatgaaattaaaaatgagcagcatgcagaggcattctggagccaaaaatcacttgcaggggaggactcacttcctatgggagacagagttgcagctctcagagatgaccaacaaccttctcgtgttccaaatggtgttaagcagggtccaggaggatcacgagaaatcactttctccacaagaagctcagctaagtacaaggaagacgaggaagataaagaagtgccacacaggaaaaaga

SEQ ID NO: 21472 - DNA, 838 bp, Glycine max
tgttcctggcatgaatcgtggtccagcttggattgtatagaacatgattcggggaaaccccaaatagctaatcatttgaatcagcaagttttgttggataggcttgaggagttagtgagaaaccttagtgatttagttacaagattggaatcaaagctacctgaccctccaaaagaaaagggtaggtttactcaaaaaaaaattggtgatgatgatgaagatgcaagatcaagtagtaaaggagttgatgatggtgaatttgaggggaaaatccgagatggggagagagctaggggaacgtctgtgacaaagtacacacctttttggtcagagaggttccagtttgcatctgctttgaagttggattctgaggccacttgtataaatgttttgccttttagggaccacgaggggctgagtaagtatgtggcggttagtgatgagaggggaagagtgtatgtgttcacgaggaatggggatgtgttggttgagtttgatacctcattggagtcccctattacagcaatggtttcgtatacttcggtttataagaatgagagttttgtggtaactggtcatcaaaatggggaaatcttgatgcatagaatttgggagggagggtctagtggagaggattatagttctgttttcatggagaatgttggtaagtttctgtcacctgaaaactgggaagatgggttgccggtgactctcttggaagttcattatgtagggaggatgaagtacattctgtcagctgatacaagtgggaagatcagggtttttaaggagaatggttcgttacatggctctgccacgccctctagtaggccgctag

SEQ ID NO: 21473 - DNA, 366 bp, Glycine max
tgaaaaacaaccttcattacaatgagtccaaaggcatctccatcagcaagccttatcaaaataggttcggatggctttgatctgatagagaggcactatggtcgattcagaagaaatcaagttcctccttttgaagtgcctatcattgtgaatagcaataaccctggtgcttcatttggtggggctaatattgacaacaaagaaaacccaaagccaccacgtcgtaattgggctggtagatcattggtctcactaagtagtatcaactagtgtaagttcaagtatacaaatacttaggtttttgttctgattttttccccttttagtgttacatacttgcaccaagtatgaaagtactgatttatc

SEQ ID NO: 21474 - DNA, 634 bp, Glycine max
tctatttgcatctcataacagagagctgagaaaggaagaaaaaagcgtgtgtgagagagtcataacaatggttgtggaagatgcccaaaaatcagccatcacggaggaccaaaaccctagcagggtcgccaacgacaacaacgacgacgaagatctcgaagagggggagatccccgacgacggtgacgacggcgcctccgccacatcaaagcctccgtccgccctcgtccgcaacccccaccctctcgagaattcctggaccttctggttcgacaacccttcctccaagtccaaacaagccgcatggggcagctccatccgacccatctacactttcgccaccgttgaagagttttggagcatttacaataacattcaccacccgagcaagttgggtgtgggggcggactttcattgcttcaagcacaagattgagcccaagtgggaggatcctatctgcgctaatgggggaaagtggactatgacctttcaaaggtgaaaacctgataccacatggttatatacagtgttagcaatgattgaagtacagctcgatcacgtacacgatgtatgtgaagctggcgtgaatgtcagaagtaggcaggaatatattgcgtattggactgagaacgct

SEQ ID NO: 21475 - DNA, 392 bp, Glycine max
agcgaactaaagcacgtgcaatgctctgtgatatatatcatcatgctctacttgatgagttctcaacagcccgtgatctgcttcttatgagccatttgcaagacagtgttcagcatatggacatttcaacgcagatactttttaacagggccatgtcacagttaggtttatgtgcttttcgggttggactgatttctgaagcacatggctgtctgtctgaactctactctggtggaagggtgaaggagttgctggcacaaggcgtgtcacaaagtcgttatcacgagaagactcctgaacaggaaaggttggaaagaagacgacagatgccctatcatatgcacatcaatctagagctcctggaggcagtacatctttgtttctgctatgct

SEQ ID NO: 21476 - DNA, 586 bp, Glycine max
gcgagaaggaggctgaagaaaagttgcaagaaattcaggtagctgctgggtcagctaatgctgacaaatatgaaccgaaagctgtctggaaagaaatattgtgccctactcctcctgttagaagaatgcttataactggttgtggaattcagtgtttccagcagattacaggcatagatacaactgtatattatagccccacaatttttaagaatgctgggatcactggtaactctgagcttcttgcatcaacagttgctgttgggttcaccaaaactctgttcatcttgatagccatatttcttattgacaaattggggagaaagcctttgctttacgcgagcacaattgggatgacagtatgtttatttagcctgagcttgtctctagcttttctgagtcatgcaaaagttggaatcgcattagcaattcttgcagtgtgtggaaatgtagcttcattctcagtgggacttggccccatatgctgggttttgtcatctgagatatttcctttgagactaagagctcaagcatcagcccttggagcagtgggaagtagggtcagtagtggtgcaatctccatgtc

SEQ ID NO: 21477 - DNA, 287 bp, Glycine max
cagtgctactagtagtagtctgtattttgaatttatagcggtggatcattaaagctgcagtttgctgtaaagtgacccagtgtgacgtacgtgtatttcttgttataaatatgctgttaccattctttttgggtcaccctttctgtaggtgctttgagcatcaatgttgtgtaccagtgactggatataataaccttgcttgggttattgctttctttgcttgttcctcatttttttaacaccaacaggtggtttgatattaatataatttttccattgtccctttt

SEQ ID NO: 21478 - DNA, 490 bp, Glycine max
tgtgggtatgctataaatctatttaactgtacaactatggtttatcagcttatcactattctgagggaaaatttatctgttcttgtcaaaagaacatgatataataactataaaaaaaatgatataagaattcacaaaaatgtttgatctgttattttaatagttattgcaatatatttttattctcttacatccacataggatggaactataatacggggacaaaatgaaatttctcatccaaccagtggaacaatggagcttattaagaaggtatgccagtgtattttttttgtacattatgtctactccaatgataatttgtttaaatctccaaggatgtgaagggaacttgcctgagatgaaagcttgcatgttctttcaagtctcttaatgaaaggaaatgagcacttgttcttcaaggggatccaatagtcatcgtaatttagtaatgatatttttgggttattaatgacctggagtttaaagc

SEQ ID NO: 21479 - DNA, 238 bp, Glycine max
aaaaaatgatataagaattcacaaaaatgtttgatctgttattttaatagttattgcaatatatttttattctcttacatccacataggatggaactataatacggggacaaaatgaaatttctcatccaaccagtggaacaatggagcttattaagaagcttttcagctccagcacttccttcgaaaactaaacgggtgttctacatgtctagcgagggaaaaaatttgctccatga

SEQ ID NO: 21480 - DNA, 605 bp, Glycine max
ggcaggacattcctttgttgagatagatcatgctacgggaacagaaattaaaactgttgcatagtttatgctagtgattgatacaatacaccaaatctaggtgacctattaatccgtataaaacgtgaatgtcaaaaatatacttgcatcagaacagagaaaaatcttagctggttgtcgcatagtatttagcagggtatttcctgctggtgaagcaaatcctcaccttcatccattgtggcagacagctgcacaatttggtgctgtttgcaccaaccagattgatgtacaggttactcacgtagttgcaaattcccctgggactgataaggtgaattgggctcttaacaacggaagatttgttgtccatcctggctgggtggaagcatcagcattgctgtataggagggcgaatgagcaagattttgccattaaaccttaaaaaagaaactgacctaattctctttcataaactaaaatatgtgaacataaatcaagaatcacattgattttgggggtgtgaaatcattagactacaactggtcagcagagatagttttaattcacgatgactgagtccactggagatggtgatggtgattggg

SEQ ID NO: 21481 - DNA, 729 bp, Glycine max
ggagaagatcgaggatgattatgtttctggggagacaatcgggcaaggcaagttcgggtctgtttggttgtgtaggtcaaaggttagtggagctgaatatgcgtgtaagaccctgaagaaaggggaggagacggttcatcgagaggttgagatcatgcaacacttatccggacattctggggttgttacactgcaagctgtttatgaggaagctgaatgctttcatcttgtgatggaactgtgctctggtggtcggctcatcgatgggatggttaaggatggtctgtattcggaacagcgggttgctaatgtactcaaggaagtgatgttggtcatcaagtattgtcatgacatgggagttgtgcacagagatatcaaacccgagaatattctcctcactgcatccggaaaaataaagcttgcagatttcggcttggccatgagagtttccgaaggtcagaacttgactggtttggcaggaagccctgcctatgttgccccagaagtattgttaggcagatactctgagaaggtggatatatggagtgctggagtgctcctgcatgctctgttggttggcagtcttccatttcaaggagattcattggaagcagtttttgaggctattaagactgtcaaattagatttccaaaatggaatgtggaaatcaatatctaaacctgcacaagaccttattgggagaatgctgacaagggatttttcaagcag

SEQ ID NO: 21482 - DNA, 647 bp, Glycine max
tcgttttacgcgtccgaaaaaaaaggccaatttagatgtgttcgtattctccactccaatagcaacatcaattccaattctgatttggttcggaaagaagtgaagtcataagtcatctctcctctcttgtaaacatggcagccgaaacggaaccaaagaagatcataattgataccgaccctggcatcgatgatgctatggcaatattccttgctctacaatcacccgaggttgaagttattggactcacaaccatctttggaaatgtgtacaccactctggcaaccagaaatgccttgcatttgttggaggttgctgggagaacggatataccggtggcagaaggatctcatgtaacttcaactaatggaacaaaactccgtgttgcagattttgtccatggtgtagatggacttggcaaccagaattttcctccaccaaaggggaagcccattgaagaatcagctgcttcttttttggttcatcaagcaaaagttaaccctggcaaagtcactgtggtcgcattgggcccgcttacaaatattgccttggctatacagctggttccggaatttgctaataacattgggcagatcctgattcttggtggtgcttttgcagtaaatggcaatgtgcttccagctgct

SEQ ID NO: 21483 - DNA, 483 bp, Glycine max
cccacgcgtccgggttatctgagtcaaaaaaaaaaaaaaggttttcttttctgctgattttcctcttcagccgccatggatgcggaggctgtcttgaacctctttgattcttgctggtttgaggttaacattttaaggagaaattctagtcctcacacatcaattacaagttatacagaaaatttagatcatgtgttaaaagaagaaaaagaaccaaagctacccttgatccgaaccagccacaccagatccatgagtgaccaattatccatgacaacaacaagcttcaaccaagattctctttcacctgactcagtgcttcttctccatccaaagctccaaaccattctctcaggaaaagaagccactgactcagaacctgatgagaacccaagaacgcaggttaggcctcatcctgaggtgttgtgtcctaagaagaacaaaaaaaatctcaagcagtagaactaggaagaggagggagag

SEQ ID NO: 21484 - DNA, 277 bp, Glycine max
acgcaattcacaaatcacaaatcacaaatcacaaatcacaaaggtcttttcatttctgctgattatcctcttcagccgccatggaatcggaggctgtcttgaacctcttcgattcttgctggtttgaggttaacattttgaagacaaattcaagtcctcacatatcaattacaagttataacgaaagtttagattatgagataaacgacgaagaagacgacgaagaagaaccaaagctacccttgatccgaaccagccacaccagatccatgagtga

SEQ ID NO: 21485 - DNA, 472 bp, Glycine max
  unsure (1)..(472): unsure at all n locations
gacgaangcgcagagatacgtatgaagatgatagaaggcgttatggcagaagaggcagagatagggatgatgaagatgatagaagggattatggcagaagaggaagagatagagatgatgaagatgatagaagggattacggcagaagaggaagagataaatatgacagggatagagatagatatgagaggcgcacgagagatgaacatgaagaagagcatgggcgtggaagggcgactggggatagagatggtaataggaagggtttacagcacggttctggtgaacttgaattatatgcagtttataaagggagaatctccagagtaatggagactgggtgctttgtacagttggatgacttcagagggaaggaggggttggtccatgtctcacagatggccacccggaggattaccaatgccaaagatgttgtcaagcgtgatcaagaagtgtatgtaaaagtgatctc

SEQ ID NO: 21486 - DNA, 721 bp, Glycine max
cgttgctagcaaaaaacatcctcagcttccagagacatagaggtaaaaaagcacgtttccacgtttcacaagatgttattattccatggggcaaagccaaaatctgagggaaggaaatccaacgcttctgcgcctggagatattaacaaggatcttgctcttgcggacgcagcacgcgcaccgcgcgtgagtcagatgagaaggttttctagtggacgtgacgctcttgctgaatttgattggaaggtgtcgccagatgaagaggaaattgattactattcggatgaatacagagtggatagtgatggcgaagaagaggaagagattattatccctttctctgcaccccttttggttggtggtggagttggtcatactcgtgggggtgtgcttaatttgaagccacgaaaagaaattaacctgtggaagagaagaaccatggctccacccaggcctcttcaattggacagagcaaactgattatttgttcattacaaaaatgaagattaatttgatttttcgattttttttaatggctatgttttggttctgaaacattttctgtgcagaactgctgatagatttaattaggtacagcaaaaaaatggtgttggcaacatgttgtgataggcaagtatcatattgtgaatgaatatatagcatcaaaattacgatctgtatcctagtctaatcaaaagttaagatacaaatgcccttcgtc

SEQ ID NO: 21487 - DNA, 456 bp, Glycine max
ctgtgtttcttcctttcggtcagagtcaacaacagcataacaatccttccctactttcccgagtatattgaattgaaaactcttcccgcaactcaaattgaaaaagaaaaaggaaaaaacataaccccattgctttgttttccattattggtgccaaagtttcaagctttttgtgcttcctctgcttccccagggtaagaatctgctttccctttcgagtttacagcgatttgattctggcccctttgtgattttatcctaatcagagagcttgtctctactgggtggtttgattataggttttggtgggggaaatgatgggaagttagggcctggatctggaatttttcattatttctatcgaaaaattgttcctttattatgcatttttggataaatagtttcgtttgagcttgtttgtgcatctgagttagtgtctgattgttttctttcacc

SEQ ID NO: 21488 - DNA, 844 bp, Glycine max
  unsure (1)..(844): unsure at all n locations
actgaaaatagggtgcatttttgtaattaaaagtgcaaacacaaacattttttcaaacctaacagccccttaactttcaacctagtatcaattatcatattaataatacatgattttcataggttgactctgtacttggagatcaatatccaactattgaagacatgaagaaactcaaatatacaacccgagtgatcaatgagtcattgaggctntacccacaaccacctgtgttaattcgccgctctcttgaggatgatgttcttggagagtaccctataaagagaggtgaagatatctttatatctgtatggaacctgcatcgcagtccaaaactatgggatgatgctgacaagtttaaacctgaaagatgggcattagatggaccaagtcctaatgagacaaatcaaaacttcaaatatcttccgtttggtggcggaccacggaaatgtgtaggtgatttgtttgcttcatacgagacggtagtagcacttgcaatgcttatgagacggttcaactttcaaatagcagttggagctcctccagttgagatgaccactggagctacaattcatacaacacaagggttgaagatgactgtaacacacagaataaaacctcctattgtgccctcattacagatgtcaactatggaagtggatccatccataagcctttctgatcaggatgaagtaagtcagaaaggcgaagtttaccaggctcaggctcagtcctaattgctgctgtataacaaatcataaaccatacaatgagtgcaaaggggggaaaaagtagtattctttatattcttttagctgcttgagtgaaatttgtagtatggtga

SEQ ID NO: 21489 - DNA, 392 bp, Glycine max
aggatatgcgatgcattactttaggggctctaaatcgaaaagctggctagcttggcacggcatgaccataactgagggcattgacataactagtgcatctctgcaatctataaagctagccgattgacgactctcttatgagaaactcgatgcataaacttgaggcctcgcgggtgagggctgatgacagggcgagttgatggacacaacttgatgctgtagagagtaataagctggaaaggcaagaggcttatgttggcaacctggtgaaaggggtacgagaattgcctttgctcagtgcagtggacgctcgtcatttcagctagtaagctctctctcaaggcgtatagcttcagctagctgaggtgcccaccatagcacatatcgaagag

SEQ ID NO: 21490 - DNA, 687 bp, Glycine max
gaacaaagagatgttggtgcaaaagatcttcgccaacttgctgctctgtactgtggtgctaatgctggatttgagataattcatggcttggtggacagagtaatggaaaagaatggggttccctttgtttcacctggtgataaatcgggttattatattgagcggtcagatgagcctgagtttcttgctggtagacaagctagaatcatttacaaaggaaagcatattggcacttttggcattgttcatccagaggtattaaacaactttgacattcctgatccctgctcctttgttgaacttaacatcgaaagtttcctataaagattatctgtatcaattggtagggaatcaagatgctcaactgcttgagtgactatatgggaatcaaaacacttcgtggaatttagaactacactatagctggggagcggaatgttactgatgtgccctaaatttgggtgtttagtttgattatatacccgtaaaattttcctaagtttctccgttgttaaatgtttagaacatcagaagctacgaattggttagtagggataatctcgaccataaattatagttattttttaaaatagttgattttggccttaaaaccaagatagcaaggatatttattcgtttgaaaattttgtcaatacaaaagtgagtcacaagccacatgtctacttc

SEQ ID NO: 21491 - DNA, 561 bp, Glycine max
actgcatcgaagttttctgtattttatattgtcctttttttgcaaggaagactcactctgcttctgataatttgtgtatgaactcatttgcctattgaaggagcctgagtttcttgctggtagacaagctagaatcatttacaaaggaaagcatattggcacttttggcattgttcatcctgaggtattaaacaactttgacattcccgatccctgctcctttgttgaacttaacatcgaaagtttcctataaagatctgtatcagttggtaaccccatttgtcccattcgcccttttgaatatatttattcatcaaactggggaatcaagatgttcaactgcttgagtgactatataggaatcaaaacacttcgtggaacttagaactacactagctcgggaccggaatgttactaatatgccctaaattagagtgtttagttaattatatacctgtatcattttcctaagtttctctccgttgttaaatgtttagaacatcataagctacgaattggttagtagggataatctcgaccataaattatagttattttttt

SEQ ID NO: 21492 - DNA, 416 bp, Glycine max
cgcctattgcagccttcaggaatagaaaactacaactccctagtaacccctcggatctctatgagcacaacctccaagattatgttaatagtgggaaacgccaagtctatcacactcccactctgaggtttttggacaaggctgcaattaaagaagacagtgctggctccacatgagtaccattgacagtgccccaagtagaaggagctaagcttatattcggcatggtccttgtatggctagtgacaccgattccaagcaccatctgggcccaaatcaacactctttttgtgaaacaaggcaccacttttggacagatacattggccctcatttcaaaattccatcagcctctcttggaagttttgtgacactctccatgcttctctcagtgccaatgtatgactggtttttcgt

SEQ ID NO: 21493 - DNA, 518 bp, Glycine max
ccctcgcgtccggaaggctttatgtatgggctatgcgaatcagctggctgaaagaaagatgcatcacaatggttatcgaactttgggtttccaagctcaagtagtccaggtgcatccgtcatctgtgttgagtcttgatgacctggggaagttcccagactatgttgtgtaccatgaactaattgctacgccacggccgtacatgagaaatgtatgtgctgttgagatgagatgggttatacctattattaacaagctcaagagcctggatgtgtacaaattaagtggtggtgttcatcatgttgaggaggaacctgagaaaaagcttccagattttcccaagaaggatgttgaggtggctagtactgctgatgaccgtgaaagtagaatccaagctgctagagaacgatttcttgctcgtaaaggcaaaaaatgagcctgacaggatggagaggttaaatacactagagatgatcttggcctgtcaggcattttattagctggtatagttacctgaa

SEQ ID NO: 21494 - DNA, 1370 bp, Glycine max
atgtggttgagctttatgaggtaatggccagtaaaaccagaatttactttgtcatggaacatgcaaaaggtggtgagctcttcaacaaggtagtcaaaggaaggctcaaggtggatgttgctcggaaatattttcagcaactgattagtgcagttgactactgccatagcaggggtgtgtgtcatcgagatttaaaacccgaaaatctactattggatgaaaatgagaatttgaaggtttctgactttgggttgagtgcacttgctgaatctaagtgccaagatggattgctccatactacatgtggtacccctgcctatgttgctccggaagtgataaacagaaagggctatgatgggattaaagctgatatatggtcatgtggggtaatcttgtatgttctattggctggtcatcttccattccaggatacaaatctgatggagatgtacaggaagattggtagaggggaattcaaatttcctaaatggtttgcaccggatgttcgccggtttttgtccagaatattggatccaaacccaaaggccaggatatcaatggccaagattatggaaagttcttggtttaaaaaggggttggagaagcctgctattactgtgaccgaaaacgaagagctagctccccttgatgctgatggaatatttgaagcgtgcgagaatggtggtcccattgccgagcctaagcaagaacaggccaagccttgtaacttaaatgcttttgatattatctccttctcaactggttttgatttatctggtttgttcgaggacactgttctcaggaaggagacgcggttcatgtcaaagaagccggcctcaatcataatctcgaagttggaagaagtttgtaagcagcttcgtttgaaagtaaagaagaaagatggaggcttgctcaagttggaaggttccaaagaaggcaggaaagggactttgggtgttgatgctgagatttttgagattaccccacacttccatatggtggaacttagaaagtccaatggtgacaccatggagtaccagaagctttttaaacaggatataagaccagcgcttaaggacattgtttggacctggcaaggagaaaaaccacagcaagagcaagagcaacatgaagtagtccaggaagagcaccaaccttctcatactgcttagtttcatgatcaatatttcaccccttggtttttgtatgcactgtgcttcttttgtcattatcttagtcaagtgcttaattttaataggactcatagaataatgtggctggttcagcctcctcttgtctgatggatacttgaacaattgtgtacctaaattgcaaatttcaccaatttgggtgttttattccacccttcc

SEQ ID NO: 21495 - DNA, 950 bp, Glycine max
cgagaaaggccactggtaagtactaccaccatagcagctggaaagcaagagaggaacatgatgaaagttgcacctacgagtccgcttcccacgaagcacgtgcggattctgtttcaccgcacgtgccttgagcattcaataattaccaccaactcgccaaagtcacttaattataaacgcggaacgatttcaccaggagaagcagaaccatcgctcaagctcacactcacagtaaaatccaaaccaaaatggcggaaaataaagccattgaagaagctcagagcaagttccgttcagagttccttcaagttctgcgtagtaggcgacccgctcaagttccattaacagtcgaattcgcgaagccagtggtgaatcctttgcatcagaactctcctccatcgatcgaagagatcaagataatggagtcgtgtccgagaactgatatagagaaccttgaagacttgctcgaggaggagaatctctatttgaatatagaggaaggagagcaaggacggttgcctttgttgattttgaagttgaaggaaagcgataagcagagaaaaaggcctgcagttgtttttcttcacagtacgaacaaatacaaagaagtcctacgtccattgcttaaggcgtatgcttcgcgaggatatatagcaatttctgttgattctcgttaccatggagaacgtgctaccagcgcaaccacctatcgcgatgcacttatttctgcatggaaaactggtgagacgatgccattcatatttgacacggtctgggacttgattagattggcagattatctaacacagagagaggatatagacccttctaggataggaatcactggaatatcacttggaggaatgcatgcatggtttgctgcagttgctgatactcgctatgctgtggttgctcctctgattggcattcagggatttcaatgggccata

SEQ ID NO: 21496 - DNA, 418 bp, Glycine max
atggattgctccagaagtacttcttaattattgaaaactaaacaatttattaattttcctgttgggtggtccatattagtaatttatgatttcatttcttgtttggtggcagctttacagcactgttactctgagacaaggggagaagaagcattacaaccataaggtggatgcctatagctttgctatagtgttgtgggaactcgtccataataagttaccttttgaaggcatgtctaatttacaggctgcatatgcagcggcatttaagaatacaaggccaagtgctgatgagcttcctgaagatttagctctgattgtgacctcttgttggaaagaggatccaaacgatcgacccaattttagtcagataatagagatgctgcttcgatatctaactactatttcaccatctgag

SEQ ID NO: 21497 - DNA, 550 bp, Glycine max
cttgtaccgaaattcggataatggtgtctctaatttcaacatctccaccttcttcatctttcaacattcatcccttcttctctccaaggggcgtccaattcagacacaactgcgtaaattacaaacggaaaacggtacggtgcgccgtcaccagcgccgacgcatctcctccgccgtcaacgtcgttggccaaggaacctcacaaatacttcgaccacgtcatcatcaccgttcgcgccggtgacggcggccacggcgcggtgctgaatcagcagcagcagcagcagcagcagcagcagcaaggaaaaacgaagttgaagaaagggaaaggctcgttgaagagggacttcgacggatccctcattctccccatgggtggccacggaggtgacgtcgtgctctacgccgacgagtccaaagacacgctgctggagtttcacaacaaaggccgctaccacgccaaacgcggtggcaacgttgatgccatgggcgttttgacttcgatgctcgcgatggacttgctgcaccgacgctgcgtattgctgttcct

SEQ ID NO: 21498 - DNA, 356 bp, Glycine max
  unsure (1)..(356): unsure at all n locations
aaaaaaaaacaaaaaaacactaacttcccccaaaggtcagaaaccttccctcaaaggtctgctgctgcaactcaattctagcttcacttggacagttggattcactctccgattccctctctcgtagtcaatgcggtggccggcgccgccggcgaacgccgggctgggtatagccgccatgtcctatatcaccgtcgactacctccgccacctttccccggcgtggcactcgcgtctgcaaccggcgctgtggtccctcctcgccctcaccgccgttttncgcgtccccccctaccggcactggtctgccgagttccggtcggcgattccgttcatcgcctccatgctcttcatgc

SEQ ID NO: 21499 - DNA, 503 bp, Glycine max
gacgaaatcaaattcatagacaaagcattggagaagggcgtcgtctatatgctagcagaagcagaggtagttgctcacccatcttcctccatcttgaataagattgttgtcaactatgtttatagcttcttcagaaagaactttagacaaggccagaattccatggcaatccaacgcaacagacttctcaaggttggaatgacttatgaaatatgacctcgatttccagtagtttcactgtccatacataaaaataaagaaatatgtactttgcttgaattttgtatcttttccaccaaatcatgcaagttataagttatgttcaagaaaaagccttcgctccaataagccttcaaaactttccaaaatataagcaatcccaatgcccaacatcatcggagtcggagctagacactttcacagaaagtgccaactttgaatcatttatgtgtattgatactttttttattttttaaactaaacaaagctcatttcattgcatt

SEQ ID NO: 21500 - DNA, 615 bp, Glycine max
gcaatggatgcattaaccttaagctcaagtgtgaacatttccaaaccatttcatttccttacactctcaaagaaacagcaaagagaaagacatcctcgtacgcagtttggtgtttcatgcagaggcagaaaagagcttggaggaggtgtggaggacaacttgtacaaggtactaagtttgagtcccaaaagtgcaaccacggatgacataaagatagcatacagatcaatggcgcttcggtaccaccctgatgtgtgccaggattgttccaagaaggaggaatcaacgaggatgtttgtgcaactcaacgcagcttaccagaccttatcgaatcctaggcttcgagcagagtatgactgtgaattgggtttgagaagtgaaaagatcggtgttggtgatgagacttggagatatatatggcagaatcaacttgctgagttgaagagaaggtctcacatacgtatggcacaaaaccaaggatcatggggcagtagaatcagaccgcaaaacatcaattgaaattagatatttatcccaattacttttctttccgtatcggatcattacctgttaatatgttatgtaatatatatgttgttgagttttttaatttac

SEQ ID NO: 21501 - DNA, 634 bp, Glycine max
  unsure (1)..(634): unsure at all n locations
acgagattaagggcaggtccggcaaatcgtgccggctgcggtggtgcaatcagctgagccccaccgtggagcaccgccccttctcgacccaagaggacgagaccatcatcgctgcccatgcccggtacggtaacaggtgggccaccatagcccgattattaccgggccgaaccgataacgccgttaagaaccactggaacntcacgctcaagcgcagagccaagggtattaacgttaatgttaatgatgccgacaacgaggatgacccgttgaccgcattgactcttgctcctcccggtattgctaatgccactttgaccgaagacgccgtaccggaccaccgggcctcgccggagagtgcggcggaggggttttgggatatgatgaagggatgtgatccgcgagggaggtgaggggatatgtgtcttctaatttttctgataataactagggttttcattaaatcaatcatcataagcataatttgttattatgtcttccttttttttttaggcaaattattctgcaatttgattttgccttactggactttggaatcggatcagggaaataaattaaaacccttctggcttctgctgttaataacaactttctcttgttgtgaatcaaaaaa

SEQ ID NO: 21502 - DNA, 534 bp, Glycine max
aaaatataccgtgcactaacttatgcttctggccttccattggctcttgaagttataggttcaaacttgtttggaagagaaatagtagaatgggaatataccctagatctgtacgaaaaaatacatgataaagatatacaaaagatacttaagatatcctttgatgctttggatgaacatgagaaggatctttttcttgacattgcatgcttcttcaagggatgtaaattagcacaagttgaatcaatagttagtggtcgttacggtgacagcttgaaagctaccattgacgtgttgcttgaaaaaacacttataaagattgatgagcatggtcgtgtgaagatgcatgatttgatacaacaaatgggaagagaaattgttcgacaggaatcaccaaaacacccaggtaattgcagtaggttatggtctcctgaagatgtagctgatgttttgtaaggaaatacggaaacacgtaatatcaaagtatagttctggatttctccaaacctgaagaagtggtacaatgggacggaa

SEQ ID NO: 21503 - DNA, 596 bp, Glycine max
tatgcttctgtcctgccattgggtcttgtagagagaggtccaaacttgattgggagtgaaatagtagaatggcaatattcgctaggtctgttcgccaaaacacacggcattgatgtacaagggatactctcagatatcgctttgatgcttcgggtggacatgatgcggttctactacttgacattgcatgcttcttcaagggatgttaattagcacaagtatgaatcaatagttagtggtcgttacggtgacagcttgaaagctaccattgacgtgttgcttgaaaaaacacttataaagattgatgagcatggtcgtgtgaagatgcatgatttgatacaacaaatgggaagagaaattgttcgacaggaatcaccaaaacacccaggtaattgcagtaggttatggtctcctgaagatgtagctgatgttttgtaaggaaatacggggactcgtactgatgtctttaaccttacttttacgtattgattttttaccattacaattatgcacgttagatgacatcgcattactttacagttacattacattgagtttctaccattttattgactgtattattcactattgatttt

SEQ ID NO: 21504 - DNA, 523 bp, Glycine max
cgactataataaggttttgagttctgttagacaaaacaaaagtggagtgatagagtgagagatgcaaagaggatggtccttctacaaggattttctgccagttgtggtgattataggcaatgaattcaatgacatgggtacactcacactcttcaaagcagccacactgcaagggatgaacaaccatgtctttctggcctatgcttatgctcttgctaccattatactcattcctatcacttttttcagcagaagatcaagagtggttcctgttcctccacttagtttctccatagtatccaaaatagttcttcttggggtgatgggaagttcatctcaggtactgggttatgcaggcattagctacagttctccagcacttgcttcatcaattggcaatctggtacctgctttcaccttcatccttgccgtaatttgcaggatggaaaagttagctgccaaaagtagaagtagtcacgctaaggtgattggcagcataatatcaatagcaggtgcatttgta

SEQ ID NO: 21505 - DNA, 630 bp, Glycine max
cagttgttctatcagctgttaagatgatccttctgcaaatggagcttatcaccagtactgatgtggttcggaatctttgcaaaaagatggcccctcctcttgtgacattactctctgcagaacctgagatacaatatgtagcactgcggaatatcaatcttatagttcaaagaagaccaacaatacttgctcatgaaattaaggtgttcttctgcaagtacaacgatcccatctatgtaaaaatggaaaagttagaaattatgataaaactggcttcagaccgaaatatagaccaggttctattggaatttaaggagtatgctactgaagttgatgtggatttcgtaagacaggctgttcgagcaattggccgttgtgccatcaaattggagagagcagctgaacgatgcattagtgttttgcttgagttgatcaagataaaagttaattacgtggttcaagaggcaatcattgttatcaaagatatatttagaagataccccaacacatatgagtccataattgcaacactttgcgagagcttagataccttggatgagccagaagctcaggcatcaatgatctggataattggcgaatatgcggaaagaattgacaatgctgatgaac

SEQ ID NO: 21506 - DNA, 763 bp, Glycine max
atcaagataaaagtaaactatgtggttcaagaggctatcattgggatcaaagatatatttagaagataccccaacacatatgagtccataattgcaacactttgtgagaacttagacaccctggatgagcctgaagccaagagagaattgacaatgccgatgagcttcttgaaagtttcttggaaagtttccctgaagaacctgcacaagtccaactacaattgttgacagctactgtaaaacttttccttaagaagccaactgaaggcccacagcagatgattcaggttgttttgaacaatgccacggtggagacagataatcctgatttgcggatcgtgcatacatatattggcgtctcctctcaactgaccccgaggcagctaaggatgttgtgttagctgagaagcctgtgataactgatgattcaaaccaacttgaaccttctctacttgatgagcttcttgccaacattgctacactatcttctgtttatcacaagcctccagatgcttttgtaactcgtgtacattcagctcagagaacagaagacgaagactttgctgagggaagcgaaacagggttttctgagtcacctgcaaatcctgctaatggtcctgcatcaccgcctacatctgcaacaggtgcaccagccacacctccatctgttgcacctgtgccagatttacttggtgatttgatgggcatggataattctattgttcctattgatcagccagctactcctactgggcctccttac

SEQ ID NO: 21507 - DNA, 529 bp, Glycine max
ctcaactctccacttctttcttacctgttctttcccataattaaacatcaatacccaccatctctatgtctctctctcccccatttactcttcctttgctttttattccttttcagttaaacttcttaattaaaaaaaatatctaagtaaggtcacaccttaccctctattagtgtttcagaaacatagaaaaactcaatgaccagttttatgttctcataaacagtcatatagctaggaaagctacactaggaacagatgtctccaattccaaaacagtttttagggtgatttcagaagcaagccactttcacttgatcttgaagtttgaggaggcatgcaacacttcttgcactgtcatctgtgtacttaagatgaaataaacatctcagtgcaagctcagaaatagatcttattctgaatactcagtggttaatttccatttctattttgtaaataatttctaacataagcatagctagatcatgaaaccatactttgatcttgaagtggaggcatgtgcagaata

SEQ ID NO: 21508 - DNA, 596 bp, Glycine max
  unsure (1)..(596): unsure at all n locations
gtttggtagaaaagcagcagaggggcagtttggggctccgacgggaaactaggaatttcttctttataaatttcgccgacaattaaacgctctttctcctttcttttccttttcaatgctcagagaagagagaaaagaaaaagaaaaatcccagtgagagagagaaaagaaaagaacgaaaaaccaagaagcttcgaaacgatcgtgtgagatgaacaagtgcgaactgtgcaaagttccggcgaggatcttctgcgagtcggaccaggcgagcttatgctgggactgcgacgctaaggttcacagcgccaacttcttggtcgcgagacacgcgcgaaccttactctgccgcacgtgccgctctcccacgccctggaaggcctccggcgcctcactcgcccacgccgcctccgtctgcgaccgctgcgccgccgcggaagagacggaagagagcgaagccggcaatgacgacgaaccagacaccgaggacgacgacgatgtcgacaaccaggtcgtgccgggtcctncacgccgccgccgccgccgccgtcgagctcctccggcagcgaatgctcggagtgcaaaaacaacgttgc

SEQ ID NO: 21509 - DNA, 667 bp, Glycine max
ggtgtcctcgtgggtggaaaccatacttcctccaggttttgcactcgctaatccccctctcttccccccttcggcttccgatttttctctctcaatctttgttcatcaaagtgctgcatctctctcactctcttacttaactcgacaacttcagccacattattccatggatgccaaggtattcaaattccagatcctccaaggctccatcgctaagcgcgtggtcattcgctcaatactactcgcgtgcgccgtctcaattgtctccatctaccgcgcgcaatccctcttcgatttcggaaccctcgctcccatcgccacgtacttcgactgcgtttccggcttcgagggcgtcacctttcgccctggttcccacttgctccgaacccgcttctgggcctccgccaattgcgagaaagacgccaacttgaccctctccgtggtcaccgacctaactggtagccggttactccaccccggagcgaaaagcctctgcgtcggagaaggctcctcaatggccgtcacggcaatgaaacagttaggttttttctccagcgtcagcgccgtccaaacgcaccgtttcgagcagaggaacgtcctgtacgaggataattccttcgatttcgtgttctcgagagacctagacaaggtttctgtcccggcattg

SEQ ID NO: 21510 - DNA, 430 bp, Glycine max
ctgttcactgtgcaacaagagcagctgcaaaagaagccaagaagcagcttctatcatggagctgcttagatggaccagatgcaacgtttcagttgaaggtccctgctaccatgcctgtgggcaaggaactgctgcggactggacattgtacaaacttacttgaaatggctaatgggcaacaggtactggaactcatctcactttgaatatcgatcaatgatttcatttctctcttgggtgaaaaataacttgtgtctagatttcacgtatataagagacacaaaggccaggccaagactgtccagctatattgattttgaatactgggtcgacgataggtattaccatggggggggaaaaattgatatatttaaatctcaactctcgggtataaatataagttaattttaactaatctttatttatttat

SEQ ID NO: 21511 - DNA, 570 bp, Glycine max
gttttgttttgttgttctccatgtccatgttgtcgatgaagggcaaaaggtttgtatcagtgcctgtgttggcagtgtttttgttgatgctttttgtgtattactcttcaatcttcgtcttcctccaagattggctcggtttgcagagttcccctggcactttgaatgcgttcctcttctctctctttgcctctctctccctcttctctttcttctcctgcgttctcactgaccccggccacgtcccttcttcctacgccccagatgttgaattctccaaagataatgcagaacagaagaaatgtgacaagtgctttgcatacaagcctcccaggacccatcattgtcgagtttgcagaaggtgtattctgaaaatggatcatcactgcttgtggataaataactgtgttggttattggaattataaggctttctttgtttttgtattctatgccaccacggcaagtatttattctacggtatatttccaatctggcatctactggttctgtagtgaacaggattcctatttgacataagcttttacaatgtgcagatcatatttatgag

SEQ ID NO: 21512 - DNA, 624 bp, Glycine max
aagacaaagagactgacatgaaccataagaataaaaaagataattttggtagtgatgcaccacattttcagagtggagttctccgtaccaactgcattgactgcttggaccgtacaaatgttgcccagtatgcttatggtcttcaagctttaggacgccagctccatgcaatgggtttgactgatgttccaaaagtggatcctgatagtagtattgctgcagctctaatggatatgtatcaaagtatgggagatgctcttgcccagcaatacggtggctctgctgctcacaatactgtgtttccagagaggcagggaaagtggaaagcaacaacacaatcaagagagtttttaaaatccataaaacgatactatagcaatgcttacacagatggtgaaaaacaagatgcaataaacttgtttttaggttacttccaaccacaggaagggaaacctgcgctctgggagctggattcagattattatctccatgtatctgggattggggatgatctaattcctgagaagtgttctgaaccaaatctcagttcttctggaagaggtggaatgatattcacgcctataccagcttgcagagaagacttctctcgcataaggtggacat

SEQ ID NO: 21513 - DNA, 567 bp, Glycine max
ctgaactctgaacaccccttccctcacgtgctgctttaccccggtccctaaccctaaccctagcaccctcttccttgcaccgtcactccctcacctcactcgtgaaggcgcggagaaccagttgaaggcttgaagccaccccgacgccggcgaagagagagcgagcaacaatgtcagacagagaagacaacgcccctgaggaattcactgccgaacagggtatacaacaagacgaagagattcgaaggattcaaagagaaaataaggccagggttgttcgtgaaggaaaagagcgtcggaggagatgggcccaaaaaataactcctcgaccatccaaagctggtgaaaaatccgaagacgtaggagactctgaaccacagcaagaatcaaatacagcagcgggatttcttcccgacaacattgtccaaatgcttgcagctcgcgagaaacaagttttcttatctgacaacaatgaggagaaagatgaaataaagcctaccacttctaggaagagaaaatcaaggaaatcaggtttgaaacctgttattttgagcgaaataggtcctc

SEQ ID NO: 21514 - DNA, 1002 bp, Glycine max
cccattcgtacgtacaaattgcgctttgcggcaaaggaaagcaagagtgatagtgcgcgtgtgtgagtgcggactaaagactgaggagtctctgattcattgatggcggaagaagcaattctgggatacctagagaagaacgacgagattagagactcgggtgagttcgcagctgaacgcggcattgagcacaacgagatcgtgaatgtgataaagagcttgcacgggttcagatacgttgacgcacaagacattaagagggaaacatgggtactcactgatgaggggaaaacgtatgctactgtaggatcccctgaagttcaactctttttggctataccgcaagagggtatctctaaggaagagcttcagaaaaagctggatccttctctcttcaagataggttgtgctcaggctgcgaagaacaaatgggtggatatggggaaacagttgatatctagaaaggtccaacatgtggatgataaggtcaaagatcttcttcttcaaatacaacaggggctgaacattggttcagacgaaatcaaagcactcaaagtgagaaagctcataattccacagacgtggaagggttactcattgaaaaggggtcctaattatgcacccaaaagaaagaaggttgtcactgatctgactcgtgataattttcagagtggtgagtggaaggaactagagttcaaggagtacaattatagtgctaaaggtgctcctcttgagggtggcaatcttcatccgttgctgaaggtacgtgctcagctgaaacagattttcctctgcatggggtttgaggagatgccaacaaataatttcgttgagagcagcttctggttctttggtgcctgttcctttttgtcatcaagttctccattcacatgtgggtgttcttcccaataacgattaacttccaatccattaaatgtgttgcaaaattttaaataaatatccacatatcatcttttaattgaagatgttgatggcaatgat

SEQ ID NO: 21515 - DNA, 628 bp, Glycine max
tgacttcgacttcgcagataaagttcctccttcgttcgatcgcgtggtacacttacaaattcaaatgcaagcatttgatgttaccatcgttttttacttagatctgatcttaatcgattcctgcacgatgttcctccttccacgtttttgacgaattaattgggtcttgaagttgtagatcgaaccttgcacgtggtcttgccgtgttttattctcagatccttggaatcattagcaattttgcttagtttttctatcttcatgatgaaaatccatccgagtttttcaatgttacgattctaatgttatgaattcagtgaaaatcaaattaggaatcctcttttattttgtaatttattgttcagctcttcagctaggattttgatctggtaaatgttcatgttcagatttaacgatttaattatgattattgaattgtttatttgtatgaattatggctattatattaagcaatttaatggttggttgcattactattgggaatttgggatgggatggagcaatgattcggtgggccttggtggggaagttaaaatttattatttttattcaaaggatatggtggtgcccatccatggtttggattttagatgatccggatattact

SEQ ID NO: 21516 - DNA, 760 bp, Glycine max
tttttatagactacaaattaacttatccaagtggaactgctactgctgttcttattaacgggttccatactcctaaaggagatgttatggccaagaagcaggttcatggtttcttgaaattcttctcagccagtttcctctgggctttctttcaatggttttattcgggtggtgataactgtggatttgttcagtttcccacttttggattgaaagcatggaaaaactcattttattttgatttcagcatgacttatgtcggagcaggaatgatttgttcccatcttgtaaatttatcattgcttcttggtgctgtgatttcatggggcattatgtggcccttaatcaggggactaaaaggggaatggttttctgcaagcataccagaaagtagcatgaagagtcttaatggttataaggcttttatttccattgctttgattcttggtgatgggctttacaattttgtcaaagtcctctatttcactgccacgaatattcatgccaccgtgaaaaggaagaaccccgaaacattttcagataaccagaaaccactccctcttgatgatcttagacggaatgaagtgtttgcaagagaaagcattcctatatggttggcatgtactggatacatattattctccatcgtttctatcattgtaatccctttgatgttcccacagttgaagtggtattacgtggtgtttgcctatcttttcgcagcctctcttggcttctgcaatgcttatggtgcaggttt

SEQ ID NO: 21517 - DNA, 527 bp, Glycine max
ctgtcgagccgattcggctcgagggattgcatttcaggtaagagacattgattgtaagcaacagcagcatttgatcaaggaagaaaaaggaaatggccttgcattatggccaggcttgtctccagtggcaccagcaggccaggcttatctgcagtcttctgctactaaggctcctgattggctggaagctgcaatccgtgcctcgaaaatggattcaatggaaacttcaacttgttcttctagggggagtatctttattcctaaaagatcatggaagaagtgtgcagctcatgttcacatcagtcatataatcaagagtctagaggtgccaaaaacacaggttttcaaagaaactgagttttttgaatgtcatcaaatgagagaacatgaaggaccaaagcgtggagttcttttaaaagtacacagctcaaacgaaatgaaaaatggaatcacttctactgtgaggaatccacatgaaagtaagaatattattcttcggcagcaatgccattatcgaaacatatcac

SEQ ID NO: 21518 - DNA, 362 bp, Glycine max
caaagattccaccttatagcaagagtaaggagaaagcaggcctggccaaattgttggaggaggcaaaggaatcagagttaaggagctatggggttgttgttaatagcttctacgaacttgagaaggtttatgcagatcattttaggaacgtacttggaagaaaagcgtggcatattggtcccttatctctatgcaataaagacgcagaagagaaagcacgtagaggaaaggaggcatctattgatgagcatgagtgcctgaagtggctaaacacaaagaaacccaattcaggtatttatatatgctttggaagtacagtaaagtttcctgattctcaacttaaagaaattgctaaaggtctt

SEQ ID NO: 21519 - DNA, 546 bp, Glycine max
gtggccgcagaaacactagctttcgtcactcagatgactcaagcctcataggatatgcatggcatctttggaatgaacacagagcaatggagcttcttgatccttgcattcgtgattctagtcctagaaacaaggctttgagatgcatacacatagagatgttatgtgtgcaagattcagcagctcacaggccaaacatgtctgctgtggagttgatgctggaaagtgaagcaacaactcttcccatgcctacgcaacctttgattacttcaatgaggagaactgaggacagacaattttacatggatggccttgatgtttcaaatgatctgacagtcacaatggtggtagggagatagaaattgattccagtccctttctgtgtcagttttgtttgcacttctctttcacccttcacacatacattcatagggctcactgttttagtttttcccttatgaccctggcgaaattaaactttactatactcttaatattgaatacacatttgtatatatcaatgacaattggtattttgagacttca

SEQ ID NO: 21520 - DNA, 590 bp, Glycine max
cctcgagccgaatcggctcgaggcagactgggtgttaccaaacacagacacaacacaacacagtgctctgttgctacttctacttgccggcggcacctacttcaccgagaagagtgttccaacacaacacaacatctgccaaaatgacaatttcaccctctctgaccttaacacccaccaccccgagaatcaccgcaacaacccacacttcccacacttcccacacttcccaccccacctatctcaaactcaatcctatttccagaccttcccctctacgcgccttcctccccctcacatcacgcgcccccactcgccgctgcccctccacccccgcatgcctcttcaccggcatcgtggaggaaatgggcaccgtcaagcagctgggcatctccccacacggcggcgtcgacctcaaaatcgcggcctccaccgtcctggacggcgtaaacctcggcgacagcatcgccgtgaacggcacgtgcctgaccgttacagaattcgacaccaaagtcgccgacttcacggtgggcctgtcgccggagacgctccgaaagacctccctctcggaattggagcccgggtccgcg

SEQ ID NO: 21521 - DNA, 412 bp, Glycine max
attttcagacatagggatcttggatggagttttgatccagaaaagcattcagagtatcaatttgaatatgtggaagctctatctgattttgctaaaaatgttggcgttaaagttgcttatcttagcaaactaaaagggtttgctagtctctttcagcgaactgtgctaaacagaactagcttcttttggattttgcctaatgagctatataagctctctcatcacattccttcatataagatgacaggtgctgaaaggcatgatgttccaagaggatcttttgaacttgatcctgctggtctgcctaatcgtctttttgaagtcggtgatcctggtgttgtgaacatggatggtgtcaattgttcgcaccacgaatactcgaagtgtaaagttgaagaggcaatgcctaatg

SEQ ID NO: 21522 - DNA, 501 bp, Glycine max
  unsure (1)..(501): unsure at all n locations
cgtcaagaacctccagcgcctcgccgagatcgccgtcgcggccctcgaacaaacccccctcggtgacggccaggtccgccgcgccaagaaggcgctctccgccctcgtagccgccatgctgaacgacgacagcaacgccgccgccaagggaaccgaacgcacccgctccttcgggcgccgcgccggaaacaccaacaccactaaatacaagtcgctgtcgtggagcatggccaagaactggtccgcggcgaagcaaatccacgcgatgatgtcgaatctgacggcgccacgtggcgcggagtcctcgggattggcgcaacccatgtacatgatgagcaccgtgttggtgttcgtgatgtggactctggttgcggcggttccttgccaggaaaggaatgggctagggacccattttcctctgccgaggcaattgggctgggcccagcccatgatcggcctgcaggagaagatngcggaggagtggaagaagaaagagaagaa

SEQ ID NO: 21523 - DNA, 376 bp, Glycine max
ccattgttggaatctggtttgcaaaaagacagagggttaattgtggagtattttggaaggatgtcttacgttgctcataacgttaatcagccccaagagaaagatttgttagagggaaatttttcctttgatattaaatctcgctctagattggaaaaagtttcctctacaaaagcacaatttgttagtggaaaaaccttcaaatatgatatagttggtgctggttcacattcttcaggagattttcctgaaaaggaagatcaagaaaaacccaaaaagattgatgccagattgagacaaagaatagatcctcaatacaatgaggttcaggctcagatggaaacaaatttgtttaaattgtctcttgatgatggtg

SEQ ID NO: 21524 - DNA, 346 bp, Glycine max
atgaattctaacttcttttatgcagtagatcttggtgaagatcaacgtctgaaaaatcttttatggattgacgctaaaagtaggcatgactatatcaacttttgtgatgtagtgtcgtttgataccgcctatgttagaaacaaatataagatgccgcttgcactttttgttggagtgaacccgcactaccaatttacattacttggatgtgccctgatatcagacgaaagtgctgccactttttcttggctatttcggacgtggctgaaaggagttggtggtcaagttccaaaagtgatcattactgaccatgacaagacattgaagtcagttatttcagatatct

SEQ ID NO: 21525 - DNA, 384 bp, Glycine max
ataccgcgaaacccaaccgctgaccgtcgctccggcaatgtggccggaactccaataatctccgtcgtcccacttctacccccgacaatgcctcacgccaaaacctcccaatcgcagcagaacataaagcagagggttctcacgtgcctaacgaagctctcagaccgcgacacacaagccgcgggagccaccgagctcgagtccatcgcgcgtaccatagacccacactcggttccagtgttcctctcttgcatccactccaccgactcctccgacaaaacccccgtccgcaagcaatgcgtgcacctcgtcgccaccctctcccacgcgcacggcgacgcgctctcgccgtttctgtccaaaatcatcgcctgcctcgtccgc

SEQ ID NO: 21526 - DNA, 513 bp, Glycine max
gttgtgttgttgatattgtgttgatttcttcattcaagttcaaacttgaatttggattcatctgatttaatcaatgagatcaaaatcgggatttgattgcagttgcaggtctctctctttggtgcttattactaactattattaaggtttctttcttctgttgaaatggtctttagtaattatagttctgccaatgaatctcattgtttaatcctgattatacctttcccgaaatgcaattagcgtcaaatggtgacaaggaagaatgttcagaaagcgaacccatcttgaatcatcaccatcttcatttgccaccacccggagaatcctccttttcctgtgaaattattcctatttctgctgctgcttccggcgatgatgatttacaaaacgttcgggttgatgagacttgtcatctcgtaaatgcagatcagccacaatgccgaatatgcctcgatattggaggagaagatttaattgctccatgccattgcaaaggtacgcaaaagtacg

SEQ ID NO: 21527 - DNA, 972 bp, Glycine max
gtgattcaccattagaaccaaatagtcctttatatggggtttcagagagtgttgaaaaggaggaaaacctccaattccatagaagatttgaagtgtcttcaaatgtatcaggccttcccctgcgatatgatgttacgatcaaataccagtctggacaggaatttgagtttttctcaagtgaacccaacattgcaactgcatttggtcggcgtagtcggagaaaggtcattgctgaacagaggactgctagttcaagtccagaacatccatcattgcgagctcgtggacggtccatgcttagtggtgataggacaacgtttagagattttaccgatgatcaggctacatcaagatccagctataggtcagatggcacatcctcgtcagaagctcgtcggatacgaagaagaagcatcagcattacaccagagattggagatgatatcgtaagggctgtacgggcaatgaatgaaactctgaagcaaaaccgtctcttgagagaacgaggggatgataactcattccccaattctccaaacaatagtagtagtgatgcaaatcttcagaaaaatgtgtcaaatttccatcttgatggccatgatgaaagatctgccctatattcttttcagcgtgaccaaggaacttcacaaaaggcaatgtcattaccatcttcaccacatgattatagaggccaggcttctgagagaagtgggccatcaagatacggagtgaatgatgaaatggagtcaacatggaataaagtactggaatctccaatgttcaataataaacctctgttaccatatgaaaaatggaatattgacttctccgaattgactgttggaactcgcgtagggattggttatctttggagaagtgttaccgtggcatatggaatggtacaaatgttgcaatcaaggtttttctagagcaagattgaactgctgaaaatatggaagacttttgcaacga

SEQ ID NO: 21528 - DNA, 673 bp, Glycine max
catttgctcatctcagaaaccgagacagatattttttttttctcgtattaacaaataaaaaatgaaaaaaaagtccatcgagtcctcaatgaatgaatcattttaagtattattatcattatctaatggtgacagaatgatttagctagttataagtttcccacgggctctctcttttttgactttgcattttcattcattgaaaggcttttacttcacttttcagatttccagcttattcactcatgcaagttttgacatttcaatcacccccaccttctcaagatatactgtgatgccggctctgagaattcatggatatgccttggctgtttcgttttgtcttatcaccttcatagcagcctcactaccaacagacccttcagaagttgatgccctgatagagatcaagaatagtttgattgatcctaagaacaatcttaagaactggaataaaggagatccatgtgcagcaaactggactggtgtttggtgttttgatcagaagggggatgatgggtacttccatgttcgtgagatctacttaatgacaatgaatctctcgggaagtctatcaccacagcttggacagctatcccatcttgagatactgaatttcatgtggaacgacttgacaggcacaataccaaaggagattggaaatattaaatca

SEQ ID NO: 21529 - DNA, 553 bp, Glycine max
ctcgagccgatccttgttggatataactaatcaagcgtgtagtcttttccgccctcctgagattgaattgctggagtggacagatgatctggagatgtttattctgaagggttatggtaaatcactaaactatagaatgggactgccattacttgaagatgttgttcaatccatggaacaggctatcgtggctgaagaagaaagacatgctcctggcagctttgaaaaggcaagacttcggtttgcgcacgctgaaactgtagttccattctcatgcctgcttgggttatttcttgaaggatctgagttaaaaaaaattcagaaggagcaacctttgcagcaccctccaaagcctccacagaaaagaaaatggcggggtagcactgtggccccttttgctggtaacaacatgttagtcttgtatagttgtcctgctccagacaaatctaccagcaagcacttcgtgcaagtgttacacaatgaacaccctgttccattgccaggttgtgatggctctgatttctgtccatttgaagtattcaaggaaaaaata

SEQ ID NO: 21530 - DNA, 442 bp, Glycine max
gaaaaatggaatttatataccgcgtgatcgttatcttcatgaagaagcagagaaaaaggccatggttgaaaagatagaacgcatggaactagaagcagagtctaaggataagcaactggtggagcttcaagaactctacaactcccagcaacttttgactgatgaattgagtgttaaacttgaaaaaactgagaaaagtctagaagaaactgagcagtcattgtttgatcttgaggaaaggcacaaacaagcaaatgcaacaatcaaggaaaaggaatttttgatatcaaatctcctaaaatctgagaaagcacttgtggagcgtgcaattgaactgcgagcagaactcgagaatgctgcatcagatgtgtcaaacctcttttctaaaattgagcggaaggataaaattgaagaaggaaacagaatacttatccagaaattc

SEQ ID NO: 21531 - DNA, 361 bp, Glycine max
cgactccttaacggcactgctgagatttttggcaccgagcttccacccgaaatctggctcaatttccctcccagactcaagtttgctgtgtttacttggtatggtgcaaccattgaaatggatggcgctactgaaactgattatactgcagatgagactccaatggtcagttatgtaaatgtccatgctgtgctggatggaagaagaagtcgtgctaaagcctcatcaccagatgattctggttcttctcagggccctagggtcattgttgtaggacctactgattctggaaagagtaccttgtcaaggatgcttcttagttgggcagctaaacaaggttggaaacctacctttgttgacc

SEQ ID NO: 21532 - DNA, 391 bp, Glycine max
gttttggagattcattacattaccctcttatatataacttgttacttagatttttcttcttctttttttatctctcaacggagagacagaaaaaaagaaagaacgaaagagtgattaattagagggacatgagaacaaggagaggtgcgtgttatcctggtgtagtctcaaggatgtgctccaatgtgagggttacgaagaaaaaaagcaaggatctgcacatgcatatgcatgttcctgccggagactccattatttatagccggaaaaagcagaagaaaacgccggaaaaactcgccgccggtcgttacgattttttcgagtccttgccggatgacctcgtaatctccatcttctgcaagcttagttccaccgccactaaaccttccga

SEQ ID NO: 21533 - DNA, 770 bp, Glycine max
  unsure (1)..(770): unsure at all n locations
ccgcccacgcgtccgcccacgcgngcttttcacttttacgcccacttttccgaaattaaattagtggttaaggttgttggaggagctctaacaagagatggagacacaaaattggttcgaaagagtgaagcctttagcagctgtggtatcaatgcagtttggatatgcagctatggatgttctatccaaggctgcaatgaacaaagggatgagcaactatgtgtttgtcgtttatcgtcatgctgttgcattctttgttatggcccctttggcatggttttttgacaagaaagtaaggccaaagatgacattatcaattttcatgaagatagcggtgctcagcttgctagagccagttattgaccagaatttgtattttttggggatgaagtacacaacagcaacctttgccgttaccataaccaatatgcttcctgccattacctttatcttcgcatgcattcttaggcttgagaagattaaaataagaagtatacggagccaagcaaaggtggtgggaaccctaacaactgtttcgggagccatggtcatgacactcctgaaagggccagtacttttcgggtcacacggaagcaatgatcacagccagcataatcgggacaagtagtgcgacagtacaatagacaggagttcatattgatcacaattggatgcttgtgttgggcttgtttcgtgatactacaagctactacccttaaaacctaccctgctgaactctctctttctgcttggatatgcttaatgggcac

SEQ ID NO: 21534 - DNA, 550 bp, Glycine max
aaaaggatgagaaaggtgtttccgattgtgatgatttgctcgctggattcggacacagtaggtcatcatctggtggaaggcacactcctgatatcggtttatcctcagaaccaactgccagtgcatctaaaacaatccccactgcagcagaagaccctttcaaagtatttgaatcagcttcagccccagtggattcatctgcaggccactttatgaacccgttggaagaaattagtaaatttagtagttctggtagcacaaaaaatgatagttgcttcaacttcaaatggcaaagcgtatgaagatattgatccctttgatggtcttggaaaatctgcaccagctttctcatcagagagaaaataccgggaagggtagcagttccccaagggttgaatacaagcacaagttggactggagataaagaaccagctgataaaatatctgggaggagtcctgagaggcacacacaaaacaagattcctgttgaaaatgatcgagaatttccacatgtcccatttcacatgcctacctattcatctgattctga

SEQ ID NO: 21535 - DNA, 597 bp, Glycine max
  unsure (1)..(597): unsure at all n locations
actaaaaaccctcctccaccgccaccgccgccaccaccaccaggaccgcctccatctaatagcgtagaaccaaagaagacaacaagcaagctcgctgatttggagttagaggtgaagatcattggttgggatgcaatggtaagaatccaatgcagcaagaagaaccaccctgcagccaggttgatggcagcattgaaagatcttgacttggaagtgcatcacgccagcgtgtctgtggtgaatgatttgatgatccaacaagccacggtgaacatgggaaacaagttttacacgcaggaacagcttctgtcggcactatcatccaaagttggcgatgaactacgatagttccttctgtactattattggtagcagtagctgtagctttctatgtaaattagtgttcttatttttggttagtcctttttggtagcttggactaaattaattttattgaggtaatttgatttgggaagctgaatgatcaaccaggggatagtaatatctctgatgaagtccaagtggattttttttgtgttaatattattatctgtttatattggatatatatatatatatatgnttatgaattatcat

SEQ ID NO: 21536 - DNA, 461 bp, Glycine max
gccagtgattcttcttcacttctacctcttcttcatcatcatcatcagcagcatcagcagcaccagcagcaacttcttcagtattggagtggcgcgttgaatctaagtccaagaggaatgttaacaaggttggggccagatggaaggccattgtttaggcctccaacacagcccataaacacaacaaaactctataggggagtgaggcaacgccattggggcaaatgggtcgctgaaatccgtcttccacgaaacagaacgcctctctggctaggcacatttgacacggccgaagacgccgccatggcctacgaccgagaagccttcaagctacgaggagagaatgctagactcaatttcccagaattgttcctcaacaaggacaaaaaagaagaacaacaacaacaagaacaagaagcttcttcgccagttctttcagctattgcaaagcagcatgaacc

SEQ ID NO: 21537 - DNA, 849 bp, Glycine max
atttcggttcgggttcccttgcttagtctagccaatagccaacccaacccacgtgctttctctcttttcttttctctcttccctcaggaaaaacacacaaccctccccaaaacggtgtcgttttctgggaccattttagagagaaaaagagagagagagagttgtgttgtgatgcggaaacgttgatcccaaatgcacccgtacaaccggctaccgagcagcgggcactcgacgccgtcaccgccgccgtctccgctccggtcgccgaggctccgccacgcagggcggtccaaggccgggcggttctctccgagccgggggagcggtcggaccgccgcgcagcggctcagctggatgttcctctctgttctgcttcgacgacagggcgtttttctcttcgctcctctcatttacatctccggaatgctcctctacatgggaacggcgtcgttcgacgtcgttccggtaattaaacaccgtcccgcgcctggctccgtctaccggagccctcagctcttcgccaagctccgcctcgacatggattccgataattcctccgccgatgcgatatctacaatatggaagtatccctatagaggtggtgagtggaagccatgtgtgaacagatcttcagaagacctacctgaatcaaatggatacatatatgtggaggctaatggtggcttaaatcagcagaggacatcagtatgcaatgcagttgctgtagctggctatctcaatgctacccttgtaatccccaactttcattatcatagcatatggaaagatcctagcaaattccgggacatttatgatgaaggagtttttgtcaataccttgaaaaatgat

SEQ ID NO: 21538 - DNA, 523 bp, Glycine max
  unsure (1)..(523): unsure at all n locations
ctctctctcactctttcctcagcatttggcaacatctgcaaactctcttctccttctctctatctctcactctgcagcaaagggtaaagtaaaagacttcattcatttacaattgcattatttccagagaaaaaaattgaaccttcttcacatgtcgtcggacataagctagcttattagccactcttgcttcccttctttcaatcttcacaccccttttggaatcttacagggttattcacttatttgtcattcaatggctagttgctggttttgttgttgtgttgttaagtccagtgttgcagttttagcgttaagtgtggttgtgtttttgtgacgggaaaaaaaagttggaagctttggttggtggggggtgtcaattgtgatgggtgcggatcgtctgatactgccaacagttggaccgccattaaaacggcgagcggngttgcggaggaagcacgctggaagagggtcatacagagggagctaggtgtgagtgaacgagtgagtgtgtggtgttttt

SEQ ID NO: 21539 - DNA, 505 bp, Glycine max
tttgaacgattcggctacttccctcacgcgccgcccttctcgaatttctccgatgaattcgacgacccgctcgaatccgccatcaaaacttaccagaagaacttcaacctgaacgtcactggcgtcctcgacgacgccaccgtgcagcagatcgtgctgcctcggtgcggcgtcgccgatataatcaacggcacaaccacgatgaacgccgccaaggagaacgagacggcgtcgtttagcaagccgaagtttcacacggcggcgcacttcactctttttcctggcatgccgcggtggccggagggaacgcatgagctgacgtacgcgttcttccccgggaacgggctgagcgacgccgtgaaaggcgtgttcgccgccgcgttcgcagcgctgggctgaggtgacgtcactgaagttccgcgaaacggcgtcgtacttccgcgccgacatgaggatcgggttcttcaacggcgaccaacgggacggggagccgatcgacgggagc

SEQ ID NO: 21540 - DNA, 832 bp, Glycine max
ctttcttttcttaagcccctcatgcatggtggcccgttcagtcccatcaatttttctctccttttttatcatcatccaaatgctgcctaaaccttaatgctttctcttccatcatggccttgattttcttgttatttccattcccctcggaacggtagttaacgagaagagaaaaacaatggatgaaactaaaattctcttagagttgaagtccgtttcgtccttatgtgttcatagcttcatcaaccttctatgcgaagaaactatttcttttctctcagtgttctcttcagatcctctgtttcattgcatcgtggcgttttgcaccttggttttcctctatttgccacaccttttcttgaaaataattctatctccagtgcccattctcactgcgattctccttctctctattctccgtctcggtgcaattcaaaggttacaacatgaaagaagggagaatcatgtgaaacacgaagaacaacccatcgtttacgaagaaaacaagggaagtaaatacaagggagagaaacagagtccatgtaccattgaacctgacgaaacaaagtccgtagaacaagtgcaccaatgggtccattcagaaacagaggtcatttccgacatgggttttgaatcaagttctcgttttgttgaatggaacgtgaaagcaccgttggaagtgatatatgaagagtatggtgaaggtgaagaagcaggggatgatgcaaacgagaacgtgggtattatgaggtacccttcgttgtcgcgtttttacccggaatcggattccgatagcgaatcggagagtgagtttccggcgatcggaattggg

SEQ ID NO: 21541 - DNA, 517 bp, Glycine max
cctaattctccaaattttctggctcctctgcgtgctcgttgaatccatcctaagtgacttgcttgctgaaggcgacacgaggtcggtagaaactaagaatgggggaagagaatgaagaaacaaaaacatttaaggatttgggcttatccgagtcattggtggaagcttgcgaaaaattgggttggaaaaatccattaaagatacagacagaagcaattcctcttgcattggaaggaaaagatgtgataggacttgcccaaactggttccggtaagactggagcttttgctcttcccatattgcatgccttattagaagcaccacgcccaaaagatttctttgcttgtgtgttgtctcccacaagagaacttgctattcaaattgcggaacagtttgaagctctaggttctgaaattggtgtcaagtgtgccgtgcttgttggaggaattgacatggtacaacaatccatcaagatagcaaagcagcctcatattattgttgggactcctggacgagt

SEQ ID NO: 21542 - DNA, 249 bp, Glycine max
gccaccatcaaatggtttccgatcagagttacaacccactggcgtcgacgatggttttgaaaactacaggctatgtagatgtggagcaaaacaaatgagaacatgctattcaaattgcagagcagtttgaagctctaggttctgaaattggtgtcaaatgtgtcgtgcttgttggaggaattgacatggtacattaggcatctgtaaaaaggttgttgctaaggtcattcctggtgcacctaatgtaag

SEQ ID NO: 21543 - DNA, 555 bp, Glycine max
  unsure (1)..(555): unsure at all n locations
acaacaccaccctctttataataacacccattttctcttcctatcaccaagccccaccatgaacccgccggaatttccctccggcagctgcggaacatcatcgccgccaggaaagaaagagctccagctccaaggtacacgcccgccgcctctcagagtcagcaaagactcccacaagatccgcaaaccgccgcttccccccaccgcgcaccaaccggcggcgctgccggagcaccggaagccggtgatcatctacgccgtgtctccgaaagtcctccacgttcccgccggtgacttcatgaacgtcgtccagcgcctcaccggaccctcctccggcgacgtatcgccagcggcgagactcgcgtcgatcgagagaacgagcccgtcggagagggagaaagttcacagcgaagacaacgacgtgaagttgatgttagaaggagtggaagtggggcaattcccccgaatattgtcgccggcgacgttgcctccgatatcaccagggtttttctcggaaccgcaaacgacgtcattttggaatgactngagcccgtt

SEQ ID NO: 21544 - DNA, 713 bp, Glycine max
ctcagagtcatttaagggaatattctatgcaaggtttacgaactcttgttgttgcgctccagggatctttcagatgctgaacttgaggagtggcaaagcatgtatgaagatgcgagcacttcattgacagatcgagcagcaaaactacgtcaaacagcggctcttatagaatgcaacctaaagcttcttggagcaactggaattgaagacaagctacaggagggtgtaccagaagccattgaatccctgcggcaagctggaatcaaggtctgggttcttaccggtgataagcaagagactgcaatttcaattggtctttcttgtaaacttctgagtgcagatatgcagcaaataattataaatggcacttcagaggttgagtgcagaaatctcttggctgatgccaaaacaaagtatggtgtgaaatcttcaagtagagaacaacagaatctaaaatgcaaaattgattctagacatggaggccctgatattcccaatgatacaaaatccttgagcatgcccaagtgggatccaggaaaggaagaagaaactactgctccattggcactcataattgatggaaccagtttggtttatattttagagaaggaattacagtcagagcttttcgaccttgcaacttcctgtagggttgtgctatgctgccgggttgcacccttgcagaaagcaggaatcggtgatctgataaaaag

SEQ ID NO: 21545 - DNA, 557 bp, Glycine max
actgagcgaattcggcccgacttcacaattcatcaacatctaacaccacacacacgcaacacgcttcagccactattcttcaaggaaaaacaaaatgaaagacacaatggaaactcctacgacactcaccaccttgctccgccacgtcgccgccaaattcccctcccgccgtgccatctccgtcgctgccaaattcgacctcacccactcccgcctccaccgcctggtcgaatccgccgccgctcagttagtctccgccggcgtcaaacccggcgacgtcgtcgccctcaccttccccaacaccatcgagtttgtagtcatgttcctagccgtcattcgggctcgagccacagccgcgccgttaaactcggcttacacagcggaagagttcgagttttacttatccgactcggagtccaagctcctcctaacatcaccagaaggaaacaagcctgctcaagccgcggcttcaaagctcagcatcccccacgccacggcttcgattaccaaagccgagaacgaagaagcggagctgagtctctcattattaaaccacc

SEQ ID NO: 21546 - DNA, 403 bp, Glycine max
tctcctcgatcttctctctccgtccaaaagtgacgttctcaacacaagaacggttttctgtgtctaagcgctcttagtggttccgattctttctccactttcaacttgtccgtttctcactctccctcaaatctcattctctctctctctctcttccttcacattctctcttttccgcccatttcagttgagccattctctcttctgcttctactttctagtcaattcaaccccccatcttcacctctgatccaaagctgagaacttgctttctgggttcaatagctacactcacatgctgttgtgggttgcctttaaaacatcacctttgaagacatctcgggtcgctaactaaccccttttgttgattttgcaacagaaaggtttaataataataataaaa

SEQ ID NO: 21547 - DNA, 571 bp, Glycine max
attctctctctctcccccctgcttcaatggagggcttggcgtagctttaaccccaaacaaacctcgaagcaaacgaaagcttttcaactcaccacaatgagaaaactctggaattcgctgtctctcgtcgctcgtcggagatcaatctcttacttctccaaatcgtacacttccgatgcacctttcaactgctgcaccaaaacccacggtttacttatcagacccaacaacaaatttgcgaccaccccatttcgaaacatggacaccctcgttcagaaaccctctccaatcccctcgaggcagcgaaaaatcatggaaaaatcgcagcttgacgaagctttcgagtccgcagaaaccaccgaggaaatgctcaaagtcttcagcaacatggaagggggttttcgacgagagagagcttgctttggcttctttaaaaattggccttaaacttgaccatgaaggtgaggaccctgagaaagctctttcctttgctaacagagctttgaaagctttggaaaaagataacaacaacaacaacttcccttcttctttgcctgttgccatgtgtttg

SEQ ID NO: 21548 - DNA, 714 bp, Glycine max
ttccagtgcttccatttccaccccgaatccacactctaccctccctggttccgcaaatttaaacccagcaaaatcgccatcttcaccaccatcatcaccttaacctccctaatccttataatttcagccaccaccgccatgctccgcagatcaaaagcttcatcagcaacacaacaagaccctaataccctcttgcttcacaacaaccggtcggaaagcctgctgcgtcccgcttcacctacgaagatttagctctttcaaccaacaacttcgattcaaaacggataatcggcgacggcgggttcggctccgtctacctagcaaacctccgcgacgggcggctcgccgcggtgaagtacctccaccgccaccacgccgtttccgccgcgttctccaccaaatccttctgcaacgagattctcatcctctcttccatcaaccacccgaacctcgcgaagcttcacggatactgtagcgacccgagggggcttcttttagtctacgattacatccctaacggaaccctagcggaacacctgcataaccgtaagggctcgctgacgtggcaggtgaggctcgacatcgcgttgcaaacggcgttagcgatggagtatcttcacttctcggtggtgccgccgattgtgcacagggacataacgtcgtcgaatattttcgtggagagggatatgaggattaaggttggggattttggac

SEQ ID NO: 21549 - DNA, 928 bp, Glycine max
cccgaaaggttggagcaccaccagaactggcttcacttcttgaagaaatagcccgtgaaagctacccaacggatgctcttcgtgagataggagatgatcctgaacttgacgaattcatggagtcatactgcgaagttcttcatagatacaagcaggagttgtcgaagccattcaacgaagcgaccttgtttttgtgcagtatcgaatcacaactcagcaatctttgcaagggaacactgacaatgccattggataacaaccactcagatgaggccgctggaacatcagaggatgaattgagttgggagaaggtggaagcagttgaaggtcacgaatcttctggcccacgtccaggtgatcaagagcttaaagaaatgctccttcgtaagtatggtggttatcttagcagcttgaaaaaggaatttcttaagaaaaggaaaaagggtaagctaccaaaggatgcaaggatggtactcatggactggtggaacacccactatcggtggccttatcctacggaggaggagaaagtgcagctatcagaaatgactggacttgatcaaaagcagatcaataattggttcatcaatcaaagaaaacggcattggaaaccatcagaggacatgcgatttgccattatggatggtgtaagtggcagtggctttggaggacctatctaatatatttctggagatggaccgtgttgattcctgctacttgtaccttcctgctcgtgtgatgtgtgtatacgttcttttccacgagatatgtattaattttttgaacctgcatttgtatgctaagtaaataggtccttcagcttatatatatatgcaagagtgtaaaaaacctgtagctaatatacgcgacagtgataatcgatcaatgctactgaatcattatttcatgacaatttacattatagtat

SEQ ID NO: 21550 - DNA, 353 bp, Glycine max
ggagaagataaagatctaaatggaaggttgagagtatggtctgatgttcattgcacaactcgacttcttggaggtgttgcaaaaatcttattggttttgtatgtcaatagaaatggtagcagcaatgagtctccattatgtttggcaaactacaccattgaagagcacacaatcaccagatggaatccagaacagtgccgcgaaaagatggtaattcatgctaattctgataatggaactgcgtaaatacttcatcatatggacgcaacaacatatatcaaacatgaaaaaaaaagggttttttttattgactttgaccaaagatattagctattcacgcataacaatattct

SEQ ID NO: 21551 - DNA, 415 bp, Glycine max
cgtcgagccgattcggctcgaggcctcccagaggaaagcttcctctgccaatcattatcaccacaatctgtgttcttctcttcatagcagtcttgtatgctgagagactaagtttccttaactccagctccattttcaagtccaaaacatgtcctagaaagcacaacaaatcaaagtctaatgataaaaaatctgaggaagtgtttgcaaatgcctcgtggatcgatgataggttcgattttgacccagaagagtgcaatgttgcaaatggaaaatgggtgtttaacagttcattgaagcctttgtactcagacacaagctgtccatacatagacaggcagttttcttgtgtcaagaatggaaggaatgattctgattacctccattgggagtggcaaccagaagattgcacctt

SEQ ID NO: 21552 - DNA, 459 bp, Glycine max
accaattcaattcaattcaacctttttttttctctctcaaaacccattcgttcccgatgcctgaaatggatggctcctccgccaaaccccctcaaatctccgaaatgttccagaaattcgccctcgctttcaagaccaaaaccttcgaattcttctccgaggaagaaaacaacaacgcttcccccctcctcgacgacatcgacggtttctccctccttgactccaccgaagaaatcatccccgaccagaaagtcgtcgtcatcaaacccgaccccgatccctccctcaattcctgcccaccgccgctgctgccacaggcacaatcccctccgccaccgccgtcgacacagatcatacctccgcctacgaccccggaatcccgcgagcccgaaacgccaccgtcgtcgctaacctctgctcagatcagagaaatgacacacgccctggtctcctcggtct

SEQ ID NO: 21553 - DNA, 490 bp, Glycine max
caagagagagaaagatacaactctcgctttcgctattactattatttcctccctcaaaaaaccgccatggacagtgcagacgcgtggcgcgtggccgcgtgtggcaactccaacgtcaacaaaataatgctccgcttccgcccgatcgcgccgaagccggtcaccggaatttcccgccgccgaagctggctccgccgtcggagaagttactcagaacaaccacgtgtcagtcctggggaagagaccgaagaggaagtacgttaggattcggaggaacagtggatacgtgagaaagaataacggagacagtaacggaaaaagtaacggtaacggtaacgatgagtcttccgacgtggcggttgtgacgttgcagttgatgcctgagaaggacgcgccgggaggagacgtcacgctcgccggagattcgtggtgtaagaacgttgatcttgacctaaccgtggagaagattcagatcgtggagaatcggagt

SEQ ID NO: 21554 - DNA, 438 bp, Glycine max
aatcgctagagagagaaaccaagaaagagaaacacagagaaatcgctttcgctattatatcctccctcaaaaaaccgcgatggacggtgcagacgcgtggcgcgtggccgcgtgtgccaacaccaacgtcaacagaataatgctccgctttcgcccgatcgcgccgaaaccggtcgccggaagttccgccgtctccagagccaccggcgctggcgacggaagccagagtagccacgtgtcacctctagggaagagaccgaagaggaagtacgttaggattcgggggaacggtggatacgtgcgaaagaataacggaaacagtaaccgaaaaagtaattgtaactgtaacgatgagtctttccgacgtggcggttggtgacggtgcagttgatgccggagaaggacgcgccggaaggagacgtcactctcgcgggagat

SEQ ID NO: 21555 - DNA, 461 bp, Glycine max
aaggttttgaaggtttacaatcagatgaagaggcttggttgtcctgctgataccattagctataatttcatcattgagagtcattgtagggatgagaatctcgaagaggctgcgaagattctcaatttgatggtcaagaaaggggttgctcccaatgcgtccactttcaattttatttttggatgcatagctaagttacatgacgtgaatggtgcgcatcggatgtatgctagaatgaaggagctgaactgccagcccaatacgttgacttataatattttgatgaggatgtttgctgagtcaaggtctactgatatggttctgaaaatgaagaaggaaatggatgagagtcaggttgaacctaatgtgaatacttaccgaattttgatttccatgttttgtgatatgaagcactggaacaatgcgtacaagtttatgatggagatgggtgaagaaaaatg

SEQ ID NO: 21556 - DNA, 681 bp, Glycine max
cttttgaagaaaacggagggaaacctgaaaccaacccttttggagcaagagctgtgaggctctaccttcgtgaggttcgtgaacttcagtccaaagctagaggaatcagttatgagaagaagaaacgaaagcgtccaccaccaccaccaccaccacaacaacaactacaacaatcattgcctctacctcttcaccctcactcactcactctggtcactgtcttaggaaccctagaacaagaaccctgagacaaaaacaactttggatctgtaaagccaaagggtttcaagtactttctttgctagcttgtctccatggattcaattcaagaatttatggagtcgtgtaacactgacatcaccaccaccaccgcaacaaccaccagcaacagcttagttggtagctccaattccccttctgcttcctccaccaccagcagccgctacgagaaccaaaagcgccgtgactggaacacctttggccagtacctcaagaatcaccgaccccctctctccctctccaggtgcagcggtgcacacgtccttgaatttctcaggtacttggaccaatttggcaagaccaaagtgcacactccgatctgtccctttatgggcaccctaaccctccagcaccatgtccatgtcctctaagacaagcctggggtagccttgatgcactcat

SEQ ID NO: 21557 - DNA, 611 bp, Glycine max
gttttcattacagtaacttctaaaaggaaaaaacattaaaaaagaaattattcaaacaaaaggacatttgctgaactgttatccaaactataagtatagtaattctttatctcaattaaccttcatctctctcacacactcctctcactagctctggtcactgtcttaggaaccctagaacagcaacccagataaactattccaagacacacaccacagaaagagagaatcaaaacaattaagccttggatctgcatagcaaaggcaagcacaagggtcatggattcaaatattcaagactttatagacacatgtaactctgacaacacctgcaatctcatcaccaatagcaccaccaccgccaacttaaccgcagctagtgctgcctcttcctctcctgcttccacctccatcaccagcagcagccgctacgagaaccagaagcgccgtgactggaacaccttcggtcaatacctcaagaaccaccgtccccctctctccctctccaggtgcagcggtgcacacgtccttgaatttctaaggtacctggatcaatttgggaagaccaaagtgcacacaccgatctgccctttttacgggcacccgaaccc

SEQ ID NO: 21558 - DNA, 359 bp, Glycine max
ggtagtagttttggtagcccaaagaaatagccactaaaattcattaaaaaccactgtttcaatctgcagtcaagattgtgcgttatggaagatcacgaaagccagagaaaagtcagaatcctgtgcctccatggattcaggaccagtggtgaaatcctcaagcaattagtcttaagatggcctgaacctgtcttgcaaaagctggagcttgtgttcctcgatggcccgtttcctgcacagggaagatctgatgttgaaggcatttttgaccctccttattttgaatggttccaagccaatgaggagttcactgagtataccaactttgaagaatgtttagcatacattgaagattacat

SEQ ID NO: 21559 - DNA, 798 bp, Glycine max
gcaatggatacccatctcaccaaatcctttaatatccctcccgcctcccttcagtccattccttacattttgctcatcgttttagtccctctctatgacaccttctttgtcccctttgccagaaagttcaccggccatgagtctggaatcccacctttgcgccgaataggctttggtctttttctggctaccttttccatggttgcagctgctctgttggagaaaaagagaagggacgcagctgtgaaccatcacaaagttttgtccatcttttggataaccccacaatacttgatctttggcttgtcagagatgtttacagccattggccttcttgagttcttctacaaacagtccttgaaagggatgcaagcattcttgacagccatcacatattgctcctactcctttggcttttacttgagcacacttttggtttctttggtcaataagatcacttcaacttcttcttcagctgctggctggcttcacaacaacaaccttaaccaggataggcttgctcttttctattggttactggctgtcttaagcttcctcaacttcctcaactatctcttttggtccagacgctattctcatgctccttccgccctacccccacctaatactaaggaacatcatcacaatattccatagacatctatactcttttcagattattaatttacagttactgtaaagaattatatcaagatgtcgtatcgcccgggatctatcgagtagctagcattatatattgcagttataagcttaatcttaattaattcgcccggtacc

SEQ ID NO: 21560 - DNA, 796 bp, Glycine max
atctcttcctcagtcctctccccgagtctctgtctcttcctgaaccgaatctaattggagagaggcttcagtctgccaccaacagaaatagttatcgtcaagtccacactccacattgtaacagatccatggatcatcgtcattggcgcttcttcattatgcttttcattaccgcagcagcaataggacttgtttcgtcgttagggataaactacggccaaatagcgaacaatcttccttcacaagacgacgccgttgcgttggtgaaatccatcggagcgacgaaggtgaagctctacgacgcagatccacgcgttttgaaagcgttcgcgaacaccggagtggaattaatggtaggtctgggaaacgagtacttgtctagaatgaaagatccgaaacaagcacaggcatggatcaaagccaacctccaaccctacctcccagccaccaaaatcacctcaatcttcgtcgggaacgaggttctgaccttcaacgacacctccctaacctcgaacctcctcccagccatgcagagcgtgcacgccgcactcatcaacctcggtctcgacaagcaaataaccgtcaccactactcactcccttgccgttctccaaacctcctaccctccctcggcaggagccttccgtccggacccagctccgtgcctagctccaatcctgagcttccaagccaaaaccggatctccgttcttaatcaacgcgtacccctacttcgcatacaaggcgaatcgaagcaggttccgttggagtacgtgctcttccaacccaacgaaggg

SEQ ID NO: 21561 - DNA, 320 bp, Glycine max
gtcctctccccgtgtctctgtctcttcctgaaccgaatctaattggagagaggcttcagtctgccaccaacagaaatagctatcgtcaactccacactccacattgtatcagctccatggatcatcgtcattggcgcttcttcactatgcttttcattcccggtaattattaagctaatattgttttactttcactcttgcggaattgactattaatgttgatctgcagcagcagcaataggaattgtttcgtcgttagggatacactacggccaaatagcgaacaatcttccttcacacgacgacgcgttgcgttggtg

SEQ ID NO: 21562 - DNA, 366 bp, Glycine max
gagcaagaccgtgagaaacctcacagacatctttttcgctttcctcatatgggaatgtggactaaactcagaccaggaatctggaacttcttggagaaggctagtaagctctatgagttgcatctttacactatgggaaacaagctatatgcgacagaaatggcaaaggtgcttgatccaaagggagttttgtttgctggaagagttatctctagaggtgatgatactgattcagttgatggggaggagagggttcccaaaagcaaagatttggaaggcgttttgggtatggaatcatctgttgtaattatagatgattctgtgagggtctggcctcataacaaactgaacttgatagtggtggaa

SEQ ID NO: 21563 - DNA, 649 bp, Glycine max
gcccccaaaacagagcaaaacagaggatccactccaccactactcctaatggatcctccacccctctctgccgccactcaaaaaaaccatcccgaatcggtagagtccttttctccatgtttccgcgttgcggaaacgtggactgatgagactctaccggcggttcctggtgccaagctgcgcctcatgtgcagctacggtggccacattatgccacgccctcacgacaaatctctcagctacatcggtggcgacacgaggatcgtggtggtggaccgccactcgtcgttgaaagatctatgttcacggctttcccgaactatcctcaatggaagacccttcacactcaagtaccagcttcccaatgaagaccttgagagtcttatcactgtcaccactgatgaagaccttgacaacatggtggaagagtatgatcgtataatggcaaaaggttcggcttcttcgcggctcaggttgttcttgttcttcaccaaacctgaggccacagtttcaatggggtcactccttgatgattccaagtcagagacatggtttgttgatgcacttaacaactctggcatgatatcaagagtggtgtcagattctgctgcaggggattcctttgttaaccttgatggtgttggtgttg

SEQ ID NO: 21564 - DNA, 643 bp, Glycine max
aagaagagccatgggaaaagaggaggaggagggtggtttgggaagggttgatgatgatggggttgaagggacaaagtaataataataacaacagtaagttatagaattcggttgtggtctcgtcggcgaggtcttcgaggatgaaactgtggatgatacgcgccaccacatcggtgttactgtggacctgcgtcgttcagttaacggcgttgggggatatgtggggcccgcgtgtcctcaaagggtggccgtcgtgtttcacgcacggcgaatccgccgtgctcattgagttgccgtctgccaccacgcctagagtgctcccacccaagagggtttataagaataacggttacttgatggtgtcgtgcaatggaggactcaaccaaatgagggctgcgatatgtgacatggtggcgattgctaggtatttaaacgtgacgcttatagtgccggaattggataaagcgtccttttgggctgaccccagtgagttccaagatatctttgatgtggaccattttattacatcttgagggatgaagtgcggatattgaaagagttgcctcctagactcaagacgagagtggacaatggtttactttacaccatgccaccgattagttggtctgacatatcatactat

SEQ ID NO: 21565 - DNA, 607 bp, Glycine max
gtatggcatatgcaacacttcaattttttatattctttgttcttgtgatgaaattgagtttcttctactttgtgagaaacttttagtttcaacttcagagaaggtgagaatggtctaagaagaagccttgcatggcgagccaaagaattggagaaacgggtttgtctgagtcgggaccttcaagtcaccatgtcccttatggagttcttcatgggattaatacttcatcatcagccctaatcaatcaagggtcagcttttgattttggagagctggaagaggctattgttctgcaaggaattaagataagaaatgatgaagccaaagcatcagctttattcacaggcaggccttcggccacactggaaatgttcccctcatggccaatgagattccagcaaacctcaagaggaggttcaaagtcaggaggggaaagcactgattcaggatcaggagtgaacactctttcaaccaaaaatgagctccgatttgaaacagaatctccaataagcataaaagcatctccttcagatcatcatcaggcgtttgatcagcaccttcaacagcagcagcaacaacaacaacaacaacaggagacagcaacagc

SEQ ID NO: 21566 - DNA, 778 bp, Glycine max
gtttgaaagcaaaagggttgaggaacagaatgaggcaaaggcagctacaactgaaacagtagagagtgtgaaagttgataatgatagctcaatagttgatgacaagaaggaagagaaaactgactcaaaggtggaagaaatctctagagctattaatgaacctgttagagaaacattggcatctaaatttgaagaggaaactgttgaacctggagcggataaggtagagaaagaacaaactgtggagcctgagaaaactgaggaggttcaagccaccaaggaaagtgatgcaacaaaaacatccaaggaccttccaaaagaaactccagcaaaaccagctcaaaagcaatcaaataacatcatatcaaaggttaagcagtcactagtgaaagcaaagaaagctatcactgggaaatctccatcctccaaaaacctttcctcggatgctaagggcgatattaaagtcaaataatggaactgagtgaacaagtttgcagcatttacgtatttgctttctttcttttttttcgttgtcgtggcgcatagcattatagcatatttgttggtttttatacattgtaatttttctcttgaatttgtttgaatgcaaaagggtgtgcagagtgtagtgtatatagaagatgaactaggccatgcattaggcagtgctgtaaaatttgattgttttgttctgttttattcttttggataatatgcattgtgtttttgtttgttgttgataaacgaccaaggcaattttaacttattgttatgtttt

SEQ ID NO: 21567 - DNA, 388 bp, Glycine max
tctcgagcgaatcggctcgagtatcaacattaagaattctcagaacgatattcattggggatgctcatattatcctgatggcaaagcaaaagctcttctggaggaaattcaggaattctccaagatactgcatcaggatactatgagcatccccaatgaatatctctctgaggattattgcccaagaaatgtccgctttaatgagcttcttgaagttttgaaggaacctaagttccaacctgttgagtcagaataccaactagcatcaaggttgtcgatggccgagaaggatattaaatatggtatggaacttttgaaagatacagtatcaacattaagaattctcaagctgggatcaagagaagaacaatctagttatcttaccata

SEQ ID NO: 21568 - DNA, 504 bp, Glycine max
accccctttccatttagagttctctcttccaaaacccaaaacaaaaacctcactcacctctgctcttttctgtgaatcacttatcacttaagaaaataaaagagcaaacgaaatgttgcggtcacttgcgagagccgtagcgaccaatcatcgatgtcacgccacgttctcatctctcagtcactcttctaggcccccaaagcccacaccacccttcaaacccgatcccaaaaaatccgcccccaacgccgccgccgtcggcgtactcatcgacgagcaggaacgtcgccggcagctcgacgccgacgataaaaatccttctctcgatgtggggcccaacgagccgcctctcttcttcgtcggcccttccttctcccacctcttccgcaacgacgtcttgacctacttcaagctcacgtactctcctttactcactttagttggtttgtttttcagtgtggcattttgtagaacaccttgtgtgcgtcttttagtttgacgttt

SEQ ID NO: 21569 - DNA, 293 bp, Glycine max
caactctcttcacttgcttagtcccattcgcaaaccctaacgctaacggccaaagcagcaagtgaaattatcagaatcgattaatccaagtttgattcgaagcgaaattgaagttttagggaaagatagaataaaaaaaatggcgtatggtggttcgggttcggcatcgacaattaagcaagtcaaattggagagagaaagcgaactgagaatagaagttggtaacgacgcagctcttcgccttcgactccttaacggcactgctgagatttttggcaccgagcttccacccg

SEQ ID NO: 21570 - DNA, 407 bp, Glycine max
  unsure (1)..(407): unsure at all n locations
acaaaatctgagagaaaagagcactcagcaaatttactggtactcatggcagatcatcagagactgaggatccaccctatggagggggaagcaccaccgccacccccaacaactccattggtccctccaggctcgtcaagatcagaaaagcgtgtccctttgcaccatcctccacctctaccacgtgctatgccagcagcataccctacaccacacataagaagctcaagctgttgctgcaagtgcatatgctggacaataatcttggttgttctcctcctcattatctntgcagcaagtgttggaatcctttatctagtcttccaaccaaagcttcctgattactcagttgacaccctcaggataagtgatctgaggcttaactttgacatgagcctctatgcaaa

SEQ ID NO: 21571 - DNA, 326 bp, Glycine max
aaaaagataacggagaggtgattgaccagggcgaacatctctatttctgggttcctttattggcagggttatctgagcttagctttgacccaagacctgagattaggaagagtgccttggaagtcctgtttgaaaccttacgtaaccatgggcatctcttttcactacctttatgggaaagagtatttgagtctatcctatttcctatattcgattatgttcggcattctattgatccttcagggagtagttcaccgatcaatgaagtagaggctgatggtgagcttgaccaagacgcttggctttacaaaacatgcacattggct

SEQ ID NO: 21572 - DNA, 542 bp, Glycine max
ggctcgagggctcgagtgcaactaagaaaatggggagcataaccacaagcaccatcggagctcccccaacccgaagaacaacactcacccctttctcttcgcttctccccaaacccaaaccccattctctcgccctatccacttccaatccccacccattccatctctccaaacccctaaccatttcccctaatccaaacccccccattcccaaatccaccccctcctcctcctccgccgctacctctccatcctcccccctaaacctcaagtcccgcctccgcaacggcgagaccctctatggtctcttcctcctctccttctcccccaccctcgccgagatcgcgggccacgccggctatgacttcgtcgtcgtcgacatggagcacggccccggtggcatccgcgacgcccttccctgccttcacgccctcgccgtcgcgaacaccgccgccatcctccgcgtccctgaatccaccgccgtctgggccaagaaagccctcgacctcggcccgcagggcctcatgttccccatgatcgaa

SEQ ID NO: 21573 - DNA, 753 bp, Glycine max
ttgctttctgcctggtattacttgtcagccttccccatggaagtattgatcccagcatggctggacttgcagtaacatatggcctgaatttaaatgcacgtctatcacgatggatacttagcttttgcaaacttgaaaataaaatcatatccattgaaagaatttatcaatacagccaaattcctagtgaagcaccagcaattgttgaagattctcgtcctccatcctcatggcctgagaatgggacaatccaattaattgatctgaaggtacgttacaaggaaaatcttcccgtggtgcttcacggagtatcctgcacatttcctggtgggaagaagattggaatagttggtcgtactggcagtggcaaatctaccttgattcaagcattatttcgattggttgaaccggaggcagggagtatccttatagacaacattaatatttcatcaattggtcttcatgatcttagaagtcatttgagtatcataccacaagatccaaccttatttgaaggcaccattcgaggcaatcttgatcctcttgatgagcactctgataaagagatttgggaggcccgtgttacttggatagctccatttagttaaaattacacagtattcgcttaatctgtaaatgtctataaagtgtgtttgtatgtgaggaaaaaataaatagcattgcatttgggttttaaatgtgtgtgtataataagagcttttaaatagagaaaatgggtactattaatgctac

SEQ ID NO: 21574 - DNA, 378 bp, Glycine max
ttcaatacagaagaacttcaactgtatgtcccaactccagtgacagttactttttagaacatttttgccccgttatgtctcacagttagcaagttgatggccgtgtttttacttatgatagctttctctttttactctttagaattcacaataagatgatagaagcgtgcctcgtctaaaccagaaaggctcctaggtgccatgagatgctactacccccagtcccttctggcgcctggcctccgtgccttggacgcacctattggttaccttgataactttgggtagaattaaattatgttattccatttggtttaaaatatcagtgtttaagcagtgaattatccattttttatttattgtacatataatccaacg

SEQ ID NO: 21575 - DNA, 558 bp, Glycine max
gttcaaactcactccctctcccccacctttcatttccaccttctctcccaatccaccaccgacaccaaccaaccttctctcggccatgccaccgccgccctcaagctgcaaaaggtctaccggagttaccgtacccgccgcaggttggccgactccgccgttgtcgccgaggagctatggtggcaagccatagactatgtaagactaaaccacagcaccatctcgttctttaatttgccggaaactgctgcgtcacgctggagtcgggttaaattgaacgctgccaaggtgggtaaaggtttgtccaaggacgccaaagcacaaaagttggctttccagcattggatagaagctattgatcccagacatcgctatgggcataacttgcaatactactacaaagaatggtgtaaaacagatgctggccagccgtttttttattggttggatttaggaaatgggaagaatcttgatcttgaacaatgctctcgatcaaagcttcaaaaacaatgcatcaagtatctgggacctcaagagagagaacaagtttgatacact

SEQ ID NO: 21576 - DNA, 415 bp, Glycine max
caccgacaccggacacgacacgaagacgtaaacacctggccaaatatagaatgcagtatgaattagcgaactactgtgatcaagatataaatcacacctaccagtgatttgtttttgtcactagtctcttccatggaagttgaaactcactccctctcccccacctttgaattaatccaccttctctcccaatccaccaccgacacctacttccctcccaataatgccgccaaccaaccttctctcggccacgccaccgccgtgctcaagctgcaaaaggtctaccgtacccgccttgcaggttggccgactccgccgttgttgccgaggaggtggcaagccatagactatgtaagggtaaaccacagcaccatctcgttctttaatttgccggaaactgctgcgtcgtgctgga

SEQ ID NO: 21577 - DNA, 444 bp, Glycine max
ggtcaagcgaaaacccttatgtttgtacagcttaatcctgatgttgcttcatattctgaaactgtaagcaccttgaagtttgctgagcgggtttccggcgtggagttaggcgctgctcgtagcaacaaagaggggagggatgtgagagaacttatggagcagttggcatctctcaaggatgcaattgcaaggaaggatgaagagattgaacggttacagtcgctcaaggctaaccataatggtgcaaagcttggtatgatctcagtaagacatgggtcatcatctccaaggagacattccatagggactccccgaattagcacgagacttgcaggagcaaggagctttggagtcaatggaaaggcagcttctgacatggataactgctcagagtatagtgataagcattcagaaactggttctcatcaatcaatggatgatttc

SEQ ID NO: 21578 - DNA, 721 bp, Glycine max
gcttgttttagataatccttcactccttgcttttttgagcttcaaattacaagctaccccttcttttcaaaaccctaattcctctttctcttccaatctcatttctcaagatcggcttcgctgcttcctcaggaattatgtcttttgtgcggaattatcaagcagaagattgtagtttacatagtggttactggtccacctttgatggaaacaactttggcaacagcaataggaaaagaagcaggaacaattattataacaggaactgtaacatttacaatgacaaccggacaaaatttggggaccatggttgcaactttaatttttacacagctgatcatgctaattatgttagatatgatgctgttccatcatctttgaaaaggagaaaatattcagtgcctgcttggcaagaaagccagcaatactatgttccacccatggtccatgacaatatcccttcatcctataatttccaaggtcctcctacaagatctgatggtgatgcctctacatcagctagctgcaagcgtgattgctctatttttgaagatgataagcctgtcttcatgtctagggacgaaattgatagacactctccatcaagaaaagatggtattgatgtacatcatgagacacacttgcggtactcctattgtgccttccttcagaatcttggaatgcgtcttgagctgcctcaaaacatcattgggacagctat

SEQ ID NO: 21579 - DNA, 619 bp, Glycine max
tgggagattaaagttgagggtcgggtgaaagatggcatcccccatctaacaaaggttgggtcttttgatgttgatgtgagtttggaaggtagtatcatactgtgtaggcaggtagatcaaccaggcatgatcggaaaggttgggagcgttttgggtgaggagaacgtgaatgtcagcttcatgagtgtgggaaggatcgctccacgcaagcaagctgttatggcaattggagtggacgaacaacctagcaaggaatctttgaagaagattggagacattcctgctgtggaagagttcgttttccttaaattgtaagatgaaatggttgctcatattattttttttcccttttgttttgtaatttggattgggcatggttgccagatgtgcccggttttgatgcattatcatccaacgtgtagcagtaatttggggggataataaaaggaataatgtgcctggtttattgagttcttgcttgttcaaaaaaaaaaacaaaaaaaaaacaaaggggcgccccccgactacgagccccgtgccccggggaattattccgggacgggaccttcagggggacccagtttcccccacagggacccctttaagacctgggcgaacc

SEQ ID NO: 21580 - DNA, 521 bp, Glycine max
ggaaagtgatcgttttctaaagcaagtcacttttcatctccttcggcttgcagtcttccgagatgaaggcatcagcgctaagggcagttgtcgggcttcaaatacttgtgaggagttcatttcattactttatgcagacagctagattgagagtcatgttgattatcacattatcagagctaatgtctgatgtgcaagtgactcagatgagatctgatggaagcttagaagaaagtggtgaagcacggagacttaggaagtctttagatgaaatgaaggatgaaactaaaaatgcttacttgttgaaggagtgtggattacctgagaatgctcttgtgatcgtacccgaaaaaatgacagagaatagatggtcctggtctgaggtgaaatatctctctgacagccttcttttggccaatagtgcatgctccaagctgccgttctatgctagaaactgcatgatgacaattatgcatagaacagttttctaatagacttgctattagagcatcagtcgtttt

SEQ ID NO: 21581 - DNA, 1000 bp, Glycine max
ctctcttgatcctaattcatcattgttccacaatttccacaatgtccagcagtcgcagtcacggtacagaaggctcatcaagcaacattcccatagagtatcagcagcagcagcagagtccagtgacacttagccgctatgagtcacagaagagaagggactggaacacttttggacaatacttgaagaaccagagacccccggtacctctctctcagtgcaattgcaaccatgtgctcgatttcctccgttatctggaccagtttggcaagaccaaggttcaccttcaagggtgcatgttctatggccagccagaacctccagcaccctgcacatgcccccttagacaagcttgggggagccttgatgctctcatagggaggctcagggctgcttatgaggaaaatggtgggtccccagagactaacccttttgcaagtggctccatcagggtgtatctcaaagagattagggagtgccaagccaaggcaagaggtatcccttacaagaagaaaaagaaggcctcaaatccaagcaagggaaacgatgaatcatcctccaccatgcacttctcttgaacaacatcatcagtatcgatctctttggacctttcaagtcatggataatgtagcatacaatcaaattggagatcctttttacaaggcacagtctattggaggttcggtttctatttggattgataatttgttggcatgccactcgatctttttaaagttgctcctttgtttacccgggagtttgtatgatcctagctgaacagcatactcattaattatatgacggtcagttatgccttggtttatctttgcattaattcaaacttctcagttgcatatgtacatgcatatatagttagtttgtcatgtatttttcggattggttccattaaagtgtaaggtattttaataagcatattgctttcttattaagtaggcgcatcaataataataataataataatatatagcattcttaaaaa

SEQ ID NO: 21582 - DNA, 864 bp, Glycine max
ctagcatggcccataaaatgtctactcattagcccaatgacatgatccccatcttcctctcccctattcatttcacctagctagctttcaccctcccctttttaattccttccctttattattaatttacaaaatccaaacaaatctctggatcttgatcatctcatcattcagcaccacaatgtcttcttcaagtggcaaagatttgggagaaggatcaagctctccaacagaaaactaccaacagagtccagggacacttagccgctatgagtctcaaaagagaagggattggaacacttttggtcagtacttgaagaatcaaaggcccccagttcctctttctcagtgcaattgcaaccatgtgttggattttcttaggtatcttgaccagtttgggaagaccaaggttcaccttcaagggtgcatgttctatgggcagccggaaccccccgcaccctgcacctgccctcttaggcaggcctgggggagcctcgacgccctcataggcagacttagggctgcctacgaggaaaatggaggctccccagagactaacccttttgccagcggctccatccgcgtctaccttagggaggtcagggagtgccaggctaaggctagaggtataccttacaagaagaaaaagaagaccacaaagggaaatatggaagaatcttcaacctcctcctccatccacttctcttgattattcttcctttggaagatgtgtgtttcacctaatattggataatgtggcatatatatataaattaaattggaggagttctttacttttaaggcacagttcttgggaggtttcgtttctatgtattcggtaatttgatggcaccccagtacttt

SEQ ID NO: 21583 - DNA, 562 bp, Glycine max
ggcaccatttttaacgttaaccctatccaaagtttctttgttccttgcgttgctcttctttgtttcactttcttcttcctatgcaacttctcgcctcacccatgaccgtgtcaataacccaccaaaatcacgagcagaaaagctcataagaagccttaacctatctccaaaggacccagtaaacattgttaaaggtgatgaccttgctaatggttttgtcccagggaatatcgtggagaagaagttctcgtttcttggtgattctggaccttctattgaagaccttggtcatcatgcaagttactattcacttcctaattccaaagctgcaaggatgttctactttttctttgaatcacggagcaacaaggatgatccagttgtcatatggttgactggaggaccagggtgtggaggtgaattggccttgttttatgaaaatggcccttttcatattgccaacaacttgtcccttgtatggaatgatttcggttgggaccaggcatcaaatattttatttgttgaccaacctaccgggacaggttttagttactcttctgat

SEQ ID NO: 21584 - DNA, 891 bp, Glycine max
attttggatggctgtgatcatttggaaagagcatcattttgtccagttggtcttttatctctcaatttaggaatatgtccaaaattgaacacactcagcattgaagcaccgtttatggtttcacttgagttgaaaggatgtggtgtactatctgaagcattcattaattgtccactcttagcatctctcgatgcttccttttgcagccaactaacggatggctgcttgtctgcaacaactgtctcatgcccactgattgaatcattgatattaatgtcatgctcatcaattggttcagagggtcttcgatctctgtattgtcttccaaatttgactgttcttgacttatcatacactttcttggtgaacatgcagcctgtctttgattcttgtttgcaactaaaggttttaaagctgcaagcatgcaaatatctcactgaaacatcacttgaacctctttacaaaggaggtgctttgccagcacttcaggagttggacttgtcttatggaactctctgtcaatcagccatagatgagcttcttgcttgctgcacaaacctaactcatgtgagtttgaatggctgtgtgaatatgcatgatttgaattggggaagtagttgtgggcaaagtgacaatttccctgctgtaaacaccccatctagggcaagttctaatgagaatatccctgaatcaagtgagcaatccactcgcttactgcaaaacctcaactgtgttggatgtccaaatattaggaaggttgtcattccattgagggcaaattgttttcatttgttatttttaaacctttcactctcggcaaatttgaaagaggttgatgttacttgtctcaacctatgctttcttaatttaagcaattgttcctctttggaa

SEQ ID NO: 21585 - DNA, 417 bp, Glycine max
caaagttaatgagtcaaaatgtacacatatgaagtgcacttttggtgggatatggaatggtggggggggtgatggacagaaaaacctttttgttgcctcatttttctttgaccgggcagctgaggctggttttgccaatccaaatttacccgttgtgaaggttcgtcccgtcgattttgaggctgcagactaagcaagcttgtaaaacaaaacttgaagatgccaaatccacttatcaacgtgttgatgaatggaaccttccatatttatgcatggatctcttataccaatatacatttcttgctgttggatttggcctaaatccattgcaacagattacattattgaccaaagttaaatatcacgatgcttttgttgaatctgaatggtccctaagcagctccatataagctttat

SEQ ID NO: 21586 - DNA, 605 bp, Glycine max
cacgtgcgagcggttgcagagtatcgtggccatcgcttcagaggcggcgaaactgagtctgaagaaaaggggcatgcacgttccgccgtggagaaaagtcgaatacgtcaccgcgaaatggctctccccttacacgtgctcgcgcggggtgaaagaggaaacagaagagaaagagcaccttgcgaaagagttggtggtgttatcaacttcgtgtggaagtttccgtgaagatgatgaaaagtcaaagtcaaaactcgtggttcagaatcagaagccaccggagatgaaacccaaaagttctcagtccggtttggcagctgtgttcctagaaaacccaaaattttgattttttttcgtttgtttctttttttggctttttgttttttttttatataaagtttaaattttctagagtgaggattcaaaaaaggctgtataagtagtttagttctgtaatagctctatccccttctgatttttattgtaagggatgatgggtttttactttttactaatatgaatgaataaagtaaaggtgaaatgtattggtagctatttgtattttgcaaggttgtgatgagaagttgattctttacgtatttgat

SEQ ID NO: 21587 - DNA, 588 bp, Glycine max
tggggcttaggattgacccaagtgctgtttttctgcatctatggccattcacagtatgtaggagcaatttgagttttggtgttgatgtttagttaactagttgcgctacgagaaaactggttcttagcatccggctgtgtggttttcaatctttatcatctctagagtggtctaagttcgaatcttttgtgctcgaggggctgaaagcaagatgagtttatagtggagggttttaaagatctcagtggaggagcaatggaacctccaacaggattttgggcatcaatatggaactttgtttgctttctgccgtttttccgggggctccggcttcttggcaacatcaaaggtgtcattttttgcccgttggtatgcttagtaatgacaataggcaactcagctatcatacatggtctttggcccatacattgtatttggacatattactgtgtagtgagatctaaaaaattaggacctgcactgaagtttgttacatgcacatgtatactacccttggtgttgattttatggccagtggctggcattgttgggagtgttataggtggagctgcctatggattttttgca

SEQ ID NO: 21588 - DNA, 524 bp, Glycine max
ggtgtacaacatcttggtggaaaaaacaaagtctgtccctggggctaaggtagaaaataacaagttttgcttgtccgtgcactttcgctgtgttgacgaaaagagttgggtgtcattggctgaacaagtgagcttcgtgctcaacgagtacccaaaacttaagctaactcaagggagaaaactgcttgagattcgaccagccataaaatgggacaagggcaaggctcttgaattcttgctagagtcactgggatatgctaattctgataatgtatttccaatctttattggtgatgatcgaactgacgaagatgcttttaaggttttgcggaggaggggccaagggattgggattcttgtttctaaaattacaaaagaaaccgatgcttcctacactttgcaagatccaacagaggttgggcagtttttgaggcatatgggagagtggaaagaacgagtcccaatccagaagtagatctagatgagttagggaaattgcccagccataattgtcaagggtggtc

SEQ ID NO: 21589 - DNA, 670 bp, Glycine max
cacccatccaaaaactcaacgcaaagagagaaaccacgacacaacacaaaacctccttagacttggtgtattttgtttttctgtctgtgttgttccttcacaaccacagagccaaaaacaaaaacatctaaaacctctttctttctctgtgtttgtgtttttagtttttgtttttgtcctatgaaactcccaacaacgtttgcagacccggaatccttgtcttacctttacaccttgctccaatcttccttcgaccaaatgaatgatcccaccaacaacaacacttccaccactgggagaaaacgccgcagaaaaaacgaggatgatgatgatgatgatgatgatgatgatgatgatggttcatccaacaacaacaacaacaacaacaacaagaggagcaagaagaagaaggaagagctaaagggtatcctcacttcaattctcttgttagacgaacaagagaaacttgagcagcaacagaacaataaggtctcagaggaagagaagttttcattggaaaccaatcacaagaagaaaacaaaagccatgcttcactactattccaaccttgatgagtattacagccacgtggaggagtcagagagggtgaagaggaagaagtcacgcggcatggcacgtgcggtggcggtggcggtggcagcgtgtgaaa

SEQ ID NO: 21590 - DNA, 784 bp, Glycine max
tcaacatatggggctgcagcttgtttttattggtaccatagccctgtgtttggctgtgtcctcggcagtgcttgcgcggtttgaacaagcacttaaacaagatgggtcacttagcttcttggtcattggagattggggaagaaaaggagcttacaaccaatccaaagttgcattccagatgggagttattggacaacaattggacatcgattttgtgatttccaccggcgacaatttgtatcacagtggcttgacaggcatagatgatccagactttgatactgcttctagcttgcaaaagcaatggtacagtgttttgggaaaccacgactataggggtaatgttgaggcacagctgagtcctgtcctcacaaatcttgacaagagatggctttgcctgagatcttttattgtaaatgcagaagttgcagagtttttctttgtagatacctactccgtttgtggacaaatacttcatagaacctaaggaccatgtttatgattggagtggcatattgccccggaaacaatacatttccaacctactcaaggatgtggatttagctttacaacaatcaaatgcaaaatggaagattgtggtgggtcaccatacaattagaagtgccggcgtgcacggtaatacggatgagcttgtaaagcagcttctcccaattcttgaggcaaacaacattgatctttacataaatggacacgatcactgcctacaacacataagctgttttgaccgtgcaaatcaatttttggcttgcgggggaggggcaaa

SEQ ID NO: 21591 - DNA, 646 bp, Glycine max
tctgaaatcatgttggtctgtctgtaacaaaacttttttactattaatttagttctaaagcattcgattcaaaatattgtagccttgaatattttcatcactggatcaaagaattcattccaattgttgtctccatagctgaaatggaaagaagggttgcaattatcggggcaggaacaagtggccttgttgcctgcaaataccttctagagtttggatttaatccaattgtctttgaagttgatgatggtgttggaggactatggagacataccatggactccaccaagctccaaaacaataaacaaatgttccagtttatggattttccatggccttcttctgtgaaagaagataatccaagtcacaagcaagtgctagattatgttaactcctatgctgaacatttttccctcattccttacattagattcaacttcaaagtcattgacatagattatgttggtggagagtctagtgaagaaatgaagtcatgggaattgtggggtggtaatggcaggcccttttgctccaagggaacttggcatattgctgtgcaacataccaaaaatttatccatagagatgcatgaggccgagtttgttgttctttgcattgggacatatagtggttttccacacattcc

SEQ ID NO: 21592 - DNA, 420 bp, Glycine max
ggagttccaaccaatatgctgacggtaaattgttcggcgagaatgacagtgcataaccctgcaaccttcttcggaattcatgtcagctctaaagcagtgaatcttatgtattctgagatgacagttgcaactggtgagctgaagaagcattatctatcgagaacgagtacccgtacagtgtctgtgaacctgcaaggaagcaaggtttctctatatggtgctgatgcaagcttaactggcttggtggacaatggaaaaataccaatgaactcttgtctttgaagttggatcgctagggaatattgttgggaggttggtgaggtccaaacatcgaaggcgtgtctcttgctcagtggctattgattcccacaacatcgaacccatcaaacttaaagagaatgcatgcacatacaattgaga

SEQ ID NO: 21593 - DNA, 723 bp, Glycine max
gcaaatgctcttctttctagcaaagagaaattcaggagctaaggcatagtcttcactccacaaaagatggtatgcagttcatgcaaatgaaatttcacgaagacttctccaatcttggcacgcacattcatggcttagctaatgctgcttctggatatcatagagttcttgaagaaaatcgcaaactatacaatcaagtccaggatcttaagggaagtattagggtgtactgtcgtgtaagacccttctttcctggacaagcaaaccatttgagtgcagtggaaaatatagaagatggaaccatcacagttaatattccttcaaagaatgggaagggacgcaggtccttcaactttaacaaaatctttggaccatctgctacccaagccgaggtcttcctagatatgcagccactcgttaggtctgctcttgatggttttaatgtttgcatatttgcatatggccaaacaggatcaggaaaaacctacactatgactggacccaaagagatcacagagaaaagccaaggtgtaaattacagggctctaagtgatttgtttcttatagcagatcaaaggagggacactgtccactatgacgtttctgttcaaatgattgagatttacaatgagcaagtcagggatctgctggtcactgatggaacaaacaaaagattagaaattcgacgtagttcacaaaaaggactcagcgtgccagatgcaa

SEQ ID NO: 21594 - DNA, 435 bp, Glycine max
ccttctcacaccaactgccatccattgccttcatcatgagcggcgccaccactcctctgccctccggcgtgagcaccccggacatccgcacccgcgagctcaagcagcccatggacgtggcggagtacctcttccgccgtctgcaccaagtcggcgtccgctctgtgcacggcctgcccggtgactacaatctggtcgccctcgactatctgcccaagtgcggcctcgactgggttggtaacgtcaacgagctcaatgccgggtacgccgctgacggctacgccaggatcaagggcatctctgccatcatcaccaccttcggtgttggtgagctgtctgccatcaatgccattgctggtgcctactcggaatatgttcccgtcgtccacatcgtcggctaccccaccactgccgctcagaagaacaacctcctgc

SEQ ID NO: 21595 - DNA, 702 bp, Glycine max
tatgaattgtgcctatataaacagtaccgaaacctcaaagaaagcacacatcattagaagtgaatttacaaagaaattcaaaagcaaagcaagaatcatgaattccaatatttgcaattggaaacaaaatcaggttcttcccacagaggaagcaaagggggatgacacttacctctcagctttgacactatgcttcagccgaattttccctgcaatcttgaacgctgctgttgatctgaatttgtttgatatcatagccaaggcagagagttcatctttgtcagcctcggaaattgcttctttgctgcttccaaatccacaccctcaattggctaataggcttgaacgcatattgcctgtgttggcaagttactctcttctcaattgctccattcgcaccaatgaagatggtgtgagagagagactctatgctctctcaccaattggtcaatactttgcgtgtgacaacgatggaggctctttgggtcctctctcaagcttatttcatcgtggatattttcacgtcttgaaggatgtaaaggatgcaattatggaccctaacaacaacgaccatttccaaaatgtccacggaatgcctccttatcaatatatgaagacagacgaagaacttaatcaactatttaacaaagcattggcccaaactggccctcctgaaatgcgaatgctccattaactatacaa

SEQ ID NO: 21596 - DNA, 478 bp, Glycine max
ctcgcagccgattcggctcgagcggctcgagaaattcattttcagtgttagaactcgacgccgacgatagccatgttcccaccactgccgatattagtgacaagagggttaatgccgacgttgacattgtaccagtaaaaagcgagaaacaaaatcaagaaaatccagtgactccttcgtgtgaatacaagttacctcttgtgtggattgacttggaaatgactggcttaaatatcgaagtggacagaatattggagattgcttgtataattacagatggaaatttaaccaaaacagtggagggtcctgatttggtcatccatcaaactaaggagtgccttgacaggatgggagaatggtgtcaaagtcatcatgcagctagtgggttaacaaaaaaggtgctaaagagtacaataagtgaaggagaagctgaaaagcaggttattgaatttgttaagagatatgttaatgttggttt

SEQ ID NO: 21597 - DNA, 408 bp, Glycine max
ctcgagccgaatcggctcgagaatgactatgtcatttaatccagagcccgtgttctgatgcatggaggttggaatttttgaagcgtaccggatttcattgtgatatcatttgtgtcactgggtggactgccaccccaatgcaggatgttcaggttacaattgattggtttatttcctctcaggaatgtgttcccaggacctattgtgttttaaatccacaaaatccttttgtgttaaataggtggatgggaaaactgactttcccccagggcacttcccgaagtgttaagagaatgcctctttctatagggggaggagctgttgcaatgaatgcttttttcatgtatatgccttatgctggtctttcaatgttgagatattttgttggtgatttcgtctttaagtttt

SEQ ID NO: 21598 - DNA, 332 bp, Glycine max
  unsure (1)..(332): unsure at all n locations
aagaaaaggagttaggaatgtcttaacagatatataacctgtttgggtacaagctagaagagcttttcaaagcttttctgttgaaaatatagaactttttctatcaaagaagctctcaaaaactctcctctcatggctttgtacccatgtaggcacatagtatcttagtccagcattgccttatgctaaacttatgtttgacatctcgtataactcatctattcttattttactcagataataacagagttaaaaaaattatttatcatnnnnnnnnnnnnnnnnnnnnnnnnnnnnnnnnnnnnnnnnnnnnnnnnnnnnnnnnnnnnnnn

SEQ ID NO: 21599 - DNA, 778 bp, Glycine max
atctcttttggcctccctgtatttgcgtgtgatccaagtactccccttttcactctttgcactcaaaaagctattccaagaatcacataacaaagagagagagagagagagagaaaaagctattactatgtggttgactatgcgtaaaaaagaatcagaattcagaaaaaaaaagtgtacttgaactgggattcatctgattccttaacttgtctctctgctgattcataatctcttttaaggaagaggttttgccaaccccaacctgcagcaaataatattgcatgggttggtttactaagttgcttaagggatccaaccgtaaatcttcaggaggaagatatcatgggaaatatgaagatgacagaatatcggacaatcttgattgttcagcggatgatttgacggatattgagaaagaagaaattggtcgggcaatagcactctctctttcagaggcagataagaaagggaaaaaagttattgaggacgactctgaatctgaagatgatgaactgtgtccacttagcgacgaggaagctgaatctgttggtgaagttcagcaagatgaagatgaccatcatgctaaaattcaacaggatgaagacaaacatcttgatgaagttcaacttgaggaagatgaacaacttgccagggcaattcaagacagtttgagcattagttctcctcctcgatctgagactgattctttatttcaaccttttgcacacttatttccacctgtatacagaatctgttctggctgtaatgctgagat

SEQ ID NO: 21600 - DNA, 490 bp, Glycine max
caaaacaaccgttgatgctaaaaatagcatatcatatcatcttccccacaagtcacacacccagaacagctcaaaccctcggaccaaaattacatcttacatagatacaccattcattattcatacatggctctgttcccgcattcacttcaaccttaatctccgtttcccctctgatccggcaccaattgcttccacatgtcactctccctctcgcctctctctttccctctcgcactcccctctcttcacaacaacaccaaaggcagataataccactaattctaaaaacagtgaattggatatttttaatttcccatttatttcatgcttcatttattattttaattatttttttaatattgggtttgtttgcttttctttgctttgctcccatttattacgttggattcgattctcacgcatgtttatttatataccctctttttaattcgtgtgtgtgttctggtgctttctttctccgctcaca

SEQ ID NO: 21601 - DNA, 670 bp, Glycine max
  unsure (1)..(670): unsure at all n locations
ctcaataatcacttttatcatttcaaacaaagaaagttgttagtgcttagcattcctttggagatgggacgaanttcaatttttatttcttaccattagcgtgacatgaaaaaataaatttattaattccaatatatattggtggtataaagcacttccatatatgattggtcacaatttttttttacttagattccatcttcattgaaaaaagttaaaacacatgaaaaattaattatttcagttaaattaattcctttcactttttaaatatattctttatttgggtaaaataattccttcttgttatgtgtgagtttgaaattcttttaatttaatatatttgtaaataaattattttgacctaatatattgtaaatcaatccaaaaatagaatttactgtctaaagactcattattcaaccaaacaagagagttgtgttattctatattgacggagcaacagaaaggttaagaatgtagcataaccaaaacaatgaaacaggtgatgtagaagatcatgctgtgaacggaggtagcaatggcgatgatgctttgactataaataagatgctatccgatctagcaaggcaagaagactactttgatttaagcttacactggcgggagttgcattgcaagaagcgcaagagacaagatgacaattggt

SEQ ID NO: 21602 - DNA, 502 bp, Glycine max
agcattttcatttccttcccaaattctcccgctcgtgaatgagagtttcggctcagagattgatttttgagctcacgatttcacacccgcatgggccaaacatgcggtgctttcagagggctagctctctcaagcgggaaaggaccgcctgatgacacaaatctctcaccatataccgagccggtcggaagccctctgaccctatccttgggagcgccttataatatctcaaaattacacccgcccatattgagcctcacccccaacagaggggactttaactgatattttagtgaggaagccttcgtcgtcctcagtttcagctacagtcaatccgaaggttatactggagctcttctcaatataccatgattggcaggagaaaaaggcccaagagataagcataagacaggaggaaatagaaaacaaaatagaagttgcagatgctctagcgatcaaacttcttcagcgatataatcattcaacttctacaatgaagact

SEQ ID NO: 21603 - DNA, 322 bp, Glycine max
gataattcccccctattttcatatcaggttgggaattcgcattgggtaaatgatataggcgaagctgatttacacttaccacttgctatttgctaagtacatattttctttgcttgtttaagtttttggtctagcaggaaatacagctgacatggggatagaacaagtgcatttaatgtcgtctttgaaaaattagtcgtggttttcccttagggattagcagttcattcatagattctgtaaaatttggggatgtttcttaaactctagcttcttaatgtgttttttaatcattgggctaccccatttatacaggtattgc

SEQ ID NO: 21604 - DNA, 728 bp, Glycine max
gaagaagcgccccgggtagatcttcactgcgatgtcgttctctgaggctgaagaagaagacgccagcaatcgcagcagttccgtcaaatgggggcgggaattgttgatgcagagatcacaagttacttcaatgtttggggctggggatctttgggcaaaagggtacactggtgccaaggtcaaaatggccatatttcacacaggaattcgagctgatcaccctcattttcgtaacatcaaggagcgcacaaattggacaaatgaagatacgttgaatgataatcttggacatgggacttttgttgcgggagttattgctggtgtagatgctgaatgccttggttttgcaccagatacagagatatatgcatttcgtgtgttcactgatgcacagcctattgcaggtgtcatatacatcatggttccttgatgccttcaactatgcaattgcaaccaatatggatgtgctaaatttgagcataggaggacctgactacttggatctcccatttgttgaaaagatatgggagataacagcaaataacataatcatggtttctgcaattggaaatgatgggccactttatggaactttgaacaatccagcagatcaaagtgatgtcatcggtgttggtggtattgactatagtgaccatatagcctccttttcctcacgtggcatgagtacctgggaacttcctcatggttatggccgcgtgaagcctgac

SEQ ID NO: 21605 - DNA, 499 bp, Glycine max
gctggaagtagcaagcaagttagtgcgcgcgcttgctagttaaaggtttagggtgttgggagagagagagagagtcgaatctgaattgagctgagcagatatggtgagaaaacatggctggcaattacctgctcacacttttcaggttgttgcgatcactgtattctgcttattggtgattgctttctatgctttccttgctcccttcatcggaggaggtcatatatgggaatacaccttcattgctgtttactctcctgtggctctcattgtgttcattctttacgtcagatgcactgcaattaaccctgcagatccgggcattatgtctaaatttgaccctagagtgggaaataagttcagttctgctcacaatttatcagggaagcatcttggttctgaacatgaacgcgttgctgctagagagcaatattctccgtcatctgctgcttccaaaaggtctatgacaaatatcagcaagaagagctcagtggaagat

SEQ ID NO: 21606 - DNA, 457 bp, Glycine max
caccaagaccccattatttaataacagttgaaaccaatatattggactcggaaacgatgaagtgagcaacacaacacaaccagacccatcgttatcttatctccttctccatggcttccttacccagttttactccttttgtatttctattgcttgtcattggatgcaatgcaaggcctttgtatccacttcccagcaaaggtgatgatggaaataggaagcccctacaaacttttcgcccttataacattgctcatcgcggttcaaacggagagcttcctgaggaaactcatcctgcatacttgagagctattgaggagggtgcagacttcattgaaactgatatcttatcatccaaagatggtgttcttgtatgtttccatgatgttacccttgataatactactgacattgcaaatcgcacagagtttgctaatcgtaaaagaacatatgaagt

SEQ ID NO: 21607 - DNA, 946 bp, Glycine max
cttatttcttaatcattcatccaaccaaacttatatctcttctgttctgcagattgtccctcaacaatctctttccgagattacaataaccttcgacgtgctccaaagcctccaccgccccgccaacttcctcgtgtttgggctgggccgcgattctctcatgtgggccagcctcaacccccacggcaccacgctgttcctcgaggaggaccctaaatggttcgggatcgtcaccaaggaggcgccctacctccgggcccacacggtccgttaccggacacagctccgagaagccgacagcctcatgtcctcgtaccgatccgaacccgcgtgttttccggccaccgccacgctccgcggcaacgagcggtgcaaacttgccctacataacctccctgacgaggtttatgagaaggagtgggatttgatcatgatcgacgcgccgaaggggtactttgcggaggcgccggggcgcatggcggcgatattctcggcggcggtgatggcgagggacaggaagggatccggtgtgacgcacgtgttcttgcacgatgtggatcggaaggtggagaaggtttacgcggaggagtttctgtgtaggaagcacttggtcaaaggtgttgggaggctctggcatttcgagattcctccaatgggtaataacactcgtgactacgcacgtttctgttagggttcaggattattacagtattagtattcttttttttaccggtgtagtgaaatacattactggagaagaatagtgagaggagcatatatatctatatgttactacagctttattaaaagaaaaactctagattgcttttgcttttccaatttatgttgtcggttatggatacaaaaaaaaaaccaggaatgggattgtttgtggttgtgggttgcgagattacatgtgatgattccgctgcaataaaccgacact

SEQ ID NO: 21608 - DNA, 594 bp, Glycine max
tgcaccgtcttaccctcacatctatctatcttaaaaacactttaaaaatccctcacctatccccacttccataaccattttcttttccaaacccctcaaactaactatatctatccattaagggatattcaatgcaattagcgaatgagagaatgaagagccggtggttcgtgtggcttttggcggtactaggcatcatcggagccacactcttcatagtgagcttgatccaaacctcggagaacaacttcctatgttccataacaagaacgatgcagcagcagcagcagcagttcaccgatggccccacatcgatgcaactcaaagccatcctccactacgcgacctctcagattgtccctcaacaatctctttccgagattacaataaccttcgacgtgctccaaagcctccaccgccccgccaacttcctcgtgtttgggctgggccgcgattctctcatgtgggccagcctcaacccccacggcaccacgctgttcctcgaggaggaccctaaatggttcgggatcgtcaccaaggaggcgccctacctccgggcccacacggtccgttaccggacacagctccgagaag

SEQ ID NO: 21609 - DNA, 473 bp, Glycine max
accaggagaggttgggtttggtgaaccatgtcattgaagaggctgaattgttgaagaaaagcagggaaattgcggatgccattgtgaaaaataaccaagacttggttttgaggtacaaggcggtcatcaatgatggcctcaagctggatcttggccatgcactttcccttgaaaaggagagggctcataattattataatggaatgacgaaggagcaattcaagaagatgcaggaattcatagctggtcgaagttccaagaaacagtccaaattgtaggttctttattttcgccgatctctcgtgctgtaaatgtgtatatgtttgcttcccaaatttgaggttttacgaacactattccatacaaaatctgacaaccttggcttttaatagtgaattatataaatgatagcggggcaaaaaaacttgacctatttcacaaccttaaaaaaaaaaaaataaaaaatagaaaaa

SEQ ID NO: 21610 - DNA, 497 bp, Glycine max
cgacatgtttaaaaaaaacctattttcgttgcggtcttttccctcctctttcataggggcctttaacttttcctgtatcaacttctccattcatctattcaaaatggttgcccttactccagcccttctcaccagcctgtccatcctggggatggttcagagtgccatcgccaactccgccacggaggccgattccttggccgttgtgcgaggcatctcggacaacggtgtccgacgaggtttaccacgacaagcgcgccacgggtaagcttcctaagcctatccgcatggctggacaagccgtcatcaaggtcggccaaaagcttccaagtcccgtcaagaagcaaatcaaggctgccgctggcggtgccgagaagaggtcgtcaaggcagcaatctctgcctcaagtgcaaagaacaagatcaagaagaagcttggaaagcgtgacctcgtagatctgggggtctccttcaacacgcgtgccaccggcaagcttt

SEQ ID NO: 21611 - DNA, 517 bp, Glycine max
  unsure (1)..(517): unsure at all n locations
aacttgagtgggagtattagtccatcactcactctttccaatagtcttgagaggctgaaccttagccacaatgttctttctggttccattcccacttcttttgtgaatatgaattcaataaaatttcttgatctttctgagaactcattctcaggaccaatgcctgagagtttttttgagagctgctcttcccttcatcacatttctctagctaggaacatgtttgatggtccagttcctggctcactgtctagatgttcctcattgaagagcattaatctttccaataatcatttctccggtaatgtggactttagtgggatttggtcattgaacaggcttacgactttggatctatctaacaatgccttatcagggtctttacctaatggaatttcatccgtacataactttaaagagatcttattacaaggtaaccagttttcaggtccattatccactgatantggattctgcctgcatctgaataggttcgatttcagtgataatcagttca

SEQ ID NO: 21612 - DNA, 1553 bp, Glycine max
gtcaagtcaatgtttagaagacgaagacgagacagtagctgaattgcacacacgagacaatacaaaatgctagtttgtcattctcatgctctccgcattcgtcagtttcttcactcttcagcaagatggcggtatttcgttcaaagacgcatggatgcacctaactgatgaatatccaatcaaatatgaagccgaacgccttccgccgccgctcgtcgctgatctcaacggagacggcaaaaaggaagtacttgtggctacacacgacgctaaaattcaggttttggagccccatagtagacgtgtcgatgaaggattcagtgaggcgcgtgtgttggctgaggtgtctttgttgcctgacaaagtacgtgtgatgactgggagacgccctgttgccatggccaccggctatattgaccggtataaaattgggcagccacagaaacaggttttggttgtggtaacatcgggttggtctgtgatgtgttttgattccaaccttcaaaagttgtgggaaaataatttacaggaggattttccacataatgctcaccatagggaagttgcaatctctataagcaattatactctaaagcatggagatacaggattgataattgtcggtggcaggatggaaatgcagccacatatttttatggacccttttgaagaaatgggtatgggtgcaaggtttgccgagcaacatcgaagaagtgctgctgaaaaggaggcttctgaaaactccggaactgtggatttacgacattttgcattttatgcatttgctggtcgatctggtgttgaacgatggagcagaaaaaatgagaacattgaagcacattcttcagatgcatcacagttacttccacagcataactacatccttgcatgttcatgctctgaatacccgccaacctggagagtatgaatgcagggaattcagagaatcgatcctgggagttatgcctcatcaatgggctaggagagaagatactttatttaagcttgcccacttcaggcggcacaagagaaaagcattgaagaaaacacctggaaaggctataagttacccttttcacaagcccgaggaaaaccatcctccagggaaggactcaaccaaaaaaatttcaaacataattgggaaagcagcaagctatgctggttcagcaaaatctaagaagcaccttccttatgttcccaccataaccaactacactcaagtttggtgggttcccaatgttgttgtgtctcatcagaaggagggcatagaagctcttcatctagcaactggtcgaacaatatgcaagtttcatctccaggaaggtggtctacatgctgatattaatggtgatggagttctagatcatgtgcaggctgttggaggaaatggtgctgagcagactgtagttagtgggtccatggaagtgctacgtccttgttgggctattgcaacgtctggtgtaccaatacgtgaacaactcttcaatgtatctatttgtcattatacccattttaacttattccagcatggagaactatatagaagctacagt

SEQ ID NO: 21613 - DNA, 452 bp, Glycine max
agaaatctgaaaccctcagagagaaagagaagtaagaaacattctgaacaacaccaccccatccacgatcttctcatccttaaactgtgttgtgcggatctcagatgatgatgtcttccgggacatcctcgtactggtgctaccgctgcagccgcttcgtccgtgtctggccccaccacaccgtcgtctgtcccgactgcgacggcggcttcatcgaagaaatcgaacacccgccccgctccgtccacctcgacccccgacgccaccgccatcgcttccccgctgccgccatgtacatgatcggacaacgaccctcctccgacccccgccccgcctcatccctccgccgcacccgccgcaacggcggcgaccgctcccccttcaaccccgtcatcgtcctccgcggcggcgcggaggacgaaagtcgcggctttgaactcttctacgacgac

SEQ ID NO: 21614 - DNA, 643 bp, Glycine max
gcagattgcttctctttaggcaaacttgaagttgtctcattctttcttctcttctttggctccgaatcattattagctgattttttatcagattgtatttgatctttcctcaaaatccccagatcagattctggcttctttcccttcttgctaggtttatgcttcttgtatattttgtagtaggatccttggcgatataacgagcttctgtagataaaaataaagtccacaattctttcaagagaattgatattcattggagtttgtggatataatagctgcataacagacttcagacagaacttcccctgatggaacctggatttttgttgtatcaataggcttgttctcatcatattctggtgttcggtaatttgagctatcaggaaggtcctggtctatgacaagttccttcgaaacattctcctgtaatgcctcatcattcaacttcaaaggtacaggggacttcagaagttgatcagaagctctggtcagtggctctgattcctgatctttgccagaaactttaggggattctgtttctatctctcctttcctctgctctctggctggaatagtaaaaggaggggacaagtacttgcttttcttcttttctcttgacaaagaacccttctcatttttt

SEQ ID NO: 21615 - DNA, 519 bp, Glycine max
cgccacaagaagcgtagcactcgctttcccctgccatcaaagatagtaacaatagttactcactcactacacaccagaggcagagagacctctcgctcactctcaaaatcacttccaccactccgaacaaaaccactgttcctaaaattaaaaaccctaacctctctcaaaattttccattttcggagtttcttcttcagaaccgctttcatgcattttcgccaaactccttctcacaagatcgagctttggacacttgaagcatttcactaatatctgttacagattactgagattgttttgtttttcatttttggttgttttttttggcggaaataactcgtaataagcatgacaagcaccatgcaactaactatggtcaagggcacgatccctgtggctttgagtagaagagtgtgttggcagggtcaagcatccccgtggccgccatggcgaattgggtttgttgctcccgttccccttgtgaggagagtttcgagtgagagggtggcgacactc

SEQ ID NO: 21616 - DNA, 548 bp, Glycine max
  unsure (1)..(548): unsure at all n locations
gaaagttttccggtttgctcgtgaaaaaaacattcctatcgttatgctcacttcaggtggttacatgaagtccagtgctggagtcgctgcagattcaatagtcaatctttcgaagaaatgcttgatagaaacgagtggagctccaaagtctacgtaaagtgctcctgtgttttactgatcatgaatggtcccttgtaagagttttccagatcctttgtgtatttgggtatagaatgtttccattttagtggaaactttgatgtacagtattttaatataaaaaagaacttagtgtagatgtaattgtgttttacttactttcttttttttattctatttttatttatttataaaacaaaatatttttttttttcacaacttattatttcttcacatttaaataataattattcgttattattctcttatatattaatttttctaccaaaaanaacttttcttttttgtgtattataattttatttttttttaaataatatttcatttttttttcgccaataatttataattttatttttatttttcca

SEQ ID NO: 21617 - DNA, 571 bp, Glycine max
acgccatgcacgcgtacgtagctcgaattcgctcgagcttacatatgccaaagaatgttcagtggctttgacttgaaaacttctctgtcaaatcagacaatattactgtaactaaagagagcttctttcaccagtttctcgcattaagagagatggatcccttggacatgctggggcaaaatccagattccatttttgggaaattttgcaggagcaaatacttggtggtagttcatccaaagatggaggcatcattcttcggaaatttagaccagcgaaattatgtgatgggtggagggcatccaaggacccctttttaccaggcttttcttaaactgaccaagtcaatttggcttttacacaggttggcttattctttcgagccgaatgttaagtgtatttcaggttaaaggagggagtgagttctctgatgtttatatggaatgtgtggtctagaatctgattatggatgacattgatgataaacccaaagtcggtttgatggttatgcctggattctggattggttgaagtgtgattcaaagtaaattttttttttttttttaaggtg

SEQ ID NO: 21618 - DNA, 512 bp, Glycine max
cagaagcgtgcttgcttcgttgcttggttggttcaattgtatcagtatatactcagaagccatgatattagttgatggcattccattttctacccattcatctcaccctcagggaaaggatattctacttgatttgttggaaaatcccattctggtatcagcctcaaactctttgaaggctaactcagagaggaagttctcagtatctgatgagtctagtccagagagatcaaaatgggtttatatattccagagagaatatgctaccgttgaccccgcccttgttgattttgttggcaccgatgaagcaacaacgtgtgttggccttgttattcggaaccaaaagaatggaatgacgtcagttgcccatatggattcaccaaaaattgtagaaatgggcctctcccaaatgttatcatcactcgtcgacaacagtttggagactgagtttgatgtgcatcttatttggggggttgagatgtctcacttgaacatgcaaatggtagcacagt

SEQ ID NO: 21619 - DNA, 476 bp, Glycine max
ataagattgtagggaggaacattagccaacgccacccagctggcatgcattcccacacttcaagacaatcttcaacaatggacgaacaatcagtaaataggaaatactttccttttaagcaaggttacccatttgtggcaactcttagagtgggatctgaaggaatccagatgacagttgatgggaagcacataacctcgtttgctttccgtgaaactttggagccatggctagtcagtgaaataaaaatctcaggggacctcaaattaatatctattcttgccagtggtttgcccacatcagaggattcagagcatattattgacctagaatcattgaaatcaagtcctatatctgcacagaccccattggatctcttcattggtgttttctctactgctaacaattttaagcgtcggatggctgttagaagaacctggatgcagtacgattcagttcgatcaaatacaacagct

SEQ ID NO: 21620 - DNA, 421 bp, Glycine max
ttttcatttgccttttctgtcgttgcaagaatcctccaacctccctgcaaaataatcttctcacgcaattttttgagcaaaggttgaggcttgtgcttccccacgttattgttcttgtgatggggttgtcaaattggtgcgttgaagggtgattctgggatctgtcagaggaagaagcgtgtggatctcttcaacttctttggtttttttttcctctgggtgtagttttttgctatggggtggagatacaaggcagggttgttcctcatacttactgtggttgtcatatgggtcacctctgctgaagtcacccaggatatttttatagattacaagcagccattggcagtgacgtatcttggagcttctcttatggtagtttacctcccagtagcattcattaaagactggttgtataagt

SEQ ID NO: 21621 - DNA, 923 bp, Glycine max
cttcaattcttacagtggagcagctttcatcgcccatcactggaattgatagcttgattgcaagtaactggcctatcggataccaagtaggatcatttgcttacaactatctgacagataatctttatgtatcaaaatcaagacttattcccctaggctcccccgaggaatatgctacagcacttcagaaggggccatctggtggaggggtggcagctatcattgatgagcttccatatgttgagttatttctgtcaaatgaaactgattttggtattattggacagccattcgccagaagcagttggggatttgcttttcagagagagtctcctcttgcctatgacatgtctacagcaattttgaaactctctgagaatggagatctccgtaagatacatgagaagtggttctgtaaaatgggttgtgctgaagataggacaagcaactccaagcctgaccagcttcacttgattagcttttggggtctgtatctctcatgcggtattgtcttgcttgttgcacttgcactgtttctgctgctaatgattcgccaatatgcccgcttcaaacaaagacaaaaagatgttgcttcttcatccacagaaccatcgggcattcattgttcccaggttgttgttaacttctttaacttcattgatgagaaggaagaggccatcaagaaaatgttcactcaatgtgacaatcatcacaaccccaactgagataattattatggttgtgttgcaagagggctcaaagtggtagatttcagtaaactgctgtcatttgggcagtttgcttaagatgtttatatgatacctgatagcaatatatctttgtagagtgacaataatgatagtcttgtacattatttgtagtactagtttttttcttctatcataagtctttattttatagtc

SEQ ID NO: 21622 - DNA, 624 bp, Glycine max
tcccacgcgtccgctttctttctatcaacgaaaaacaacaatggaatatttgcaggacgctgggatccgcgtttctcgatcacacagaacaattcaattcatcagcgtgtctccacattttcgcgcgtgaaacctcatcgccattttccctcttcttcttcttcttcttcactgattggattaattgcacgtaaaggaggtttaaagcttcgcagcacgtgttgttgttgttgttcgtataattgttgttgttgtggcggcagtggtagtatttggaaattgaggattgagtggggtgtgtgaaaaatggctgccaggagtgatcaccaaacggttcctctttcggtgctcctgaggcgtgaattggcgaacgagaaaattgagaaacctgagattgctcatggtcaagcatgccagagcaagaaaggggaggatttaacactgctcaagacggaatgccagagggtcgtgggtgatggggtctctacatattcagtttttgggctatttgatggacacaatggatctgctgctgctatttatgctaaggagaatcttctaaataatgttttaagtgtgattcctcccgatcttaacagggatgagtggatagcagcatttcct

SEQ ID NO: 21623 - DNA, 662 bp, Glycine max
gaaaaagggtactcaacaaatattggagaatctggcaagagcaaagagagatggtcaataagcaaaaagagagagcctctcttccaattctccaaagttctaacaactctacacaagaagcttgttttccacaaccaaagttgtattttaattagggactccgacattatagacgaacatgttaatgttaatgttaacgtcagtgtccctcgtgaagttgagagcactgatcaaacaattgaggacacagatcggttttcattctcaacagctaccaactcaaccgtgtacctctcgtgctcagacattgatgaagatggaacctcgttgtccccacataaagacaaagctttgttttctccaaacacttgccaagcttccaatataggagcactgcagagccagcaggctaccgacaatgaagagcaccaccagagatgcttagaaggtagccctgttccaaactctcgaaacatttctgtgacgcacgcgacaatgaatcaggatgtttcgggaatggaagagagaatgagcagttgctgtgtctttgtaccgaagaaaatcacggaggattcgctgctatcggtggctctgtggagttcgcttattcaatcagccaagagagaaaagtgtagcaaggagttgcgagagttccttggggc

SEQ ID NO: 21624 - DNA, 389 bp, Glycine max
atcacacacatgcaacagcacaaaggtaacaaggagctttaaaaaacaaatgatgaagaaccgttatccgttgccggagagacggtggttcgtggctatggccgtcgtgggcttgatcgccacggcgatgttcctcaccaacgcgatccgaacctcggaaacctcgtacttgtgcccgggcgcgctcgggatccgaagcaaaacccgaaccgaattcagctacgacgcgtcaccgatccagctccgcgcgattctccactacgcgacctcgcgcgtggttccgcaacaatcggtgtcggagatcaagatcagtttggacgtgattaaatcactgggccggcccattaacttcctcgtcttcgggctgggccacgactcccttatgtggg

SEQ ID NO: 21625 - DNA, 433 bp, Glycine max
gaggattccttcgtctctgtctctggctttcttactctctctctctctcccctttctctctcttcactttttctatcctcgaagcaagaaatggactctaacagcgtcgtttcttggccgaggatgccagaaaacatcaacggtttcggcctcaaacagaaccaatccgaagaggttcatgttttagccgttgatgacagcaccgttgatcgcaaagtcatcgaacacttgctcaaagtcttagcctgtaaagttactgctgtggatagtgggctgagagcactgcaattgcttggactattggacgagcagaaaatcccctctgaaactaatggttttgtgggtctgaaggtagatctaatcatcacagactatttgctgcccggaatgaccggttatgaattactcaagagaatcaaggaatcatctactt

SEQ ID NO: 21626 - DNA, 477 bp, Glycine max
ctgggatccaaaactaccacgggtttggcttgatttttccaaattgaacaaaactattttccaaggttctggagttattgatggctcaagaagcaaatggtgggcggcatcttgcaaaaagaacaagtccaatccttgcaaaggtgctcccacagcatttacaattgatacaagttcatccataagggtgaaaggactaacaatccagaatagccaacagatgcattttactatatcacgatgtgattctgttagaattactggcgtgaaagtgtcagctcctggagacagcccaaacactgatggaattcatattagtgaatcaacaaatgtcataatccaagacagcaaaattggaacaggggatgattgcatatcaattgtcaatgctagctctaatatcaaaatgaagagaatttattggggacccagacatggaatcaaccttggaaggcttagggaaaacaacttaacaag

SEQ ID NO: 21627 - DNA, 522 bp, Glycine max
aaaagaagaaccaaaaagctgctatgcttgaagatgacgtggctatagatacaaatggtgatgctgtggaggatcataaatcagagaggaagaagaaaaagaaagaaaagaggaaattggaacaggagatggaggttgacgatcaggctgaagatgatggtgccaatggagtcacaagtgagcaagaaggaacagctaaaaagaagaataaaaaggatagtaatggagaagcattcgaggctggtgaagtgtctaagaagaagaaaaagaaatcaaaaaagaaggacatcgagtaaactatgatgtattgcagctttaactgccgaaatcgattttttcatcttatagttgtggacaatgttaaatttttatttgctttgaactttacctgttgctgcacttgtctagactttatgttgacttgtcatttggcatacaaattttgtcctagcaattttccgcataatttcagcattggaaaagtctattgcataatgtttttaatatactttctattttctt

SEQ ID NO: 21628 - DNA, 424 bp, Glycine max
  unsure (1)..(424): unsure at all n locations
gtgatnncancacatactctgctctagcagtactcaactatggaatccattgctttacaggtaacagtaagactcagcacgcaacagttaaatctaatccagggagagcgaatcacaaaccctcgttccatttccccttctcgaaggtttgtgactttcttcaagcaaagatcgcaattgcatttgtgggaatcggcgagaaaaatgcagggttggttctcggggcagagcagcgaggaggaggcgaacccgccgtcgtcgttgctcgccgattggaactcctacgcatccgcccaatcctctgaggactcctccgctttccccttcgatatcgaatccgccgttaggtctgccaacgacaccgtttccggcactttcagcgtggtttctaaaggtgtgagagatctacctggcaatttccagt

SEQ ID NO: 21629 - DNA, 348 bp, Glycine max
ccaatccattgcttaacaggtaacagtaacactcagaacgcaacacagagagagtgagagagaatcacaaaccctcattccatttcctcccttttctctcttgcagtcacgcaagcagcaaggatcgcaattgcattttgtgggaatcggcggcgagaaaatgcagggttggttctcggggcagagtagcgaggaggaggcgaaccgccgtcgtcgttgctcgccgattggaactcctacgcatccgcccaaacctctgaagattcatccactttccccttcgatatcgaatccgccgttaggtctgccaacgacaccgtttccggcactttcagcgtggtttctaaa

SEQ ID NO: 21630 - DNA, 614 bp, Glycine max
gagcaattttgtcaccgcagaatatgatatacccattccctgctttggtgtgtaccaactcaacttcttccgcttagtatggaggaccatttttgtgctgttgacgaccctcatagccatgctcatgccttttttcaacgatgtggttggaatactttgccgcttttgggttctggcccttgacagtttatttccctattgacatgtatatttcgcaaaagaagattggacgatggaccagtcgctggcttggacttcagttacttagtgccagttgcctcatcatttcattgttagctgcagttggttccatggcaggggtggttttggacctcaagacttacaagccatttaaaactagttattaaatcaaggccgtaagaaatagctagaagtgtttgaacatatgatatttttatacaaaactaatgataagttagtttgtgaaattaaagtatatacgttccatgcctgctgctgttagagcaacttgatctgaggaaaaaagtgacaattggacataatatacctcagatttggacgtatacagtctgtgatatgtgtgttattttacaaggaataaaagtctttgaacgtgttatttctttagtcat

SEQ ID NO: 21631 - DNA, 874 bp, Glycine max
  unsure (1)..(874): unsure at all n locations
agacaaggngaagacgggcaaggttggttcttttccttaacaccacaccataccatgtttagttttccaaccaaaaacgttgcctttgatttcttttctctttagctgcttcttttgtctctccaaactaacatccagattgctctgttactatcaaaaggccttctttcctcatttcggacgcacgctccccatccatgtctacttgtgtaaaatcccgagatgtttgtattgttggtgttgcacggacgccaataggtggtttacttggcaccctatcatctctttctgccacagagttaggctcaattgctattaagactgctctcaagagagcaaatgttgatccatcactcgtgcaagaggtgttttttgggaatgttcttagtgccaatttagggcaggctcctgccagacaggctgcattaggtgcaggaattcctacatctgtaatctgcactactattaacaaggtctgtgcatcagggatgaaagctaccatgcttgcagcactcaccatacaattcggtctcaatgatgttgttgtggctggtggtatggaaagcatgtcaaatgcacctaagtacattgcggaggccaggaaagggtctcggtatggacatgataccatcattgatggtatggtcaaagatggcctttgggatgtctataataacttcggcatgggagtatgtgccgaactatgtgcagatcagcatgtcataacaagagatgagcaggactcttatgccattcgaagctttgagagaggaatatctgcccaaaatgctggtcattttgcttgggagatagttccggttgaagtttcctctggaagagggagggcttccaaaattgttgataaagatgaagg

SEQ ID NO: 21632 - DNA, 397 bp, Glycine max
gaattattcctccttctcaaacatttttttgggcaacacggtggacccaagcccaatgaatgttttctttttgactccttttaaacattagttgaatctaggattcataattttgttctgctctgcaatgtatgtcgtttttcaggattcttatgccattcgaagctttgagagaggaatatctgctcaaaatgctggtcattttgcttgggagatagttccggttgaagcttccactggaagagggcgggcttccacaattgttgataaagatgaaggcctggggaagtttgatgctgcaaagttaaggaagcttagaccaagctttaaagaggtcgggggttctgtgactgctggcaatgcttctagcataagtgatggtgctgctgcattagtg

SEQ ID NO: 21633 - DNA, 373 bp, Glycine max
caaaaggccttctttcctcatttcggacgcacgctccccatccatgtctacttgtgtaaaatcccgaggtgtgaaaataatggaccacctttggtgaagtggacacatatataattgataagaatacttaatctctctctctttgtgcttcttgggtgcagatgtttgtattgttggtgttgcgcggacgccaataggtggtttacttggcaccctatcatctctttctgccacagagttaggctcaattgctattaagagtgctctcgagagagcaaatgttgatccatcgcttgtgcaagaggtgttttttgggaatgttcttagtgccaatttagggcaggctcctgccagacaggctgcattaggtgca

SEQ ID NO: 21634 - DNA, 423 bp, Glycine max
  unsure (1)..(423): unsure at all n locations
agctcggaanncggcncgagcccaacacaacctttattcttttttttccggccnncaaaaccaagcaangcattccttttaataatggctcaaaccctcggctccgatgagccaccccaaaccaccgattcccacaccccctccctcctccacctctccttcaaccaggactccggttgcttcgccgccgccaccgaccgcggcttccgcatctataactgcgaccccttccgcgagatcttccgccacgacttcggctccggcggcggtggcgtcgccctcgtccacatgcttcttccgctgcaacatccttgccttcgttggcgccttcttctgctccttcttctgcgaaccccgctatccttccaacaaggtcatgatctgggacgaccaccagtcccgctgcatcggcgagctctcctt

SEQ ID NO: 21635 - DNA, 591 bp, Glycine max
ggaaccgctagcccgagctctccggctccatcccgcgcgtcaccgtcattacctccggaaagggcggcgtgggcaagaccaccaccaccgccaacatcggcctctccctcgcccgcctgggcttctccgtggtcgccatcgacgccgacgtcggcctccgcaacctcgacctcctcctcggcctcgagaaccgcgtcaactacaccgtcatcgaggtcctcaacggcgactgccgcctcgaccaagccctcgtccgcgacaagcgctggtccaacttcgaactcctctgcatctccaaaccccgctccaagctccccctcggcttctgcggtaaagccctcacctggctcgtggacgcgctgaaagcgcgtccacagggctcccctgacttcatcctcatcgattgccccgccggcatcgacgccggctccatcaccgccatcactcccgccaacgaggccgtcctcatcaccacccccgacatcaccagcctccgcgacgccgaccgcgtcaccggcctcctcgaatgcgacggaatccgggacatcaagatgatcgtcaaccgggttcgaaccgatatgataaaaggag

SEQ ID NO: 21636 - DNA, 354 bp, Glycine max
  unsure (1)..(354): unsure at all n locations
ggaaaagnagcagttggatatatttactagaccagcagcactccttgtgatattcatttggagaatgtcctatgcccttaaacatccaaacgaaccgcaagacgatgatgaggcacacacgccagggcctaagacgctcccaattattgcactcctgcacatgctgggaagactcacacattagcaccttcaagccctatgcctaatgatatggacccatgatgcccatcaagttcggtcaagtcccaaccattgttgtcccctcacctgaaactgctgagctattcctgaagacccacgacactgtctgtgctagcaggccataaactcaagcatcggaatacaatgcttatg

SEQ ID NO: 21637 - DNA, 1350 bp, Glycine max
cttgatgatctgtttccagctgagagttcttctcctagatatgctgatccagcattggcttcagctgtattttctccaactcacaaatcagctgtcttcaatcaatttcagcaccagcaaagcatgttggcacccctgaatactaattttgcctctaaaaattttgagcatcctttattgcaggcctcgttgggaatgtctccgcgaaatgtggaacctatttctccaatgggttctaggatttctatgctagctcagcgcgagaagcaacaatttcgcagcttaagcttccgagaactcggctccaactctgctgctgcctctgccgattcttggtcaaaatggggatcacctaatgttaaattggattggccagttggtgctggtgaagttggtaagctaagaaggtcatcatcatttgagcttgggaacaatggtgaggagcctgatttatcttgggtgcagtcacttgttaaggaatcaccagctgaagttaaagataaattggcaaccactgtctcatatgttgcagcagcagctgctggatcctccagtgagggatcaaacattagcacgcaaatggagtctgttgttgatcatgctgtactgggagcatggcttgaacagatgcagcttgatcatcttgtggctcagcaaaactgaaatgagtttctgctgaccctgaggtagttaacaacagaaatgtttcagtaaataataatcatatatattcgtttatgaattttgttgatggaagaaggttacagtaactaagaaaggaagcagtactaagaaaaagaaccacatcactgagcaaaattcattttgaggtttagtgttgcaaaagtaacttagaagggtcaggaaaccactgggtggcgttcacagaattaatgccagtgaagggttttttggctgcctatctcttcaaattttaggtccacattcctgtcaatttttccttccttgaggagcaaatgttgtatcacaatgaagtcctattcctaagtttgatctatcttttgattttgtttctttatattttggggtagaaaccaaagttacagaagggtcattggagtaattccttgtgtctctattttgttccaattttggggatgaaaacacaggttgctggatagtatatggtatttcttttgtaatctggaatcaataattgtcgatgccagggagtgggtaaattaggaatatttgaacattgatcctttgggcatgtaacattcaattgaagtttattgctatattgtttctaatacctttgtctctattctaaatatcgcagcgttagtagtttctatttgcattgataaataactaaattgtatcatc

SEQ ID NO: 21638 - DNA, 651 bp, Glycine max
cttgtttttcaaccagcagaagaaggaggtggaggggctaagaaaattttagatgctggagtcttggaaaacatctctgccatattcggattgcatattgcacctacctatcctattggtgaagtggcctctaggtcgggtcccatatttgctggaagcggcttctttgaagcaacaataaatggcaggggaggccatgctgctatccctcagcactctatagacccaatattggcagcttccaatgtgattgtttgtttacagcatattgtttctcgcgaggccgatcctctggactcccaggtcgtcactgtaggaaaatttcagggaggtggtgctttcaatgttattccagactctgttgcaattggtggcaccttccgagctttttcaaaagaaagcttcatgcaactgagacagaggattgaacaggttatcactgggcaagctgcagtgcagagatgcaatgcaacggtcaactttcttgacgacgagaaacctttcttccctcctacagtaaacaatggtgacttgcatgagtactttaaaagtgttgctgggagtttgcttggcgtcaataatgttaaggacatgcaaccattgatgggatctgaggactttgcattctatcaagaggtttttccgggatac

SEQ ID NO: 21639 - DNA, 1450 bp, Glycine max
ccattttgcaaaaagttttcaattgaaccacgcgcacctgagttctacttctctcagaagattgactacctgaaggacaaagtacaaccttcttttgtgaaggaacgtagagcaatgaagagggagtatgaagagtttaaagtgcgagttaatgctttggtagcaaaggctcagaaaacaccagatgaaggatggactatgcaagatggaacttcatggccaggaaacaactcacgtgatcaccctggcatgattcaggttttccttggacacagtggtgcccatgacatagagggaaatgaacttcccaggttggtgtatgtttctagagagaaaaggccaggctaccaacaccacaaaaaggctggtgctgaaaatgcactggtgagggtgtctgcagttctcacaaatgctcccttcattctcaatcttgactgtgatcattatgtgaacaatagcaaggctgtacgggaagcaatgtgttttctgatggatccagtagttggcagagatttgtgttatgtgcagtttccccagagatttgatggtatagatcgtagtgatcgatatgccaatcgaaacacagttttctttgatgttaacatgaaaggacttgatggcattcaaggacctatgtatgtgggaactggatgtgttttcaatagacaagcactttatggctacagtccaccttctatgcccaaattaccaaaatcatcatcctgctgttgctgcccctcaaagaagcaaaccaaagatgtctccgagctttatagagatgcaaagagggaagaacttgatgccgccatttttaatctcagggagattgacaactatgatgaatatgagaggtcaatgctgatttcacaaatgagctttgagaaaacatttggtttgtccactgttttcattgaatctacactaatggagaatggagggcttcctgaatctgctgatccctcaatgctgatcaaagaggccattcatgttattagctgtggatatgaagagaagactgcatggggaaaagagattggttggatctatggttcagttactgaggatatcttaacggggttcaagatgcaatgccggggatggaggtcagtttactgcatgcccctaaggcctgcattcaaaggatcagcaccaatcaatctttctgatcgattgcaccaagttcttcgttgggcccttggatcagttgaaattttctttagcagacattgccccctctggtatggttttgcagggggtcgcctcaaatggctgcagagactggcttacataaacaccattgtctacccctttacatcccttcctctcgttgcttattgtactttgcctgcaatttgccttctcacaggaaaattcatcataccaacgctaatttcctcagctgtattttcatataacaaagatattcgttattaattcaagagtttaattt

SEQ ID NO: 21640 - DNA, 410 bp, Glycine max
cagagacttgcttacataaacaccattgtctacccctttacatcccttcctctggttgcatattgttctttgcctgcaatttgccttctcacaggaaaattcatcataccaacgctttcaaaccttgcaagtgccctctttcttggacttttcctgtccattatagtcactagtgtgctcgagctgcggtggagtggtgtgaccattgaagctttgtggcgtaatgaacaattctgggttattggaggagtgtcagcgcatctatctgccgtgcatccaaggattcctgacgatgtgggcaggtgttgacaccaacttcactgtcactgccaaagctgctgatgacaccgagttcggtgatctatacataatcaagtggaccacactcttaattcctccaacaaccctta

SEQ ID NO: 21641 - DNA, 494 bp, Glycine max
tttatcttcactgtattaaaaaaaaaaaaaagaatgcaaaaatactagtatccgaatcggctcaggaaaaaaaaaaagaataaaaaaggatgatactgcagcacgattattaagctcctgaccttaactttgatatggtggagcagtattaatgttgaatgtgcagttgcggggacacgcgacacacgtgtgataaactctggatgcagcacaatcaacgcttccaacccgggtagtttctttgggaatgtcaatgagacaatctcagagctgagaggagaaattaggaaccaaagcttgcactttggcacatcattgaaatccaaaggagatgtcaatacatatactatgtttcaatgcagaaactatctctccagaaatgactgtcttgcttgcatcaacactgcctccacccaaatccgggatatatgcaaaaaagccaacggcgcaagactcatctacaatgactgcttcctcaggtatgagagtgagag

SEQ ID NO: 21642 - DNA, 534 bp, Glycine max
acgacgatgcacgcgtacgtaagctcggaatacggctcgaggacctgtgttctgaggttgcatcttctcagatttccctctcccatccaagttgacctttcattccacttcttcgaatcccaagtctcaggtctggtaaccttttgaggttgttgggtgcagaagggagcgatggctgcttcagaggagaatagtgcactgttcccaatattcattttgacaataatggccattcctatagtgccatatacaataacaaagttgtgccgttttgccagtaagaaatcaaagagcattcactgtcagtgctctgagtgctcgcggtccgggaagtaccataaatcgatattcaagaggatttcaaatgtctcaacctgtagtaacttgacattgttactactttgggtggttatgattgttctggtttattacataaagaccatgagtcgtgagattgaaatttttgatccgtttaatattctaggattagagcctggagcggcagagtctgaaataaagaaaaagtataggcga

SEQ ID NO: 21643 - DNA, 802 bp, Glycine max
ttttctaccgtatgggtttgaatgacaaggaaattgttgcgttatctggtgcacacacattggggcggtctagaccagatcgcagtggttggggaaagcctgaaactaaatatacgaaagatggaccaggagcacccggaggacaatcctggacagtgcaatggttgaaatttgacaactcttacttcaaggacatcaaagaaaaaaaggatgaagatctattggtattgccaactgatgctgctctttttgaagacccatccttcaaggtatatgctgagaaatatgctgaagatcaggaagcattctttaaagattatgctgaagcccatgctaaacttagcaacctaggagccaaatttgatcctctagagggcattgtgatagatgattctccaaatgcagggggagagaagtttgtagcagccaagtactccactggaaaggaatagaaacaagtgtcatgttttcttgtgccagtatcttttagtaatacaagaagacgctattttcaaatcatgtgatatcgcatgtaaaatttcgaagttttaaatgaagaagaaaggaataaaattcaatagtgtgcctatttgaattgcagagtgagctgtctgactctatgaagcagaagatacgggctgaatatgaggcgattggtggaagcccagataagcctctacagtcaaactattttctaaatatcatgattgttattgctgttttggcatttttgacatcactgcttggaaactagttgcctttcgctcttctgatttttactataattgcattggcattttgc

SEQ ID NO: 21644 - DNA, 551 bp, Glycine max
aaatatacgaatgatggtttcttagcacccggaggacaatcctggacagtgcaatggttgaaatttgacaactcctacttcaaggacatcaaagaaaaaagggatgaagatctattggtattgccaactgatgctgctctttttgaagacccatccttcaaggtatatgctgagaaatatgctgaagatcaggaagcattctttaaagattatgctgaagcccatgctaaacttagcaaccttggagccaaatttgatcctccagagggcattgtgatagatgattctccaaatgcaggggcagagaagtttgtagcagccaagtactccactggaaagagtgagctgtctgacgctatgaagcagaagatacgggctgaatatgaggcgattggtggaagcccagataagcctctacagtcaaactattttctaaatatcataattattattgctgttttggcatttttgacatcactgcttggaaactagttggattttgttcttctgatttttactataattgcattggcattttgcacacttgttct

SEQ ID NO: 21645 - DNA, 481 bp, Glycine max
ttctatcgcgtccgaactcagcaaaaaaaagacagacatgagccattatcgccaagatctcaaagagaaaggaggtcctaggttggttatcatgggagagaccaaacaacttgttacccttttgacacaatttcaagaggcaatgaggatggtcaaggatatagtggaaaaaagcagatcgagtaaaacgagcaaacgattactaaggaaaaccctcaagaatatgactcctctactgcaggaaatcaatcaatacaatgaacacttggacccacccagagaagaaatcgacactcttatcaaagaaaaagacgccgtagaagagattgtgtgctgctattcctgctccaggagcatttggtggaccaaattattctcttggcttccactctacggggataaattttggaataacaagaattattcccttgctgcagatgacaaccaagttaagtatatcaaaaacacactgtacaaggtg

SEQ ID NO: 21646 - DNA, 443 bp, Glycine max
cttatttttactggattgcatattgtaaatagtttcattaacccgttgttctactttcatcaaccagaagaactaactcggcgaaaaaaaacccaaatagaaaggagacagacatgagcgattatctcaaagagaaaggaggtcccaggttggttatcatgggagagaccaaacaacttgttacccttttgacacgatttcaagcggcaatgaaaatgatcaaggacatagtggaaaaaagtagatcgagtaaaaagagcaaacgattactgaggaacaccctcaagaatatgactcctctgctgcaggaaatcaatcaatacaatgaacacttggaaccaccccgagaagaaatcaacactcttatgaaagaaaaagatgcagtggaagagcttgtgtgctattcctgctccaggagtatttggtggaccaaatttctctct

SEQ ID NO: 21647 - DNA, 748 bp, Glycine max
ctttaatttgctttgcttctttactcccccatttgcttccaaacaaaggaaaaatcactctcatctgagaatccaaacctcctcctaatttaagtggtgggtcagctactatggcttcgtctctgttactagcggtggtgtttgtgcttgatctggttgcttttgctctcgctgttgctgcagagcagagaaggaatactgcctcgttaaataaagacagtgcaggtagaaactactgtcaatatgactcagacattgcaaccggcctaggtgtggggtccttgtttatcctagttgccagtcaggtgatcattatggttgtaactagatgcctgtgctgtgggagagctatgagacccagtggatcaagatcatggtcaatttgcttgttcatcactagctgggtgacatttatcattgctgcttcgtgccttctagcgggttctgtgaggaacgcgtaccacaccaagtaccgtgatctcatgggagagagagcaccttcatgccagaccttgaggaagggagtgtttggagctggagctgccttcattgttctcacaggcataacctcagagctctattatgttagtttttcaaaagctaataataatggtccccctccctatgctagggacactggtgtgaggatggccaatttttagtagtagtgtggggaaattaattaattgtttgtaatgttaagttggatgtgaaagcctacttgtaaattattatgaaccttatttcc

SEQ ID NO: 21648 - DNA, 450 bp, Glycine max
  unsure (1)..(450): unsure at all n locations
cagaacaaaggctcttgcgtattttatagcanccaganagaatagcagatgccatctgtcttagttggttagggacacttcctttttacgtaacctgcagcgtcaaatatttcaacacacacaaattatttggttgcatgcctgattcgtactacagaaagagtactggactatttactttataaaaatggagtacttgacttggtgaagattgtgaagcttgtagttccctgattcctctgcggcactaaatttcttgcccaatttcataggagatgttcttcttctggtttcaacatgtattaggtgttgcctcatcagacacttggtataattgttgattgaaatgaactctactagtttgccatcttaccccctcatatattttacaattcttctctttcgtgtatctgattcaacatacttaatccagacatgtatgcgttgagt

SEQ ID NO: 21649 - DNA, 503 bp, Glycine max
ttcatttccagttcttcatgatgccaagagagctgatgctgctttgaagaatccgaagaaagagtgggatggagcaacacttagaaacaatgaatctctctgtaattctttattccctgtcagaggtccatcggttcctctggcacagtatgttcgctatgttgaccagtattgggacaaccttaatggtcttggacgtgctgatggaagtagactccgcctgctgacttatgacattgttctgatgttagctcggtttgcaacaggagcatcattcagtgcagatagccgaggtggaggacgggaaagtaattcccgattcctcccatttatgatccaaatggcacgccatctcctagatcaaggaaacccctcccagcgtcgaaccatggcaagggccgtatcagcatacatatcctcttcttcatcagatctcagaccctcttctccatctggcacccaacctaccccggggacagaagaaattgtccaatttatgatgg

SEQ ID NO: 21650 - DNA, 507 bp, Glycine max
tcgataaaaaccaaaaaaagaaagaaaaaactccaccaggtcctcctctcccggtacctggtaacccgcaccatgagcgacagcgacacccgccaaaacgacatcacaaagccactcgatttggaaaacctgagagtcgtctcggccgtggggcgcggcgccaagggcgtcgtgttcctcgcgagaaccggtgaccggtcgtcggaagaatgcgtggcgctaaaggtgataccgaaggcgctgattcttcagaaggcgaaactaataaacgacgtggagtacaccagggtgtcgtttgaagagcaggtgctacgtcgtttcgatcatctgcttctgcctaggttaagaggggttttcgaaactgagaaagtcgttggtttcggtattgattactgccacggtggcacgctccattcgcttaggaagaaacagaccgagaaaatgttctccgatgacacgatcaggtattaaaatcaaggttaaattacttatttatttatagattca

SEQ ID NO: 21651 - DNA, 707 bp, Glycine max
gaaaattcattcattgagtggaatccacgtattcgtttccttcgtactccgtgtttacgtcgttcgtgtctggaaagtggggaaaaaagataacaccacaatttcaaagccccattgcttttccttctcctctaatccaatcgccacacacacttgcgagatctaattgttccagagaaccaacaatcaggggatggcggacgatgacaaagcggttggggaaggtgagatgaaagagacgacgggtggtaccagtccttctgggagtggaaagaagaagaacaaaggtttcttgttgcgtatttggaacgggatatttaggttacacggcgatgattttgagaagagactccagtacatttctaaagaggaagctcaagtcatgactagaatgaacaggagatcccgatcctggaggagaatttcccgcaatcttattgtattttctgtcatatttgaggtcgttgctgtagtttatgctattatgacaactagatcaatcgatctgaattggaaaatgagggcaatccgggtttcgccaatgtttcttttgcctgcactagcagctgctgcctatacaacatttgtcagcttcacaaggatgtgtgatcgcagggataagaaaattcttgaaaggcttcgagctgaaaggcaagaaaaaattgatgagctcaaagaaaggacaaattattacactacacaacagc

SEQ ID NO: 21652 - DNA, 474 bp, Glycine max
tgtgaatcttagactctttccatgagaagggtaccttccattctcttcagttcccttgccgcccctcgcgccgccacctctttcgccgtccccaaccgccttcttcaggccgcgctctacggcagcgccaccgccgcctcccgttctcaccgccgccgcttctcctcgctcctaggtcccttcgccgccgcgtccctcggggtcgccggggctctgatctctcaggaagtcctcgccaaggagcccccgccgcccgaggctctcccgaacgacgtcgttctctaccagttcgaggcttgccctttctgcaacaaagtcaatgcatttttgggactactacgatataccttacaaagttgtggtggtcaaccctctcagtaagaaagaaatcaaatggtctgagtatcagaaggtgccaatactgatggtagatggcgagcagctaaatgattcatcagttataattgataagct

SEQ ID NO: 21653 - DNA, 514 bp, Glycine max
cttcaaccagcatattttttaaaatgataatatatactttttttgtgtcctccaatatccagatgcccatattgaggccatagtctagtcaggaatttgagtacattttgagggaatccaataaagaacatgataccatgtcgttttcaatgcagtaagaatcacattcaactagcacatcaactatattttttatgtgttgagcttcttgagagcttgtgaatcacatgaactagactatcactaaacttacacgagttatggcacagaaaaaagcttctcatgtgcttgtatgcaaagagttaaagccacacctgctaatggtcttagtccaggtgggctatacctttttgtatttcatcactgaagcctccttcaatcatggtatgagcccttatgtgtatgtaacctatcgccatattgtggctgcggttgtgatgttcccttttgcatactttttggagagaaatgccagaccgaagctgacatttgctcttttcatggaaatttttgt

SEQ ID NO: 21654 - DNA, 427 bp, Glycine max
gcagaaattgctcttcttttttccccaaaaaatgagtttcacgggaagcgggaagaagacccaccgcaaaaatttcaaaccacaaagacagcattaatattcttcctttcatttccagttcttcttcttaaaccccttattctccttctctcttgcactgtcttacaatttgaattttccaatggcaacttctgagaacaacagcagcgcgcgtccccaacgcgaagcgaagaagagggccgcagctgcaatatcccaaattcatggcaacgccgccaagaagaaacgcgtcgttttaggcgacgtcactaacgtttcctcaagcgacgtcgccgtttccgtttccaaaaaacccgttcagaaacataaaaatgttaaactcgagaaaccggccgcgccggttgccacgctggagaaggttgaggaa

SEQ ID NO: 21655 - DNA, 529 bp, Glycine max
gacaatctccaaactcgcgttagtttccagaaggccgagagcaaagaaaaatccaatcaatggggcacaagaacacaattttcttggcacttatagctaccttgattgcaaaggaagcctttgcagcacaacatgtagttggtggaagccaaggctgggatcaatccacagactttaagtcatggacttcaggccaaacattcaaggttggagataaacttgttttcaagtacagttcttttcatagtgtggttgagctaggcaacgagagtgcctacaagaattgtgatattagcagtccggtgcagtccttgagcactggcaacgatgttgtgaaactggacaagccaggtacaaggtacttcacttgtggtaccttgggccactgtagtcaaggaatgaaggtgaagattaccatacgaaaagggaatgctcctttccccgcattgtcaccggcaacaatctcgtcactgtcaccatcactgtcaccattattgtcatcaacatcattatcatcaccaccatcatc

SEQ ID NO: 21656 - DNA, 478 bp, Glycine max
gcaccaggaccaacacacacaaattaaatcatcacaataactcactctttcctctgtcaaccaacatggcttcaaagttttgtttcttcttatttctcattctcttgccattatttgcttcctcagacactgttccaaatcccaccactcctgtctctcccggaaccgcatgcaaatcgactccagacccatccttttgcaaatccgttctccctccccaaaacggcaacgtttacgactatggccggttctccgtaaaaaaatcactctcacaagcccgcaagttcttgaacctagttgacaaatacctccaacgtagttcttctctttccgccaccgcaatccgtgcacttcaagattgccgcactctcggcgaactcaacttcgattttctttctagttccttccaaacagtcaacaagacaacgaggtttcttcctagttttcaagccgacgacatccaaaccttactcagcgc

SEQ ID NO: 21657 - DNA, 787 bp, Glycine max
atttctttgtatctactggtgaatgtagggctaaggttactgccgcaagactcccgtattttgatggtgactactggcctggggctgcagaggatttgatttatcagcttcgtcaagaggaagatggaagaaaacaaaataagaaaggaacaactaagaagactataacaaaaagggctttgaaagcatctggtcagtcagatctttctggaaatgcctcaaaagaccttctcctaatgcacaaacttggtgaaaccatttgcccaatgaaggaagattttatcatggttcatttgcagcatgcatgcactcattgctgtattctaatggtgtctggcaaccgttgggtttgcaggcaatgcaagaattttcagatctgtgacaagtgttatgaagcagaactaaagcgcgaagagagagaacagcatcctattaaccagagggaaaaacacaccctttatcctgtagaaattactgatgtacctgccgatacgaaggacaaagacgagattcttgagagtgaattctttgacactaggcaggcatttctgagtctctgccagggaaatcattatcagtatgatactctaaggcgggccaagcattcctctatgatgattttgtatcatcttcataatccaactgcccctgcatttgttacaacatgtaatatttgttatcttgacatagaaactggtcaaggttggcgttgtgaggtttgccctgagtatgatgtatgcaatgcttgttatcaaaaggatggaggtattgatcatcctcataagtt

SEQ ID NO: 21658 - DNA, 540 bp, Glycine max
ctacctacccttttgcagcccttaaacaaagtcattgacaaaagcacacaaagtctcttcccctcataaagcactgattttcacgcagaactcagctttagttcgtgcttcattaacatgggtgctggtgactactacaaaatactgaaggtgaagcatgatgccactgatgaagaagtgaagaaggcttataagaaattggcaatgaaatggcacccagataagaaccttgaagaccctcttaggaaagaagagtttgaggccaagtttaaacaagtttctgaggcctatgatgtgcttagtgacccaaagaagcgccagatctatgacttgtacggtcactatccccttaactctcaacgcttcaccaaggaatatggctatgggaacatgaaggatgcaggggtggttgaaagcagcttgctttgtacccttgaagaactttacaacggttgcaaaaaagaagttgaaggtctcaaggattgttcctgatgaattcggagagttaaggtctgtagaagaaatcttgaagatagacat

SEQ ID NO: 21659 - DNA, 556 bp, Glycine max
catacatccacaccaccacctccttcaaatttgaaggtaacattttgtttttttctcatttctatatccatttttccaatctccagctcattttaaatcatgggttgctcttgttcttcagtttcattgcaccaccatgcttaaattcgtggtctttttatcatgttgaggattcaaaattttgaggggggggggctcttcctagacaacaaagagcaaagagttggagcagaaacaatggtggggactccaattaatggaagaaccaggcaagctttcacagttgtcaatggcggtggccacgatctttgccccagtagtgctcctccaagcaatgctggatcggactatggtgtcatagagttcaccagagaggatgtggaggcattgctaaatgaaaaagccaagagaaaggacagatttaattataaggaacgatgtgaaaatatgatggattatataaaaaggcttaaggtttgtatcagatggttccaagaccttgagatgtactactctctagagcaggagaagttaaagaattcactggaaatgaccc

SEQ ID NO: 21660 - DNA, 412 bp, Glycine max
gttattgtttcccaacagcttctccacctcccgcggcggttcatgtagttgcgcacgaccattcgagtgctacctccgcaagattgctatatttctactctgagaaacaatgtacgttcccgcgcttggggtgctgcaattggttgtagttataaagttgagcggtgctgcattgtaaagaaaggaggtggaactattgatcttgaaccttgccttacacatacctcaactgttgagcctacccttgcaccagtgtgctattgagcggacaattactactagggctgcagcttcgaatgcattgcggcagcaaagatttgtacgcgaagttacaatacagtacaacctctgcaatgaaccttggatcacatatagtataagcattgttgctgacaagggtctaaaaagccac

SEQ ID NO: 21661 - DNA, 801 bp, Glycine max
  unsure (1)..(801): unsure at all n locations
atgcttccgccgtgaacaaataagtagcattgtcagattacagttggagcgcgtgcagaagagaattgcagatcgcaagatgaaaatccaagtgacggatgctgctgttcaacttcttggaagtttggggtatgaccccaactatggtgctaggccagtcaagcgagtgattcagcagaatgtggagaatgaactcgccaagggtattctcagaggagaatttaaggaagaagatgcaattataatagacacagaactcacagcatttaccaacggccaacttccccagcaaaagcttgtttttaagaaacttgcagctgattcagaatctacccctcaagacaccttggaacccttcccacaggctccatgaattccttctactgccccataactttccatcatacaaattttagtatacagtttccttacaccaattgaacaatgatcccggcgcagtttgcatctaatatatattttctattaccaatacgaataacatgtgtcacttcaaaatagtgtaaatatatatatttttaccgctgntgaaaaaaanancnacaccncnnccncctccaccctcacactacctctctcctctctctctcctctctctttctccttcttccactataataaaaaaaaaaaaagggggcgttttagggatccagctctctcccggcgctcgaagtatacttctttaatggcacataattaattcttggcggcgtttaaccgtggcatggaaacacttggtaccaaattattgtctggcacactccttttccagttggttataca

SEQ ID NO: 21662 - DNA, 325 bp, Glycine max
ccccctcacaatcccaaccccaacgccaaagccgttaagtttgatatcccagaggaagatgacgactacaccgacgacgaattgggcgagtttgatgacgatgatgacgacttcgacgacgagtttgatgatgatgaaatggacgaccttcctccgagtaaaatgaaaccaccgcccatgatgatggatgctcctcccaaggctgccaacaatggcggtggtggaggcaataacgggagaaaaggaggaggtcctgttcctgttcaagtgcatggaatccccggcaatggaggaggaaagaaaggtggtggtggtggtggtggaa

SEQ ID NO: 21663 - DNA, 438 bp, Glycine max
cctcctttcatcattcctcataatcgcacgctttctcttattctttctctctttttacacgctaatcttcgttttccacaccttcttctgccttggtttactttccagttccacccaaagcaggcaaccaaccaaacaacaacacagtgtatccaaaggtgaaggtaagacacgacgaccacgacgctgaacttgggctcaaagctgtcctctctctatatctgaaaccatctccttctccagtgatggaccagaaagttgtctctacggcatccattgtcaaagcaccaaagtgttatgtgcctgtaactattccaagagtacttgtaacttgaagaagattctggagacttcagttcggtatctgattcctcaggagctacaggatccgagaaggatgatagtaccgatgaaaataaaaaaatgacatgatgatcg

SEQ ID NO: 21664 - DNA, 506 bp, Glycine max
caaaaacaacacattctatatataaaaaaacacacaattccgataacattattcccagccatcgcaagctgcatttggggatggtaatgggacaacagaaaatcgccctcgcccctccctcttcgtccttccgcctccgcagccgcagcctcaactccctccgcctccgccgcatcttcgacatgttcgacaagaacggcgacggcaccatcaccgtcacggagatcagccaggcgctgagcctcctcggcctggacgccgacgtggcggagctggagtccatgacgaaactctacataagacccggcaacgagggactcacgtacgaggatttcatggcgctgcacgagtcgctgggtgagacctactttgggttggtccaggtcgaggagggccagcagcaaggttcgatgctttaggtctcgaataaggtgagcaacctgagcagaaactgcgatttgggagtcatggtactcaatggatatcagtggaaatgctcgccgtcc

SEQ ID NO: 21665 - DNA, 2038 bp, Glycine max
  unsure (1)..(2038): unsure at all n locations
cctggttggttgcaagtggagcgaagaaaactaacggagacttgtttggaagctagtctctggtgagagtgaaggcgcaccatcttcaccttgaagtcaacgatcatggcaaccattaacctttcttccgctactacgtctctcttccaatccaaacaccgaacgaaacgcattccacgcctccctacaatcgccagaataacaaaccacatcgaaggaactcatcttaactcccccaacggctctcccatccttggcaacgcaaacaattcccttgaggttccctccaataactatatctcgctacactctgcagacgtgcgtaggaaaactaagatcgtgtgcacgataggtccttctacgagctcacgtgatatgatatggaacctggctcaagctggaatgaacgtggcgcgtttgaacatgtcgcatggggaccacgcctcgcacctccaaaccattgatttggtgaaagaatacaattctcagtttcaagataaggttgtagccatcatgctcgacaccaagggtcctgaagtagaagggggatgtagctcaacctattttacttaaagagggacaagaattctgtttcaccactatgagaggggttagcacacatgacacggttagcgtgaactacgatggctttgtgaatgatgtggagttcggagatgtgttgctggttgatggaggaatgatgtctcttgctgttaagtcaaagacaaaagacttggttaaatgtgaagttattgatggtggtgaactgaaatctaggcgtcatttaaatgtccgtggaaaaagtgcaacacttccttccataactgacaaggactgggaagatatcaagtttggggtggacaatcaagtagacttctttgctgtctcatttgtcaaggatgctagagtggtgcacgagttaaaacactacctcaaaagtcataatgccgatatacacgtgattgtaaaaattgaaagtgcagattccataccaaatctccattcgatactttctgcttcagatggggccatggtcgctcgtggggatcttggagctgaacttccaatagaggaagttcctttattgcaggaagacatcattcgaagatgtcaaattatgcaaaagcctgttattgtggcaacaaatatgcttgaaagcatgattaatcatcccacaccaacaagggcagaagtttcagacatcgcaattgcagtaagacaaggtgctgatgctatcatgctttcaggagaaactgcacatggaaaatttccattgaaagctgttaaagttatgcacacggtggctcttaggaatgaatccagtgttcaaagtggtgtttcttatccgagtcaactgagttcccatgaaagtcatatgggagaaatgtttgctttccatgcgacaacaatgtctaacactcttaatactcctattattgttttcaccagaacaggatccatggcaattcttttgagccattataggccttactcaacaatctttgcattcacaaatgaagcaagaattaagcagaggttggcgctttatcatggggttatgtccatatacatgcaattttcaaatgatgtagaagagaccttctctagagccctcaagctactattgagtaagagtcatttacacgagggacaacatgtcacacttgttcaaagtggagcacaaccaatctggcgtgaggaatccactcaccacatacaagttcgcaaggttcatggataaaattctatgaaggatctttgttcctcataagtgtacagtttttttccccactatcttgtaactattcatagtaatggctattcactatcttgtaactattcatagttatgactattatgcacttgaaacaccaaagttggatagtaaaggaattttcataatgcaaatagtgatttattgnnnnnnnnnnnnnnnnnnnnnnnnnnnnnnnnnnnnnnnnnnnnnnnnnnnnnnnnnnnnnnnnnnnnnnnnnnnnnnnnnnnnnnnnnnnnnnnnnnnnnnnnnnnnnnnnnnnnn

SEQ ID NO: 21666 - DNA, 518 bp, Glycine max
aaataaagaaaattttctcttcgagatggggaaccccactatgagcacataatcataatcatgaagaaagcagggagcataagctctggtctcaaactcacagttcctgctgcatctgatcgtgattcatttacaaagttccggtctgagcctgaaagtggaacgtttaaggctggtgacttgcttgtcaataatgaaggagttcgaattgtctctgagaatgaagtggaagctccacccccgatcaggccacaagataaccagttaagtttggcagacattgatacatatcatagtgtttggaaaaggaaatggaggggttgtgcatttggtgctacacatatggactttatcagttttttgcattgaaggaaatccaaatgcctattgaggagcctatccgcaggcagatagcacaagagctaaaaatcaatcaatcagcacaatgtccctatgttgttgtttgctacaattcattctatcataacggtgtcatatcaatcattttagagtacatg

SEQ ID NO: 21667 - DNA, 591 bp, Glycine max
ctgttgatgacaaatatgaagacttgcaaagaatgtttttcttttttagccgggtgtctgatgggctcacaaggggcaaagatgtcatgacctcttttgtacgggatacaggcaagcagctagttatggatcctgaaaggttgagagatcctgtggattttgttcaacgtctcttggatttgaaggataaataggccggggttattactatgtcatttaacaatgacaagacatttcagaatgccttgaattcctcttttgaatatttcatcaatttgaatgcccggtctccagagttcatttctttgtttgtggatgacaaacttcgcagagggttgaaaggggtcggcgaagaggatgtggagattctactagacaaagtcatgatgcttttcaggtacctacaagagaaggatgtgtttgagaagtattacaagcaacacttagcaaaaaggcttctttcagggaagactatatctgatgatgcagagaggagtttgattgttaagctcaaaacagaatgtggatatcaattcacttctaagttagagggtctgtttactgacatgaagacttctcatgatacgatgc

SEQ ID NO: 21668 - DNA, 733 bp, Glycine max
  unsure (1)..(733): unsure at all n locations
cccacgcgtccgcccacgcgtccggtgactttgttagaagctaatcactgccctggtgcagctttgattcactttaacctaccaaatggccaacgctatttgcacactggagattttagagcatgtaaactaatgcaagcttaccatcttcttgtaaatcaacgtgtgaatgtactttatttggataccacatattgcaacccaaaatacaggttcccttccaaggaagaagtactcaattatgttgtcaaaatcacaaagaaccacctcaaaattcatcctagaactttagtggttgttggggcatacagtattggcaaagaatgtgtatatcttgcaatttctaaggctcttggggttaaaatttatgcaaatgcttcaagaagacggattttgcaagcttttggttggcctgacctttcagataaactctgtacaaacggaaacaacacacttctccatgttctgccgatgtcatctttaagagttgagaccttaaaggattacttgaagacctacaaggagcaattcacagcaattttggcatttcgtcctacaggttggactttcagtgagaagataagcaacgatctggaactaattaaacctgtttctaaaggaaatattacgatatatggggttccctatagtgagcactccagcttctcagaactgcaagattttgttcaggttttgaggcctgacaagataattncaactgtgaatgttggaa

SEQ ID NO: 21669 - DNA, 541 bp, Glycine max
acgcgtacggaagctcggaattcgactcgagtgaaataatgttacctccctctctctaacctcactttaactccttcatttcttctttcttttctaaaacctcaaaccgcaacacaacacaacacatatacaagtttcgtattcgtaacgtaacttgtctctcccttcttcctctcctctctccgtttcccgaattctgccctcacttcacccaattccaattccccacacccccagctaggggaattagggtttcgccgccccattcatcgatgcgccaccaccaccgtcgctagggtttgctgcgatggcggaattggaagaggagcggatgggaggggatttcaagcccttctcggaaggctcttcgtgctcgcgttcgatcagcgaaaccgtgaacggctcgcaccaattcacgataaagggttactctttggccaaagggatgggtgctggaaagtacatcatgagcgacactttcaccgttggtggttacgattgggctatttacttctaccccgatgggaagaaccctgaggac

SEQ ID NO: 21670 - DNA, 320 bp, Glycine max
tataaaataatgttgttaccttcctctctctaacctgcaatttaacaactccttcgtttcttctttcttttttctaaaacctcaaaaccaaaaacacaacacaactttcgtaacgtgtctctcccttcttcccctcctctctccggttccctaattctgccctcactgcacccaattccaattcccctcacccccaattcggggaattagggtttcgccccattcattcatcgatgcaccaccaccatcgtcgctagggtttgcttcgatggcggaattggaggaggagcggatgggaggggatttcaacccttctcgga

SEQ ID NO: 21671 - DNA, 427 bp, Glycine max
cttttaaattgtaggcactgaataatctagggagtgtctatgtagactgtgataaactggaccttgctgctgactgctacatgaatgcactcaacatcaagcatactcgagcacatcaggggttggcacgtgtatatcatcttaaaaatctccgcaaagcagcatatgatgagatgacaaagctaatagaaaaggctcggggtaatgcatcagcttatgagaagcgttcagaatattgcgaccgtgacatggcaaagagtgatcttggtatggcatcacaattggatcctctaaggacttatccttacagatacagggcagcagttttaatggatgatcataaggaagttgaggcaatagaagagctttcaagagccattgattttaagccagatctgcaactattacatcttcgagcggcatttta

SEQ ID NO: 21672 - DNA, 563 bp, Glycine max
gtaagattgacgctacctgggtcctgggagtttgtaatgtaacaccttgtatgtgttgtgttgtttacgtatgcaaattgagaagaaatcaagcaaagccaaggaaatgaaggggctttgacatttccaattttctaatgaaggggctttgacatttccaattttctaatatttaatattcgctcattccaattttcatcacaaacacacactgctacaccaaaaaccgaagcaaaacaagtgaatcaagactctacttcgtgttccaatcagaggatatagatagagaattatgagtcgattgaacaaaaataaaagtatttgtagtgatggtagtgccagtaatgaatcttcttcaagtggaataactggagaaagggataatcatcttgatcatgaaattgcacagctcacaaaacttaggtcaagtcctcatgagcttttgggttgtgttgttcctggtaggatgaggttacctgcatctactgtgagaatgctggttggtagagaaggtaattattctggaagagggagattttcatcagcagatggatgccatgtgt

SEQ ID NO: 21673 - DNA, 1177 bp, Glycine max
  unsure (1)..(1177): unsure at all n locations
ggaaggtgtaaggctaaggctactctacaaaaggattgggacgctcccaagtttctttctctgctcactcactcactcacaatacagtgcacaatggagcggaagatcattgattttgaccaaggctgggactatatgcagaaggggattaccaagctgaagagaattcttgaaggagcaccggaaactcctttcagttctgaggaatacatgatgctatacacaaccatttataatatgtgtactcagaagcctccgaatgacttttcacaacagctttatgacaagtacaaggatgctttcgatgaatacatcaaaatcaccgttttgccatctctaagagagaagcatgatgaattcatgctgagggagcttgtccaaagatggctaaatcataaagtcatggtccggtggctttcgcgcttcttccattatcttgatcgctacttcatttctcgacgctccctgcctggactcggtgcagttggcctcacttgcttccgtgaatcggtttatatggaggtacgagtcaatgctaggaaagctgtgattgcacttattgataaagaacgtgagggtgaacaaattgatagatcgttgttgaaaaatgtgcttgatatatttgttgagattggtatgggtgaaatgggtcaatatgaacaggattttgaggtacatatgcttgaggatactgccgattattacaaaagtaaggctgcaaactggattgagattgactcctgcccagattatatgcttaaggctgaggattcttgagaagggagagagatagagtgtctcattacttacactgtagcactgagcagaaattggtagagaaagtgcaactagagctgctggtgactcatgcaaatcaattactcgagaaagagaactctggctgtcatgccttacttagagatgataaggtggaagatctgtctaggatgtatagactttaccataaaatacctaaaggcttggatcctgttgccaatgtattcaagcagcatattacggttgagggtacatcattggttcaacaagctgaagaagctactagcaatcagactacaaatggttctggctttcaggaacaagtccttgtccgtaaatttttagagctncatgacaaatatatggtgtatgttaatgattgctttatgaatcatacact

SEQ ID NO: 21674 - DNA, 421 bp, Glycine max
gggtgtatttcctttcctcatattctctattgagcacgagcactttgggactcacagcttcgtgcttttcttctttctctttcccctcgaactcaaaaataaggtgcatggacgccggcggcttagattccgatggccgtgaattcaacaccgccgaggacatgtggagggaacaggcgggtgaccctagcaagaagacccagtggtatcgtgacggcgtctcctactgggagggtgttaaggcaaatatggatggggtattgggagggtttgcaaatgtgaacgagcctgacataagttgcagtgaggaattattggacattctctattctgaactgtttttctcctgctgtttatgctagacccctatccactttgtttgtattgattgtatttttagcatttgccagatctaccaaaa

SEQ ID NO: 21675 - DNA, 454 bp, Glycine max
acgaggtctccaaggaaatggctatcaaagttcaacagataacaaaagcgctttgataccagatggggtttcagatttgcttagtgtgaaggcaaggattagagcagttgaaaaatcaatggtggaagaaattgagaggcatgtgaaggaacaaaatctaaccactacagctaacctaggagctctgacaaaggtgccaaatgtggagaatcgcaacagaaaagaactcccaaggatgagagcacacatgatgtcaactcgtggagaacaagaactgaaaatgggtcattgatgagagatattccacttgatcacatctcagacaattcagcctccaaaagcggcaggagagagaatagtggtgctgatgatcagatgcttgaattatgggaaactgccgagcaagactgctttgatagtcccatggttagtgaagcaatgaaacaaagttctg

SEQ ID NO: 21676 - DNA, 471 bp, Glycine max
aattaaagtctgggcttgcattgaagcaggatctttggaagtgatatatacacacaccgaagaaaatggtgttgtttcactttttgggatgcctgatgcagagggaaagccaatattattttcctcgtgcagagacaattcagttcacatgtatgaattgccatcattttcagagaggggacgtttgtttgccaagaaaaatgtggcattgattgagttaggtcctggtggcctcttcttcactggaaatgagagtggtttgctgatggtgtggaaatggttggaggtacccaaggtggcatcctcttgacatgtttcctttcaacattggagttgtattatcccatctatttcctcttgaagcagatggtgataaggatgaatttatttgtctgagcagtaaattcactgtaaaaacaattgtatagaaattgacaattttgtagaaataccaatttcattcttttatat

SEQ ID NO: 21677 - DNA, 488 bp, Glycine max
cacggagtcacactaccactagtttttttgttcctagcgcttgtttatgtttgggggcagatttccctgactgcgcaacctcgtttcgtttccatggcttcaacacttcagaaactgcttcgaaaaccatcacctctaccacccttcagattcatcactgccctcaacccaccgcaaccccaaaaccaaaaccaaaaccccatcctcactctcactcgcgaccctccccaacaatgtaacgctcaacccttcgatgatgcccccaccgtgatctttcccagtttcccctttggcttcttcccaagacccgtttctgaaagcgggtttcgtggcggcgatgatgccggggtggaagaagaagactctggaaccctctgggcggacagcgtgaagaagaagcggtagaagaagatgaacaagcacatgtaccagaagctcaggaagcgcatgaggagacagacgtagaaggtgaggggccagaattcatt

SEQ ID NO: 21678 - DNA, 683 bp, Glycine max
ggaagaaaaggttgatgaagaagaagcagcaaatggaggaaatgccattgaagaaggtgaaactttaactcacccagaagcttattcagatctagagaaccttaaaaccgaagaaaaagaggctaatctcgaagagggtaaagaagagagagaaaacaacgatagctcggaactttcttccaccccagaaaccttcgcagcttcagaaaaagaaaacgacggagcagaaccagaaacagacacaggattcttttgcagaggaggaagaagagaaagagagcgaaccgaaggaacaacctcagcaaccaggcccgacccgaattcggatccggagtcaaaggagcgagaaaacgggtcaaagtgccaagagagagaaagagaagggttgccggagtgcttgctgctgatgatgtgcgagccgaagctgtcgatggaggtgtctaaagaaacgtgggtgtgcagcaccgactttatacggtggctgccggagagacccgccgccggcggcggcagcaagagggtcgccgcagaaacgcttgcaaagtccaagccgaagccgaagcccgatgatgcagccaccgcggtcgtcgtgctcgttcccggcggcgagaggcggcgccggggtgtcgatggcggcgatgattgagcagaagctgatggggtccaaatcgggtaacgggtac

SEQ ID NO: 21679 - DNA, 448 bp, Glycine max
gaagaaggtgaaactttaactcacccagaagcttattcagatctagagaaccttaaaaccgaagaaaaagaggctaatctcgaagagggtaaagaagagagagaaaacaacgatagctcggaactttcttccaccccagaaaccttcgcagcttcagaaaaagaaaacgacggagcagaggcagaaacagaaccagtaacggtggaaacttcagaagggtcaacggaggaggaagaagagaaagtgatcgaaccgaaggaacaacctcagcaaccaggcccgacccgagaaccaatctcggatccggagtcaatggagcgagaaaacgggtcaaagcgcgaagagagagacagagaagcgttgccggagtgtttgttgctgatgatgtgcgagccgtagctgtcgatggaggtgtctaaggaaacgtgggtgtgctgcaccgacttca

SEQ ID NO: 21680 - DNA, 452 bp, Glycine max
ggcactgtaagtccaagagaaaaagaaaaatttgagagaaaaggaaaggcttaacaacgcacaaaatgtcctctaatccagtaatactgcagagtgtgaacttgaccaagtatatactggagaccagcgtttatccacgagaagaagagactctcaaagagctaaggaaagccactgcaggccacccttggggctttatgggcgctgctcccgatgcgggtcagctaatgaccttgctcttgaagttgttgaatgctaagaagacaattgaagtgggagtttttactgggtactctcttctcctcactgcacttaccattccagatgatggaaagattattgccctggatcctgacagagaagcttacgagataggactaccattcattaaaaaggctggtgtagagcacaagatcgacttcatagagtctccagctctaccggttcttgat

SEQ ID NO: 21681 - DNA, 439 bp, Glycine max
tcttatttatgggtttggtcagtgttcccttttatggtgtcgacggtttggtaacatgtcactttcttatagctcatttactcgtcaatcaagttgagatctggtctatattaacctcctttggggtacatcccaatgtcaatcttggtacaagttgaaactttatggtcctgaagctatggaattgtgtaaacctgacttggaggagaggatgaaagtcttggcaatgagcacaacaggagaagaagaaatgggagacacttttgctgaaagagcagaaacttactaccaaaagaggcctcagctactgtcccttctgcaggacttgtacaatggccacataaccttatctgaccgttacatccaaacactggccaagcacaagcaccatagtagacactcttctcaagtttcaactgtagatgaaggcttctctgac

SEQ ID NO: 21682 - DNA, 477 bp, Glycine max
aattcggctcgtgcgataacatacataactttctttcaaatcacgttcttcttcacctctgtttcacttcgctagctgctcatcaatcctcttcctacatttctcagggggacttgaagcaatgatattaatggagagggacccaaacatgggcaaggaaaaagtgatttcaaattccacatttcttccctcatccacaaaagtgttcaaggacaagggcatctccaacaacagcatgccctcctggcttctcaccaacatttctgacttggaggagagaatgaaagtgttggcaatgagcacaacagaagaagaagaaatgggagacacttttgctgaaagagcagaaacttactaccaaaagaggcctcagctactgtcccttctgcaggacttgtacaatggctacataaccttatctgaccgttacatccaaacactggccaagcacaagcaccatagtagacactctttctc

SEQ ID NO: 21683 - DNA, 408 bp, Glycine max
cccacgcgtccgcccacgcgtccgcccacgcgtccgtcttcccatattgttctcgtgtgttgtgtgtgtcagtgttttggggtgtgtctgtgagtgcgtgagagaaagagaaaaccaactacagcaaaaaagagtgtcttgggcggtttggtttgggtttaacactctcgtcttcgaagatgccacgcccagggccaaggccttacgagtgcgtgagaagggcttggcacagcgagcgccaccaacccgtgagaggttccatcattcagcagattttcagggtcgtcaatgacgctcacagtcccgcgaccaagaagaacaaggaatggcaagagaagctccccgtggtggttctcaaggccgaagaaatcatgtactccaaagccaattccgaggcagagtacttga

SEQ ID NO: 21684 - DNA, 414 bp, Glycine max
gcaaggaccactcttccattcagtcattcaacacctcactcactgattctcaaaaactcaaaagatggtgatgaagaaaaaccttctcttctcactttcacttctcctaatggttctcttcacttcatctcaaaccaccccagcaccatcaccttcctcaaccccaacagacatcatcagaatcctcaaaaaagccggaggattcaccacccttatccgtctcctcaccacaacacaagtctcaacccaaatcaacgcccaacttctgaactcaaacaacggattaacagtgtttgcaccaaacgacaatgccttccaaagcctcaaacccggcttcctcaactccctcaacgatcaacagaagaatgaacttatccaattccacgtgctaccaacatttgtttcaatctcaaa

SEQ ID NO: 21685 - DNA, 556 bp, Glycine max
gtatattaattaagttggtgaactcatttcatgtcacataagcccaaatacaaaggaagctcaggtatacagcagatgagtaaataaattttgtttgctgatttgctcaaacctggaagaaagaagataacttacgaaagaattctatcctaacattctcacagaagtaccaagacgacagaagaagcagaagttacatgcgaaccgtccccaaatgaaactccacttctaaataattactctctacaataccacccattgaacaacaactttctcactagctctttgattccgtgttttccgtagaatgtcttcgaatatcaaactggtctacaaactccaaaggactaactgtctcatttctgatcctcttgatcttaggactcaagagaccacggtgcctgaacccatagagcttgagcacctgattatcagcaaaattgtaagccctctccatgctactgaggcacctctccacaggataatctccgtaactcccacacggtttacacccgacaaaatgtgtcacaaacggccacctctcatcccccaaccc

SEQ ID NO: 21686 - DNA, 400 bp, Glycine max
ctttgccttgatttttgggtcaaataaataaggatgttacattggagtctgtgccattgcttccttccacccaaacccacaacatagacgacatcttcttctgcaacacaacaaccaaaacacccttcacttgtttttgtttacttaactcgcacttcctcttctccaatttcgaggtctcaattccggctttgaacagccacaagcacgcattgcttgttcaaggttcaaaccatcattcaagacattcatggaagcagttaatgaaactagacctgtttccttctgatatataagaaaaaggttcacatggtttctacagacaaaagtgcggatcaaaatatcccttctgatgaattgcagcagagagtgagtcctgatagtgatactacattgtcac

SEQ ID NO: 21687 - DNA, 706 bp, Glycine max
cggacgcttgggcgagaaatcaaaagacatggcttcagctgctcttgcctacaaatgcatggaggtagcatatatgagggtagtatattcttcacacactagtgcaagcagagatcggcatgagttgcagacagcactgcaaatggctcctcttggcgagtctccatcatcatctgcctctgatgtagacaatgctaacaactctacagcggccgacaaggtcaccatatctaagagtgtcaattcgccccaagtagctggaaaccatgttatttctgcacgaaatcgtcccaattttgtgcgattgctcaattttgctcaggatgttaattttgccatggaagccgcaaggaaatcacggaatgcttttgcagctgctaattcaagcctggctgtggacaagaatgcagatggtatctcctctatcaagaaggctcttgattttagctttcaagatgtggaggagttactacgtttggtaaaggttgctgcggaggccattaatcgttaaaggatccatttaatcaaaagatgatcctagcccgttaagaagatgtgtttctttgtcatgtataatatcttcactctgacaaaaagacagtctgaattaaattgtgaaggggaagattcattttgttggatcttgatctggtcttgccatctggtgaaagctattactgtctctatacatatttttgccatacac

SEQ ID NO: 21688 - DNA, 726 bp, Glycine max
cacctcgagttgcattcctggaccatcaacgtttgattcttaatgtcgacaatagtgccttgaagcaacgcattgctgctttggcccaagacaagattttcaaagacgctcaccaagaagcattaaagaaggaaatagagagactaaggcaaatctatcaccaacagaacctacaaaagatgaacagcaatcttcaacaaaccacaccaacatcacagccacaacaacaaccaatgcaacttcatcatcatcagcagccgatagcagtgtctcaaccattgggatgcaaggacaacaaggagcagctcctcagttgagggggaagagacaaggaatagtgctgtagatggatgaatgaatgaatgtcccttcatgctaactagaaaactttcacgtgatgtgttccccatcaatgttgttggtgtgggggcaccctgacacagtgatgggggttggagggtaggaacttcacaagtggattaatgcttgaaaataggttggagatttttttttttatgctttcaaggtgaagaaaattggttatatcttgggggttggattgggattttgggatttgatgatttcttcagattacacttttttttaacataaaaattattctcaatgattttttattttgttgggtggaataaggggacaaagcatcgtggttttgtattgggtatgcatgggagctgtcagagaattatttttctcctttttttt

SEQ ID NO: 21689 - DNA, 383 bp, Glycine max
taaactctatctttgtctctgtttttctccaacatcattcacttcattattgcacctttcagtttccactcacagctcttaactcaacccaacacaacacaaacactctctcttcatttaattttaattctatatctccctccctccattgaaagccacccaaagttcgcatcttcaacaccagagccaaaatgggtgcatctggaaaatgggtaaaagcattaatcggactcaacaacaagagcgaccttggtgggaagaagaagaaatggaggctgtggaagagttcttctgcgggagaaaacatatctcaaggcaacgactatgctagtagtgtggcttcggattctttcaattttgcagtggccactgcggtcagagct

SEQ ID NO: 21690 - DNA, 1063 bp, Glycine max
ttccacgcgtccgaaagagacttggctaaaattacccccagaaacagtacatatgatcagttttgcaggacttattggtgatggagcaccgttgatttctttatccagtggtaaatcaactaatgtcagtgcagtccattccattaaatcggtgaatatggttcacactggtgcaaggaagaatgggttttctcactggattaaaagtggaaaccctttccagcaaaaattaccaacctccaatgaaggtcgtggttactcgcaacctaatggatcagtttgtggtgaatttgccggaagttcaaccaataattttcatgacgataaaacacccagaaagaatgatatcaatcaaatgaatggtgccaattctgtttcagaagatgaaaatgaggatcttcttgctgactttattgatgaagatagtcaactaccaagtcgaagttctaaaccccatcattcaagagctctctcttcacatgttaatgacgaagagaatacaacacaaactggatcttctctctgtctattaaagtctatggataaatatgcaaggcttatgcagaaattggaagtggtaaatgttgagttcttcaagggagtatgccaattgtttggattttttttctattttatatataaaacatttggtcagcaaaacgctagttcaactggaaaaggcacttctagctctcttaactatcgcctgagaacagctttatccagagtaaaccaagattgtgaagagtggattaagtctcaatcgtcgtcaccaacatctttgagttcaccatttgtacatgctgagttgacacctacacaccctcccaatacaaattatggtcactcctcagggacttctttgggtctgaaggaaagatgtgtggctgttgacactatatctcttgctgctcgaatactgaatagatctaaagctcatctccaatcaatgctcttgcacagtaattcaactatacttgaggatttctcacgttcatctggtggatgctgctaccagatcttacagaacatgttcatcggactacagtgagactactgttgc

SEQ ID NO: 21691 - DNA, 380 bp, Glycine max
atttctctatttttttcaggcttgcttgatcattcaagcttgcaaattgggactgatccgaatcaagctgaagagctggagctgagatttgtcagccctttgtacagttttgcattttttgtgcatttgactcgattaactttactagaagctctgtttaggattcttactaaacttaggggcatattttaaaggctcttgctgtactttgctgttgtttttgctttttttttagggctagggagatccgggtagggtgggggttgggtagtgttttctactttgctagcagagggagtttatttagcaccaaggcttatatactgatattgttgtactgcctgagaggttagcatataaacatgacagtgatatggcaa

SEQ ID NO: 21692 - DNA, 410 bp, Glycine max
ctcgagccggttttcgtgcttctactcttattagaagctatgttgttggcgtcttttcgttcgaacttcccttgtgctgtacaaggaactgtattttgtcaaaggaagcaattaactcatggatgcacaaaccaaaaatcaaaggattacattgtgcaggatagctgcatgttacagcattcggagaaagcattgaggaggacacttttcctttctgtcttggtctcagctggtgtttttccaactttgtcgtcttatggcaagacaaagagtaagaatccgtatgatgaaaaacggttgcttcaacaaaatcggcggatacagaaagaaatacattgcgccagaggaactcccaaaatttgttagagtaggttttcaagttaaagtagtatcatcagattactatataa

SEQ ID NO: 21693 - DNA, 378 bp, Glycine max
cccacgcgtccgggccaatataccgttggtacagacaggttactgtgttggagctgtcgggaccgagcccttctgtaccccaaattttacgtggtctaggtaattctctcgctggagtagacagaactttcaatgaattactacaggacttgacattttcccatgaagtccaagcacgaatggacggaatcatgtttgagaaattggaaggatatccatatgccaaccccattttggcattgataaaagattatcttagctccctgtagttatttataaactcttccttctattcgtgttttccacttgtataatgatgcatacaataatgatgcatacaatccactgacacgcacatacccatgcgtgaatgtctca

SEQ ID NO: 21694 - DNA, 394 bp, Glycine max
tagagttatcgagggatgcaatgcaatgcaacgcaaaaaggaagaagaaagttgcaaatcgcaatcgcaatcgcaatcacagagagagtgcagttggtttggtacggtgatttaatttgagtttggttaagagtctcctcgtagtgtagtcttctcatttgcattgcaccgaagaatcaaatcaaatcggtggccgtaaacctaagttggttcagatccgatggaggcaatcgaagatttggttcagctctccgattccatgcgccaagccgccgccgtcctcgccgacgaagatgtcgacaactacaagcgcccttccactttcctcaatgtcgttgcgctcggcaatgttggtgctggaaaatctgcttccttgaatagcctcattggacat

SEQ ID NO: 21695 - DNA, 433 bp, Glycine max
cgtggatgacacaactgagagcttccaatggtttttccttcctcctccctctccctcttcttccccattcccactctgcttcctaataaccttatcttcagaaacaataccagggcaatccttaatcaacacaaatgcccattctccgaggaaagaccacgcttttcatgttgtgctctaaaacccacttcacaaaacaggatttttagaagggatttgatgctgttaggccttacttcgttatctccaacaatgccactttcagtgacacttgcggaagaagaaccacaaatggcttcatttcttgacgaaataaatgcctattcttatatgtaccctgttgagttaccttccgataattttaccttcaaatggattgaatcccgaaagccagaacgatattcatcagctgcaccactttctcctgatgcac

SEQ ID NO: 21696 - DNA, 781 bp, Glycine max
cctcgagccgattcggctcgagggctaccccacccccagttcgtccatggtttcgcttagcctcaattcgctctagcccacccccacccccaccccctgcacctgcccctgcccaagagccacgcctgccagcatttagaactgcttcagcaccatcatcaccacagattcagccaactcaaccagctccccagcctcaagaacacccttcttctcaacataacagattctcctcttcttcactccctacttccccagagaataaaaacattacccgtgttcccttgccaagtccctctcactctccaaacacctcacctcccccctctcctctcgccctcacaccttcccagtcgaggagcgagaccatgatacccgaccagcccgagcccaaaaccgtgctagtccagaaaaccatcgaccccaggcccaagccctggcacaatgcccgtcacggacaacacgacaccgtcaaagaaagtgaatccaaggagaaggttgttcaccggaagctctcggagtctgaggagtccggcatgagagtcataaccattgcaggggaaaacagaggagcgtacatggaactcatccagtccccgaagaaacacgatccaaagtaccttcacaagaaggggaattccaacatcaacgttgacggggttgaatccgagggttcgagtgccgaggaagggactgtgaacaagaaggataagaatcagaaaggtacgagttcttcttcgtttccgatgtctgcgtacatgaacagcaacgtgcagtgtgt

SEQ ID NO: 21697 - DNA, 480 bp, Glycine max
gtgttctaatgatccccacagttccaggtcctcccccaaaactacaaacaaatacatccgacttagaaatttttcgtgcaagggcttttagcctgctgtccattgctggagtatcaggattttgtcaggtaagcataccgctagggatgtataataaccttcccctatcaatttctctggtggccagacatggtgcagataaatttttgcttcaccttgttgagagtctttatgacagcattgaagatagaaagcagcatatcatagagcacaaactttaatctgactgcaaggatgtagatatgctttgagtatgcctactatgccaaaagctgggagagaagcgaattatggacataaatcaaagaagggatattgtataaaggaaatttttgctgatctatatcctgtttctttcagatattatgagttcaattattcattaaatcatatcattttgattgtgctagcttgggtacg

SEQ ID NO: 21698 - DNA, 440 bp, Glycine max
atctctttcactgtgaatgatgctataataatatgattattaaagctcgtacacatgttttattccgttttgtgtttacagttaaaaaggtatgaacaatggtcattggttgtctttttcttggttcctttttatatttttaagttagtctcttggctcctctaatagcagtagctgaatggtttctaagaaaaaatttcttgtctaatcttgtgtaatcgagctacatgggtttactcttaatgtgcttgacgtatcgatgattacatgaggtagttttgtcaatgacataacggctgatgagggcaaaccttcaaagctctttggtgacatgatgaggactgagcagccattgttgttgacaatgtaaatcaaggtagcaaatttttcattaatgtaaaatgtatcgaagacaatatatgatattctttttggatttg

SEQ ID NO: 21699 - DNA, 732 bp, Glycine max
ctcaaagataagcctcccactctactgattctaaacaagaaggaccttgttaaacctggtgaacttgcaaagaaacttgagtggtatgagaaatttactgaagttgatgaggttatacctgttagtgccaaatatggtcagggggttgaagatgtcaaggactggatactgtcaaagcttcccaatggaccagcttattatccaaaggatattgtcagtgagcatccagagagattttttgtagctgaaattgttagagaaaagatttttatgcagtatcgaaatgaaattccatatgcatgtcaggtaaatgttgtaaactataaagctcggccaaatgcaaaagaatacatacaagtagagattttggttgagaaaaaccctcagaagattatccttattggaagagaaggaaaggctttgaaactgcttgcaacagctgcccgccttgatgttgaagattttttacagaagaaagtttatcttgagattgaagtgaaggttagagcaaattggcgacaagatgaagggcttcttaatccctatggttatgggggccaaatacgtgttatataatgtgaagatggaaaaaaaaaaacaaatattatcaacatctagtataatatgacagcatcagggttaacatgactggacgatgctgctgagttggatactacactatgcgcaactgctgctgcagagcatgggtcctttcctagagctctgagttat

SEQ ID NO: 21700 - DNA, 801 bp, Glycine max
gcagtcactcttcttcgggaaattggacgtctgcaaaaagtccatggtccaagtgcaataagtgcaaaagatgagatggcaagactgtcacgtcatctcggttcgttgcctcttctagctaagcatagaataaattgcattcgaactgccatcaaaagaaacatggatgtccaaaattatgcctattcaaagcaaatgctggaactactattgtctaaagcacctccaagcaagcaggatgaatttagaagcctgattgacctgtgtgttcagaggggtttgactaacaagtccattgatcctttggaagatccctcgcaattctgttctgccaccttaagcaggttgtcaaccattggatacgatgtttgtgatctctgtggagccaaattttcagccgtgactgcgcctggatgcatcgtctgtggaatgggaagcatcaagagatcagatgcactagcaggagcaggaccagttccttctccgttcggttgagtctcaaagatgggtcttaatccttgctatatataacctttgttaccctaatgttgtaaagagagagacaactttgtagagaaagtaaacaagccattatagggtaacaaatattgcaccacaactggagagattatagggtttcacttactgcttgaattttgatgattgtgatggttgtttctcggctctcattttttttccctccccgatgatgcattgtctgtgattacagaatgtgttgctctcctgtatgtttttccatgatataaacacgaaattgcagtatatagtttgttttgcgtc

SEQ ID NO: 21701 - DNA, 742 bp, Glycine max
gcaactttttgcagttttacaaagtgcacgaggatcttcagcatctgttttaaaggaaaaactttctgccttgggttcgtctggagtgttggcggaccatcagcttcaagctcaactacaagagcatcatcttaaaggccatgggcatcttacaatatcagacattgcaaggaaagcttttctttatagtcattttatggaaggccatgcaaaaatttctcctatatcacgcttgcctctcatcactgttctagataacaagcatcatctgaaggactttccagtttgccagccatttcattcggagccaaattttcagccgtgactgcgcctggatgcatcgtctgcggaatgggaagcatcaagagatcagatgctcttgcaggagcaggaccagttccttctccgttcggttgagtctcaaagatgggtctttaatccttgcgctctatataacctttgctactctaatgttgtaaagggagacaactttgtagagaaagtatacaagagaatgaagggattatagggtaacaaatattgcaccacttctagagagattatagggtttatcacatactgcttgagttttgattgcgattgtgatggttgtctgtgattacagaatatgttgctctcctgtatgtttgtaattttgtaattatattctgcttttgccatgatagaaacacgaaattgcagagcataattgtatttcgtatatagttgttttgcgtcatca

SEQ ID NO: 21702 - DNA, 777 bp, Glycine max
cacaaaaccagctaagtcaccagctgaagaagactggaaggttaagcgagaatatctgctggaaaaaagggtaagaagtgtggatgcaaaggaagctttccgtcttcagaaagaaaataattttgtgattctcgacgtaaggccagaagcagagttcaaagaggctcatcctccagatgctatcaacgtgcaaatatataggcttataaaagagtggacagcatgggacattgccagacgtgctgcatttgcattttttggtatttttgctgggactgaagagaaccccgagttcatccagtctgttgaagcaaaattagataaaaatgcaaagataatagtagcttgctcagcagggggtacaatgaaaccatcacaaaatctgcccgaaggtcaacaatcaaggtctctcatagcagcttacttgctggtccttaatggttataccaatgtcttccatcttgaaggtggtctttactcatggtttaaagaggatctgccaagtgtttcagaggaatgaatctagtgccaagaatgtgtgtgtagtgaagcctagacctagttttggccatgatgagaatgctgataaaagcatatgaagaatagaaccaacgaattgaaatgtcattattgaactagtgcagaaaattcttaagcaagaattggcaacaaaaatgccaggttacattctgtaaaggttgcattcctagcttaaactggaaaatgcccatttatttatcagcagtgtgtgatcagcatttttgtgatttataaaaa

SEQ ID NO: 21703 - DNA, 298 bp, Glycine max
gagaacttcacaatcaccacttggaatgatttgttttccagtccaggatttggtatcgaatgatgagtatgagggtggatgtatactcggtaaccttttagaggctacacttttttgagatttaatcatggatattttttagacaagttttggaaatgtattgtgccctcaatgataatgtttagcaaaaataacttagttgaaaactgaaaagttaagtaaaaattgaaaagtatttttttaattggaaattgttaagttggtttattgtattgaaaaaaatgaaggaaagaaaagt

SEQ ID NO: 21704 - DNA, 503 bp, Glycine max
agtcattgcaaaatgaaaaggagtgagtgagtaggcctggtttggttatatatttggagagagagagagagagagagaataaaaatggaaggaggatcaggtggcgagaggaacagtagtgtataccgagagtgcttgagaaatcatgcagccagcctaggaagctacgccacggacgggtgcggcgagtacacggtggacggcgcggggggactacaatgcgccgcgtgcgggtgccaccgcaacttccaccggaaagtgaagtacctggcggcggctgaaagccctcccacggagtatgggggcagcaacagcaagaagcggttcaggtctaagttcacggaagatcaaaaggagaagatgctagggtttgcggagaagcttggttggaagcttcagaggagggatcttgatgatgagatagagagggtttgccgaagcgttgggggagtaggcaagtcttcaaaggttggatgcattaccattagaactttttcttcttc

SEQ ID NO: 21705 - DNA, 533 bp, Glycine max
acgaggtcccctagttgatcatggaggcttttttcccgcagcgtgtactgaggtgggtggaatgcatgtttcagaagtaccacccattctccagcctcaaggggctgagtgctccagtgaaagttgcctaaaatcacttgagagtctgggagggttgacactagaaggatctcccggcggatcaaagaagaggatgctgaacttggactcaatggtagcacctttgatctggagcgaagccaacaccagaactcaaggaatccatttagcccaagttaatcctccaggaatgactaggtatggcatgtaggtaggatagggaaggctagttcctcatgaagagagttgaggacattgtgctttgttccaagcttttaggtggtagtactcgagttaggattctttatgctgttctttggcccattcatagtttggtgggccaatcaactttgtctcacaatctttgtgtaaaattgaaaatactatgtcggcttaacttggactatcactactaaaggttggcgctgaccatt

SEQ ID NO: 21706 - DNA, 277 bp, Glycine max
cagagaagagtgaaaacatcgggtttggggactctctgcttccctctaggtgcgcaccatggcaatgtgggggctattgttaggagcagaatcaaaaacacatgtcggagatgcagaggttctgaaggagctgaagcaaggtttggagcctggttcggtgaagccaggctcgtgcgtgagctcctgggacttcaccttggacccatgcgacaaccttttcggcgacaagttcacgtgtggcttcagatgcgacgtcgtcgtttcggggctgagtcga

SEQ ID NO: 21707 - DNA, 429 bp, Glycine max
  unsure (1)..(429): unsure at all n locations
ggctgcgacgacagaaggggaatcacaaactagttttctctaaccaaccatacagtactcctcactagctataccctggttaatccatggagaaagaagctgttggccttgaaatcactactgagctaaggttgggccttcccggtggggaattacctgacaagaacgagaagataaagaagagggtgttctccgagattcaagctcatgatgatgatgaaaacagttcctccgaacaagaccgcaaaatccaaaccaagaatcaagtggtggggtggcctccggtgtgttcgtaccgcaagaagaacaccgtcaatgaaaccaaaatgtacgtcaaagttagcatggacggngctcctttcttgcgtaaaattgatttagctatgcacaagggatattcggagctggtcttggccttggagaagttct

SEQ ID NO: 21708 - DNA, 402 bp, Glycine max
cccacgcgtccgcatcgcactgtacgtctgtaccataacttccaccaccgccggcggcgccgatcaccaccatttccggcgactccacgctacaacaaccgtgtttgaaggactacaaaagtgagcataccatggctttgtccctttcttatgcaatcacaaagccatttttgagggtccaagacagaagcagcatgaactgtgaacttcagagacccaaaaatggtgttgtagctttgataaggtgtgaatcaaaagagtcatcatcagagttgccagaaaaacattccaagttggagatagggtcacccattattttcattgaagctcccaagatgatcaagactgcagctactatgccctgcctcagggtcaattctggtctagtcaaacctggtgatg

SEQ ID NO: 21709 - DNA, 413 bp, Glycine max
cccacgcgtccgcccacgcgtccggaaaaggagaagcttgctcccttatcaatacaatgactagaaatctagaatggctttgaagcttgtaaatctagggtttcactcatcgattccgtgttctccgaggcccttgaaagatcggttcgtgcttcggtcttctaaagtggagcaaatatcgtttacggaatctgagaactcactcatcgaagcccttcttggcatccaaggacgcggacgttcttcttctcgtcagcagctcaatgctgttgagcgtgctgttcaagtcctggagcggttagggggtgtacctgatccgacaaaatcaaacttgatcgagggtcgctggcagctaattttcaccacaagaccaggaactgcatcgcccattcaggcagcagcatcaattgaag

SEQ ID NO: 21710 - DNA, 354 bp, Glycine max
ctctaaacctctgcactccattcttctctcgcatgcttcaccaccctggtgctgcttcttcttctctccccaacactcacactcctttgccttctctattatttttctccccttcctcactccccaaccctaaccaatccaccttcataagcaccaaagcttccgtgagcgagagccacaatgaaacctccgacgacaccgctgccaacttatttgaccaacaactcatcctccgactcgccgcagccgcctaagacgccgacgaggccttactagtgatcgccgacaactcctcccgaaacgacggcgtcgtttcctcctccgattgctgttccattatctccgcagcactta

SEQ ID NO: 21711 - DNA, 350 bp, Glycine max
cccacgcgtccggacgaagagcaccatgcccacctattgggaaaactgttggagacatttcaagtggttgtgaacttaatacctttctgctctattggtaccttgagtcaattcaaacctaccagtgagcagaaagtctcaaattttcagaaaattcttaggggtacctataatattcgaacaacagttcggaagcagatgggtcaggacataagtggtgcttgtggacaattgctggtgaacatatctgacaagtcccttggcactgcagttcccctaacggacatagaagatattgttatctgatatcaatagcttcaatttaattcttgccctcaattttaatttcg

SEQ ID NO: 21712 - DNA, 708 bp, Glycine max
caaatatggttcatcatatagccgcacaacatggaaacctgcttaagagtcacctcaaatcaaaatgctacaaagatgaaccctaccctgctctttccttttcaagtaagggtgaacgagatggacactggcaatctttttctactgggttatctcccacaacctctaaggcagcaagcgatccatggctgtcattcttatgtggtccatctgctgttgatgaatgtgaaaatgtgcagccagattcttcaagtgaagtaagcattgaagaaatacactcaaatgataatgtgttagtaagagatgttcaaccgtctttatctgacaaagaccaaatagagaaagcacagcgcagtaaatttgtacagggacttttgatgtctactatccttgatcctgacttctgattgagacgattaaggacatcagttgctacttgctagtttcaattcgatgggtaaaaacaaaggagaaaaatagtattttcaaccttgaaaatgattcatagtcataggatcaatgtttctggtgtatgcagagatacccctagtatagaggaagtagtctaataggtaggatttaaatgtaatgcatttttaagccgatgctatttattagttcagatcaattgcaatatagtggctttctgccccagggcatgtttgcttttcaggtgaaaaatacttttcacagtaaagtccttttgtc

SEQ ID NO: 21713 - DNA, 406 bp, Glycine max
gatagaacaaagtatgttaaagagtgtgttgttgacatttctcagtttttatatgatgaaatcctttgccatcttggatttcaattgagtggctgatttgattttcatcaaagattgacagctaaaggggaaatagttttgggtgttgaactgaacatccttgagaagctttgtttggtcttttaaataccaaaaccaccttgttgtgaattaatatttttgagaggaaaacagacattgtaaagcagcttaataaatgttaacattagaaaaacgagtggcccattttcctcctcaatttctgctttgatgtcatgttgtggtgtttaataagccactggcatattatacaattgtttttgaggataaggataaaatgttaagtgccatagcacgtgtaagttat

SEQ ID NO: 21714 - DNA, 445 bp, Glycine max
cccacgcgtccggatgtacttactcagcaatattgcgagtggaaatgagtctcatagagaagctatcatgcagctactcttttcaaaagcagaaaatgtgtctcactctttcttctaccagtttctgcagagcaatgacagttgtttacgcacatctgctgtttgggtcatagtaaatctaacttttcctgcaagtcctggggtatttggtagggttgtaaaactgcgtaatgtaggcattgtttctcaaatcaagaagatggtcaacgatccttgcatggatgttaagcttcgtgcaagacaagcacttgggcagattattacttttggtgataggtaattgtaatcagttactccattcaaagcccctgggctgcaggcaaagagaaatcttgatagaatttattttctcccagttcccaccttattatatgtcaaggtgtat

SEQ ID NO: 21715 - DNA, 1092 bp, Glycine max
ctcaccaccacctccgcaacactctccgccgccacctccaccacattcgcccccaccaccaccaccttcaccgccgccacctgtttatccctatttatcaccaccaccacctcctccagttcactctcctccccctccagtctattctccaccaccaccacccccatctccaccaccttgtatagagccacctccaccgccaccaccttgtatagaaccaccacctccaccaccatccccaccaccatgtgaagagcattcaccaccaccaccatcaccacaccctgcaccttaccatccaccaccatctccatcgccaccacctcccccggttcaatataattcaccaccaccaccatcaccgccacctccaacacctgtttatcattacaattcaccgccgccaccgtcatttccaccacctacacctgtatatgaagggcctttgccacccgtcatcggagtctcgtatgcatcttctcctccaccacccttttattgattcttttgagaacttttctcctctaacccttcgcctctaccatagcaacgaaaaaaaaccaaaaacacccattcaagatcagttcatacttttattattattggtggccatttcttccgtgccctcttcttcctgtgccagccaggtcatgtacgcgactctcgtcgcaaaattaataaaacctgagaaatcgagaagggcttgtgtaaggctgcacacatgttttttgtaatatgggatgaacactgagaagaggttgttacagtggattgaggttagaggagaaagtctctccatattgatttgaattgttatggatattcagagttgtgaaataaaaatggctgcgaaagagtaggttgcagagaaaatgtgtatgtatagggatggatttggagaccataattcagggttgcatagacagtagtgacactttctgttgctgctgcatgtttgtggagtttattgttattgtctctcttatatcatactttttttttttgctgctttaattttgttcctttatagtataatttatgaacattttacatgtattgattttctgaaaaaaaaaaaaaaaaaaagggggg

SEQ ID NO: 21716 - DNA, 476 bp, Glycine max
cagagacttaagtgtgatggcattggtgaaaatgaagtgcaagagttcttggacagtgtgtgtccaatggagggggcactttcaccaggtgagtattggaacatatattcttctgcacatcaaatggggagctgcagaatgggagtcaatgagaaagaaggtgcagttgatgaaaatggtgagacatgggaggctgaagggttgtttgtttgtgatgctagtgtgcttccaagtgctgttggtgtcaatcccatgatcacggtccaatcaactgcatactgcatctctaatagaatagcagattatcttagaagggattaaataatctcagaagtttgttgaattttcttgttcattagaagcatgctgttttagtttgattatcaaatttggtgtgtatttttactataatgttatgtatcaaatggaacttccatttccatgtatcctttagtaaagaaaaagtttatattagg

SEQ ID NO: 21717 - DNA, 422 bp, Glycine max
  unsure (1)..(422): unsure at all n locations
cacccttccgcccacgcgtccgcccactcttccgtccacacgttcggtcagcagagggccagaaacttcttgcctccagattgaaggagcagagagatcgccggagtgagagcttggctaagagaagatcaaagctttccagtgcagctaaacaagctgccacagcataagatgctttcagacagagaagtttagtcttcgccctagtttttgatagtcccatttcatgatccctttcttttggtattttggtattcaaatacttttttaaagcatttcttttatgctttcttcgacagtttaattgaatttaagtttttttttccttgttggaattagtgtgaccttttgaagatgatatttatagactggcatatttctttctactnaaaaatatcaacaagtctaaaaaaagggcggcc

SEQ ID NO: 21718 - DNA, 376 bp, Glycine max
aggaaccaatctattcaaattttgcaaccttttcacaattcaaacataggaacctgggaattttgctgttttttttttatcaatgtctcataccttgcaattttcatttcttttcaagtgcattcaattctccaatgaaggtagagaagatgaacagagttaggcctcgtggctttcaaattctatgctcttctgagcattccagtttcaaagatgaagatgatgctgaaaatggagggtctgatacttctttgtttggttgttttgttttgctgagaaaactttcaaaggaggtcaagtttcatcgcgggtgatacaggtggagagatttagcaatgatgtgtattatgtgatgatttgcaatttttaacttatt

SEQ ID NO: 21719 - DNA, 612 bp, Glycine max
ggcagcatcctcagtctcatcaattgatgaactggacacggctacctcagactgggtaaagtacgtctagaacatgccgattaatatcagggagatggaaaatgcactctcccctcttcttttgggaaacatgggatgggcattagacatacatgtgatcatttcctacatccttaaacctgtcttgacacatgattaacggctgacctccaatgtgcatgaaaatttcagttcaagcgggtagtagtttcatctgcggtgccttttgctctcttgtacaaaatttgtaggcctactgtatagtataaatttgtattgtggaggagaaatagccactatttaatttggacctttggtcctctcttaaaactcagggttgtgcttatcatttaaggtagttatttacatttcctgtcccgtaatcctgtacatttattttgactactgtaaagtgcactcatctcagtgctcacatctccaaaacttctctatatggcaaactaaaaagacagtgccaaaaactttgtttttgtttgccctgtctttgtaatgcttatgcctgaaatttcctatggttgagtaaagatatgcaaataattgcaacaatttagt

SEQ ID NO: 21720 - DNA, 473 bp, Glycine max
gccgttcctatctctctctcacaatggaaactcatcacggaggccagtggaataaagcgtttttgcccctactcttattactctccgtgttctccaccgtcggatcatcatcatcggccatacgtttcagattggcacctctggcacgaggtgccgcggagaggcaggttcccatgcaagcgggtgcacccttcaagattgcgctgttcgccgacctgcactttggggaggacgcgtggacggactggggcccacgacaagacttaaactccatcagggtcatgagtacggtgctccacaatgaaaatccagattctgcaatatatctcggtgatgtcatcacggctaacaatataatgattgcaaatgcaagcttgtattgggatcaggtaaccgccccagcaagaaatagaggcataccatgggccagtgtatttggaaaccatgatgatgctgcatttgagtggccattg

SEQ ID NO: 21721 - DNA, 498 bp, Glycine max
aaaaaccaaacacgatgaacaaataaaaatgtcgagaataaggtttggagaatcattgtgagcattttggtttacaaaaacaatcatcaatcatgggaagcgatagaaaatcgaaacgagcttcaccctcccaacgtgaagatgagaagagaagcaagaggcagagaacggtagaggatgaggaaaggaagaagcggaaaagggaaaagaaggagaaaaggaaggacaagaaatctcaccagcattccaaagaaaataattctgataaggggaagttgaaagataagcacagaagcaaacatagcaaaggtgatgaccatatggaattccaagaattgtcaaatgatgactattttgcgaagaacaatgagtttgctacctggctaaaagaagagaagaatgtgtttttctctgatcttttggctgagtcagcgcgcgtgttgttttctgatttcgtcaaagcctggaacaaaagaaagcttgattcaaattactatg

SEQ ID NO: 21722 - DNA, 591 bp, Glycine max
ccttcccaatatagtatattctcttctctgccgtccaagctagtcgttctctctgtctcgtttatagtttttggtctattatattcttctgtttgcacgaagcacactatgggttggaaaggaggtctcaaaaacgtggtcacaatgtttactttcatggtggccttggttgttgttcaacatgtgaagtgtggggactcagctcgcatgttacttcagcacggtggcttcgttcaacgaagtggcaccaacttcgttctgagtaacaggcatttctacttcaacggattcaacgcgtactggttaatgtacatggcatctgacccagccacaaggcccaaggtcactgccgttttgcaacaagcttccaaccatggcttaactgttgctagaacttgggctttcagtgatggaggttacagagcacttcaggtttctcccggttcctacgacgagaaagtattcaggggattggactttgtagtatcagaagcgggaaaatatggggtgcgtttgatactgagcttggtgaacaactggaaagattttggtggcaaaaatcagtacgtacagtgggtgaaggaacatgga

SEQ ID NO: 21723 - DNA, 754 bp, Glycine max
gattttgaaccagttcaaactgaacggccaggagagttaactgcttactacaaaattgcacgtcattacaagtgggctctagatcaactgttctacaagcataacttcagccgtgtaatcatccttgaagatgacatggaaatagcacctgatttctttgattattttgaagctgcagcgactctccttgacaaggataaatccattatggctgtttcctcatggaatgacaatggacaaaagcagtttgtacatgatccatatgaactttatcgctcagacttctttcctggattaggatggatgctggccagatctacatgggatgagctatcaccaaactggcccaaaagctaactgggatgactggttgagacttaaagagaatcacaaaggaccacagtttatccggcccgaagtatgcagaacatataattttggtgagcatggttctagtttgggacagttttttaagcaatatcttgagccaatcaagctgaatgatgtcaaggttgattggaaattaatggatctgagctatttactggaggataaatattctatgcactttgcgaatgttattaagaaagctacacctgtctatggagctgacatggttctaaaggcatctaatatagatggcgatgtgcgcatcaaatataaagatcagtcagactttgaaaacattgctcaccaatttggtatatttcaagagtggaaggatggtgtgcccaggacagcatataaaggagta

SEQ ID NO: 21724 - DNA, 582 bp, Glycine max
cctagttcaacacttgtttctttcttctctctcacttctccgtagatctactttctctctctctctcttgagaaatgcgtggggtctcgcttctggcgtttctgcttctgctatccctctgcgccgaagcttctgttcacgactacagaggggagaaattcgccgccaaaggtaacgcctttgtcgtccatggaggcagcgaaggaatttacgcttctgcccccaacctcaccgacgcttatccaccgccaaatcccgactcttacatacggtttgaaaggattacatttaggagaaacaaggacttttctaactttagctcatggcctattcaagctgttatttttgaagtagaagatagagagacaattggtggttcagcttatggtggtcaaagggctgtctgctgcaccggtgatctagcaaaactaggtgtgtgcactgaaggacaggtcatttaccgcccttctgtggagaatcccgattggccctaagtttttggtgtctcttttgaaatggatggtgaagtggcagtgctgccattgaaatctatacagatcacaaaaacctggatgtataact

SEQ ID NO: 21725 - DNA, 531 bp, Glycine max
tcatgatttgatttgacacaggaggcacgttgctatgagttgctctttctcaattttgcaattgcaagtgaagaagccctaattttttgcagatctggaaatggcgacggcaacataccctccaccgccaccttattacaggctttacaaagattacttgcaagaccctaattctgctcccgaccctccaccacctattgaaggcacttatctttgttttggagccaattacactactagtgatgttctacctaccttggaagaacaaggggtgcgccagctctattctaagggccctaatgttgatttcaagaaagagctgaggtcactcaacggagagttgcaactacatgttttggagcttgctgatattcttattgagaggccttcacagtatgcaagaagagtagaagaaatttcaactgtattcaaaaacttacatcaccttttaaattcattgcgtcctcatcaggcgagagcaacattgattcatattttggaacttcagatacagcgtcgtaaacaagcagt

SEQ ID NO: 21726 - DNA, 559 bp, Glycine max
gccaccaattgtttcctcttgtcggaagtggtagatttgtcacagcacctgttattactgaagatggtcagcctattcaagatccattggtgttgaaagaaacaagtccggccaagggattggctgtacatcctcaacataataatagtccgtcaagtatggatgctgcaaataatttagaaaaggtgacagacaaggcagtagtccagtggatgttaactctgcatcaaataggtcttgatgtggttcgcactgataggacattagttttttatgagaagcaagaaaacttgtcgcaactatgggatattcttgctgtttatgcttggatagataaggacgttggctatggtcaaggaatgtgtgacatatgctccccaatgataattcttcttgatgacgaagcagatgcattttggtgctttgagcgtttgatgcgcagacttcgaggcaactttagatgcaccgagagctctgttggtgtggcggctcaactaagtaatctggcttcagtcactcaagtaattgatccaaaacttcataaacatttagaacatct

SEQ ID NO: 21727 - DNA, 542 bp, Glycine max
ctcgagatcgagccgtaatttgcagtgcaccttatttattggcattttatttatgctagaaaatatattatagaattttatatagtaatattattgaattttttaaacataagtggtgggcacatatcttgttgaacggtggttactgttataggctaaggctaagccccttcaccgccactaacaagcttgctctgcttccactaatggctgctttctctgtgaccgccaccacttcaccttcttcatgccttcttcaacgacatcgtttctccaccccttctttctatctacatggctcaccacggccacaaaataagaaaattgggattttcggaccattttccttcaatttgaggaggagaactttaatgtgtgcagtcaatcaagatgcaatggaagcgatgaaagacactggtgaaactgatagcctcataggtgtgctcggagaaacagattcacaccaagatggaagtagaactattcccaaggtgcggaatgaaagtattgaagcatggtcacaatttgctaaaagagcatct

SEQ ID NO: 21728 - DNA, 523 bp, Glycine max
  unsure (1)..(523): unsure at all n locations
gcagattttncaagaacggcacaaagnaacaacacggcacaaggganacaaacccnnaagccgaannccaannnccagaaaccccaagnnccnaaanncccaagnnnncncggggncggancnaaaaaaccgaaaaanncagcaaanncaacggcggnnnngaaaaaaganncaacnnnnacgcaaaagnnncgnncccacaggaccgcagcancagnggcnacagcccgcaggcnncacggngcaagcagccggcccgcaaccgcccgcaaanccccnggcccccccggaaccgnccgcanncccggcgacaaggcgaacncccaccggncccccaagnncggcggncncgcgagcggngaaacgcgcancaccggcccccnggaaggcgaggacgncancaaaacgggcaaggccangcaggccangggcgccagganccgnaaggaaggcgacacccggancancganggcgncggcaanggcggccccccggcgccggaggcgccgcncgannncggca

SEQ ID NO: 21729 - DNA, 1021 bp, Glycine max
cccacgcgtccgcccacgcgtccgcccacgcgtccggtgaactgaagggtgggtggtgtgattgagtatgagcatgaattctctcctagcaagcacgcgtgcttcttcttctccattataccaacactcttccaccttgacactcagacaaccccattttcttttcatctcctccaattccaagtcgtctgcctttccattggttgcatattgttcctctgccccttcacccaatgaatcagaccaaaccattcttctaaacgaaacctttcattctcaagtcacaacccccaaaatccctccctttgtatctcctgtccccaagcttagcttcagcgaccaagctttctttctcctcgctttcatcgcctccacgacgtcagtggcattcactagccttgtttttgctgctgttcccaccctatttgcaatgagaaatgctgcattatccctttcaaagctggcagatacagctcgtgaggagctccctagtaccatggctgctattaggctttcggggatggagataagtgatctaacactagaactaagtgatctaagccaggaaatagcagatggagtcaacaagtcagctcaagctttgcaagctgcagaagctggaatccgacagattggttcagtggcacaacaacaaaccgtatctatgattcaagagagggcaagtttacccgtaatttctttgcaacctgctgttgctggagctgctagaaagacttctagagcagttggccgagccacaaagagcttgttgaacatcatttcaggaaggcaagacgcaacagcagaatatgatgatgacgtaacttacatgtgagagatcagttaaaatggttctactgcgtgaatattcattctctttgctcaatgctcccgacccaaatatagtgtaggaggaggatcctgtaaattatgaaaggatttgaatatcttgtgtcgtaatgtataagcttgacctttttacgcccccctcacaaataaaggtccggttataattgcagcc

SEQ ID NO: 21730 - DNA, 371 bp, Glycine max
tactgttattgccaaatcacatatgttgcctccattaaagttttggttagagaaatattttgctcagcaaacgatgagcataatcatcatcatattttttgaacctctcaatgcactgtggactgtccaagtgatcaagaccatcggtgaagttaggttttttatcatcgacgtgagaagccccattatttgtagcagcttccacctggttgtttggggaggagcgtggaggaggagaaggtgaaggcacgctcgccattttattttcctcttctttcttccaaactcaggttttttggcatttgcaaattgggatgattgcgcttctgtttcacttgatatcacacaagttacaacacaaacatagttac

SEQ ID NO: 21731 - DNA, 296 bp, Glycine max
catattttctgaacctctcaatgcactgtggactatccaagtgatcaagaccatcggtgaagttagagttttttatcatcgacgtgagaaaccccattatttgtaacagcttccaactggttgttgggggaggtgttgccggagcgtggaggaggaggaggaggagaagaagaaggtgaaggcacgctcgccattttatttatatcttctttcttccaaattcaggttttaggcatttgcaaattgggatgatttcgcttcagtttcacttgtgatactatcacacaagttacaac

SEQ ID NO: 21732 - DNA, 366 bp, Glycine max
aagaaatcaaagagaaaacaaaaatgactgatcgaagtccacgagtgcttttgcgagattatatctatggtgggatgagaaccaacagccaaaagaagaagaaaaagctacccttttgtgcatgtgtgcgacctcccaccaagggagattgattgttaccatatagtttgaagtaagtgagacattagctttcttgtttgtaaaattttgtttctaaggatgcttcaagaccctacatattttgatcatgctgtacatgttgtgcctcatttactcgtaagaagaggccaaggctaggatgaatttttgccatttttttcctgtaatatttagttctgaataatcacctttttttctatctggttt

SEQ ID NO: 21733 - DNA, 571 bp, Glycine max
accagagaaattctaggagttgtgtattgaagtgagcaagctgctgctggtgctggagtttagggatgaggatttattcaaacctaaagaaacacaataacacatcatcacaaactcatgtaaccctgccaataaaataaacctcgtgccgaattcggcaccaggaaaaacaaaagcgccgaaagagaaagtgagagagatggagttgaagaaggtgggattggtgcttttcttgttaggattcacagcaactactgtggatgctactggcttcaaccctaattccctcatcactcagctgctcccacaaatcgagggtgattctgatgataactatgtcaaatccaacaccgaaccgtgctgtgataactgtctttgcacaaactcaattcctcccaaatgccaatgtacggattgggcagaagactgccactcagcttgcaaagggtgtatttgtcagaggatatggcctcctcggtgtcgatgtttcgatgaaactgacacatgctatgacaaatgtaccagcaacctccaagaaactgccaaagctcatgatcgctacaactaagca

SEQ ID NO: 21734 - DNA, 504 bp, Glycine max
cgataccctagattgcagaggaaacggtgcaaaataagcccaacaacaaaagacaactctccgaggaaacaacgttactttcttcattatcgttcaacatagcacataacccttaagccgttaagcaccttcaacgccgccgtagtttgttattggtttggtttgatggagatggagggtgagaaacagcacaagtttgatgtggacctcggcaacctcatggctttcgattcctatcacaccttcccttctcaaccatctctttccagggaggacctcatcaaacagtgtttactgaaaggcactcacttggttcaagctatcgcagatgccctctttatcttaccatcgaccgaagatttggatggaccccttgtcaccttgtcctccccactcactaaattgcctagagaaaaacatctgccaaaaccaaagccttctacttaatgggaagcttttgccaaaaagaaaggcattcataaacggaagatagacataattgta

SEQ ID NO: 21735 - DNA, 381 bp, Glycine max
ccaacaataacaaaggacaaaactaacgaggaagcaaaacaaacattgcttggcaaggacgaggagcagctagcaaaacccctttcttttacttgtttctctaatttcttcattctcgtgcaacatatcacaaaacccttaagccgatattcaccttcaacgcctctgtagtttgttaaagatggaggctgagaaacagcaccagtttgatgtggacctcggcaacctcatggctttcgattcctatcacaccttcccttcccaaccacctctttccagggaggacctcaccaggcagtgtttactgaaaggcactcacttggttcaagctatcgcagatgccctctttaccttaccatcaatcgaagatgtagatggacc

SEQ ID NO: 21736 - DNA, 546 bp, Glycine max
gcgcccactcttctagctccaaggccacacaaaaccaataggaacatcggaacaacaactgaccttaacttggattatgttttcgagtcaacgcaaagcatttgatgaaacaaaagctggtgtgaaagggcttgttgatgtaggtgttaagaatgttcctaccttcttccatcaccaaactgagaagtttgagaaggcctcaaatataggcaacaaaagccatgttattccaatcatagaccttgcagatattgacaaagatccaagtaagcgccaagggcttgttgacatagtgaagaaagcatctgaaacatggggtttctttcaggtgatcaatcatgatatccctttgagtgttcttgaggagatgaaaaatggggtaaaaaggtttcatgagatggatactgaagccaagaaagaattttattcgagagatagatcaaaatcctttctgtataatagcaattttgatctatacggctcacagccagcaatcaattggagggattcttgtaggtgtttgttgtatcctgatacccccaaaca

SEQ ID NO: 21737 - DNA, 470 bp, Glycine max
cccacgcgtgcgccacgcgtcctttcaattcaaaatcaagatatggaagaacccgtcatggaacaacaaccctccgctgctgcctctgggaacactgccagacccaggcttcagaagtacgcactccgatctgccaataagttgaaggaagagaagtcagaaactcccaattgctccattcctacttctgaaaccatgagggggagaagtgtaggtgcttcaagtgtaagtaaaagtgtgagtgttcttgatttttctggcaaggacaagtctggtagtgccaagccaccaagaaggctctcaattcctgccaaaacaccagccacttcaagacccaagctgggtggcaacattatcccaatcactgtgactacaactgggaggaatgcttttggtcaaggcagaagcaaaacaccaatttctgacattttcaagacatctacccgaaccaagttaaatctcctaacttc

SEQ ID NO: 21738 - DNA, 452 bp, Glycine max
  unsure (1)..(452): unsure at all n locations
ctctcttccatctctgtttctctctctagattctcgctccgaattcgttccttcgtttgttcctttttcgcattcgtcttcgcgcggatcgcgagtgcgtcaattcgaatttcgaaagcctagggtttctggaaagcatggttgccgagctagggttttccgcggatctagggtttcgcgggttctgagggcttcgggtgtcgaattaggagggggatttgatggtacgcgttggggaaaatgcgaggctatgcatgggcgtggaggtgagaagggtaagaggactcggcacatgtggaaatcctccacacgtggcgactcgtctttgaacgccgatgtttcttcgtcttcttcttcgtcgtcgtcgtcagtgaagtcgntctgtaaggacggtcgcaaaattagtgttggtgaatgtgctctctttaaaccatctgaagatcgcccaccat

SEQ ID NO: 21739 - DNA, 591 bp, Glycine max
cggctcgaggcatattagtgtggaaagtagtaggtcaggactcaggaacgacgccgccgtcccaaagattcatccttcatccattttctatactctctttccttttagactaccaatgccatctttctcattcttgagaacattcagggtctctctttttccgccttatcccccaattgcaaccccccctgctcccccccattctcaacctcactctcaccatcatcaccatcatgctgttgcctcattcaatcgcatgcttcttatgcgccctcccccacccaccttccattttgaccacattctgagttcccttgtcaagaacaagcattatcccactgtcatctccctttttaaacaattcgaaccaaatgggattacacctagacctttgtactctgagtatcctcatcaattgtttctgccatcaggctcacatcactcttgctttttctgtattcgccaacatcctcaagaggggttttcatccaaatgcaattaccctcaacacactcatcaaaggcctctgttttcgtggggcgattaaaaaagcactttactttcacgatcagttggtagctcaagggttcc

SEQ ID NO: 21740 - DNA, 530 bp, Glycine max
ttcggctcgagcacaaatctgactgtttgcacttcacttcgtttcattctctcaaacaccaaacccaagtgattatgtgttccttcaaaacatggttcaatttgttcatcattttccttgcctcggctgcaacacccatcttctcattaacagattccccaaatcaactctccacaaactttctagaaattgccaagaaacctgaagtatttgattggatggtgaaaatcagaaggaagattcatgagaatccagaattgggttatgaggaatttgagaccagtaaactcattagagaggaattggataaactgggtgtcccctataaacacccagttgctgtcactggtattattggcttcattgggacaggaaagtcaccttttgttgcaataagaactgatatggatgcactccccatccaggaaatggtggagtgggagcacaagagtaaagtacctggaaagatgcacgcatgtggtcatgatgctcatgtcgctatgcttcttggggcagcaaagattctcaaa

SEQ ID NO: 21741 - DNA, 465 bp, Glycine max
cagaaaccatgcagctgagcagaagtcatctgccttggttaaacaggagaatgcccgggagggaaaaccaacttccaaagatagagacaaatttcaggatcgatcctcatttccacactatcatcatgatccacccccaaagtggagacagactcttgattgtcctcatcatcttcctgttcttctccattcatctgatagtccaggtcatccaaatcatctgaagagttggcctcatcccaggaactacgggcagaaccatccaagttagaatcctcatttgaatcttcttcaaaggcagcggccacaagttgcggagcagcactaaggtttttgcttaatttcagagaagaagatgaagactgtacatttagaagctcacattttatctgcttctgaattttaccaaaagtaatagcttgtccagtgtataactctacgaacctaactgcatcttcttcacgt

SEQ ID NO: 21742 - DNA, 544 bp, Glycine max
gcagcaggctgccacctttttgaattgtcagttgttggttcttcctttcaattacctgggaatacctattctgaggaagagatggagaggcgacttcttagtaggaaccagggtagagaagatgacaatattgaaacaataaggaagcggtttaaggttttcttggagtctagtcttcccgtgattaattattatgatgcaaagggaaaagttcgcaagattgatgctgcaagacctatcgaagaggtatttgagacagtcaaagcaatttttggtccaaagaatgacaaggctgattgagcatgttcatcttgactccatggtggaaatttagaggtcatatcagtattggtggcttgttctattgtgtcacattttgttattatagtatagaaaatcgtagtttatacctgagggttttacctctgtattctaatgttatatcttgttgactcattcattgataattgcaataaagatttgtgtgggattatttctaccaatttaaaaaaaaaaaattttttttaaatttaataaataatat

SEQ ID NO: 21743 - DNA, 557 bp, Glycine max
ggacgagaagatatttttaaattagaatgattattttggcacaagcaatacagataaacatcaaatgttttacaacctagtgtttaaatacaaagaagcaaggaagaagcaactttatgctctcaatggaagaatcatagaactctagtgttgtaggaaccacaactagggcatttgtggtagagccagtggaagggggtctctcctttcttttcacaatcattacataataaaacctgagtttgactagaaatctcatcagaaattctctcttcagccaacaacgcatctaacatcctaaaatatacctgcatgtctccaagtgacttgctacatattgggcaggtataattaaagcaggtatattcctgaaaacatgttgagtgcattacatgaccacatgggagggcttttaccggagagcaggatgtgaagatatattcatgacaaattggacagttgtcctctaaatgtttctccctttcatcatcaaataatttgcagatcctgcagttatattttgccatcgataaattacatgaaatcgttgagcatgt

SEQ ID NO: 21744 - DNA, 565 bp, Glycine max
cattaaaatggcacaaaagtgcacatatattattattacgcttcatttgtaaatgactaaatggcaatgagctcaattcataccttgtacgctttttctttccgtttgtgtttcccaaattcatctccacaatttaagcctctgaatgccattccactaagaagaacaaaacactacaacaacaacaacaacaacgttaaatttccccgagaaagaacaaggaccagagcaacccttgatgatgttgaaacagaccaactttcctcaatcccacttgttgaaaatgagaaagccaaaaaggatgtagaggaaagtgtgaaagtgttaaaagatgcagctaagacaagaaaggtagcagcagaggagattctttctgcactgtctatcattgagaaagcaaaagttgatccttctgccttttttgagacccttggtggaaaggaatcccctgggaggacctggatgctaatttttactgctgagaaacaactgaaaggtggtcgatattttcctctcacagctggtcagaggtttgatgctgctgcaaagaggatcgaaaatggag

SEQ ID NO: 21745 - DNA, 791 bp, Glycine max
  unsure (1)..(791): unsure at all n locations
ggaagattaggtctggtgtgtttgatttgttgcttaagacggggaagagtttgttggaggttaagaagagtggggacggggttgaggttgattctcgtgatgaggttcttctaattggaacagttgcactggtgatggggttttctgggaggctttatgaagtgggttcttctgcgcagtgcattcaggggaataggaaggtgctctttgcgctgcattccgagtttttgaagctggagagggaggccgcgaattcggggttcgagtttgtgattcctgacgttgttgttgatcatgatgaggaggaagtgccggaattggttccgctggggcctgctgaggttgctggtaatggcgaggtgttgaagaagtgcgagaaggataagaatgttcctgttgaaggtggcaaaagcaagaagaagaagaagaaaaataagaagggtgatgcggcggcggctcacgattcgagtgacaaggacaatgtggctagtgagaatggtgggaatttgaacgatgaaagcgcagtgctgttaaatgaaactatgattgctaacctgcaaaggcaatttgagaaggttgctgaggaggcgggcttggatgatggagttgcgagcgcgtgtgattcgcctcaggctgtgtctgcttccggaagaactctgtctaagaagaggaagaggacaaagagtttgaaagggaaggtgtctcaggattctgctgaattggatggcgaggagagtgcagtcgcaaagggtgnggagaaaagtaaaaagaaggtaagattttcgatgaaa

SEQ ID NO: 21746 - DNA, 418 bp, Glycine max
  unsure (1)..(418): unsure at all n locations
cccacgcttacgtggttttttaccttgtaaggatttttgtttattccactatcaacaacaaagttggtagctgatgcatttggagggactttacctaccaagcaattatttaaaagtcttgttctgaccatattaatccccctaattttgggaaaggttctacgtgaatcttttaaaggtgtggctgactttgttgacaaaaaccgcaagctttgcacagtgatcagtgcacttttccttagcctagtaccttggacacaagtgagtaggtcaaggtcattgctgttaatggtgaagcccaatgtttttcttgtagctattggactgggaacgcttcttcatctgnctttattggtatttaatatccttgctgtcctgggactttcagttatcttcgggggtaaaaattcaatttttt

SEQ ID NO: 21747 - DNA, 340 bp, Glycine max
ttacaagcctccccaattggacgggctttatcaatatctttcaacagtgtttgcaactgatttgcattctcgtgcatttttacggcttcctaaatctgtgggtgtggattttcgtgcctcgtgtttctgccataaacaaacaattgacatgggctatgtgtgttctgtatgcttatccatattctgtgagcaccatgataagtgttcaacctgtgggggttagcatgtcaagaaaagctatgagatgaaggcaatcccagctgattaagatgaagttttcagtcctgtatttggataatctcttgataacatctacacagccgcaacatttccatgagca

SEQ ID NO: 21748 - DNA, 432 bp, Glycine max
  unsure (1)..(432): unsure at all n locations
cagaagaagaggaacgtanacggagaaagagtaggaagattagaagaaaaagaagtaacaggagcaggatgaagagaagatatagcgatccacatgagagcgaagagagcgagagcgatgactctgaaagcagtggaagaaagaagaagaaacgttcctcttcttctaggtctcgatcgaagcgtatcagaaggagcagcaaaagaacaaagggaagctctgaaactgagagcgcgggttctggttcggaggaggaggagaatggttctggtgatgccaagagtaaagcaatggttgatgaggtgaagatgacggagattaacgcggaggctataaaagttgaaggaattgtttgagtctcagaagaaacctgctttggataacgaacccgcggttgggccaatgccgttgcctagagctgaggggcatatc

SEQ ID NO: 21749 - DNA, 480 bp, Glycine max
ctcgagccgcaattttattgctacttttctccatcacctaaaaattgggcactagtttcatgctattttctccaccgcctctgctcaagcctcaccaagtacccctcaccactccattccctcttcctcaaacccatcacacagcatcaagaaacaagagggtccacagcaccagcaaattcggaaactttcttgacttcaaacccgagaacaaacccgaatccttagattttgaccttccatggtgccacccttctgaccgcaatcgttttgatgtgatcatcattggggctggccctgcaggcacaaggctcgccgggcaagtgtccctctatggagttaaggtttggtgcgttgatcctgaccctctctctgtgtggcctaacaactatggtgtgtggagagatgagtttgagagccctgggcttgaggattgcttggaccaaacatggcccatggcttgtggttatgtggatgatg

SEQ ID NO: 21750 - DNA, 525 bp, Glycine max
cgatgaagcagctgaacttttaagggatgaacagaaagatgttcctttagctgctgtagaatttctttccaaatactgccaatgggctgttgtaacattgggtgctaatgggtgcattgccaaacatggaaaggagatgatacaagtcccggccattgggggaaccaaaggcaaccgatgctacaggaagcaggggacctttttgcaagtggatttttgtatggagtggtcaagggtttgtcactagaagaatgctgcaaagtaggcacatgcagtggtggatctgttatccggtctcttggtggtgaggtaacgtcggagaattggctaacggatgcaccactgcaggtgcagataaacggactgcccacgcctcccggtttatgcagaatgaatagtagcaaccgttgcccccttaatttgtgctgtcttatattttactggtttttaatgttgtttttcttattctattgacttctattattcatttcacacaatagtatggaagctagatatttttcaggg

SEQ ID NO: 21751 - DNA, 463 bp, Glycine max
ctagctgcaaagctttttgtgttctgcaactgaaagtgaaggaaaagaagcagaaaccaaatcatgtgttctctactttggagttccattgcattgtgtgtagctttcctactccttgagcttggcgttgtgcacccttcaccctcacaccataggatcactcgcttgccgggtcaaccccatgttcagtttcatcagttttcaggttatgtaaccgttgatgacaaaaaccagcgtgcactttttttctactttgctgaagccgaaaaagatgcactttccaagccccttgttctgtggctcaatggagggcctggttgttcttctcttggagttggtgcattttcagagaatggaccatttaggcccaaaggtgagggcttggttagaaaccaattcagctggaactgagaagctaatttgctctatttggaaacgccaattggagttggattcttttact

SEQ ID NO: 21752 - DNA, 540 bp, Glycine max
aagcgcttcattttcttgtcttctggtgcttatataatgacgtactagctagcctcatttgtcgtcatccttattatggctctcgctttctttccctatattcattttctgtgctttgaaagatgactggggttcctcaagaagcacccgtttctcttgatcagctcaagcagatactggatgagtttgcaaaggagagggattgggagcagtatcatagcccaaggaacctccttttggctttggtgggtgaagtgggagaattgtctgagatatttcagtggaaaggggaggttccagggggtcttccagattggaaagaagaggaaaaggttcatcttggttgaagagctttcagatgtgttgctttaccttgtgaggctctcagacatttgtggtgttgttcttgcctgagctgctctaagaaaggtccaactcaatgccataaaatacccaaaaaaggttaatgatgatgcaattactcaagatgctaattgatgataatccattggtgcctatggttgttgtagttgctatttt

SEQ ID NO: 21753 - DNA, 615 bp, Glycine max
aaaatatctctctctcgaaaagctagtttccccaattattgtgtcaactacataagctggttatgagtgctactattactactactactaccttaaactagaacaatgaacaggggaattgaagttctttcttcagcctcatacctccgaagttccaattggctgttccaagaaagcttggggaccaggtggactccacaggagaacaagctctttgagaatgctttggctgtgtttgacaaggacactccggaccggtggctgaaggtggcggccttgattcccggcaagacggtcggcgatgtgatcaaacagtatagggaacttgaagaagatgtgagtgtcattgaatcagggtttattccacttccagggtacactgctgctgattcctttacattggagtgggtcaacaatcaaggatttgatgggctcaggcagttttatggtgttactggcaaaaggggtgcttccactagaccatctgagcaggagaggaagaaaggtgtgccatggactaaagaggagcacaggcaatttctgatgggtcttgaagaagtatggaaaaagagactggtgaaacatctcttgcaattttgtgaccacaagaacacc

SEQ ID NO: 21754 - DNA, 702 bp, Glycine max
cgaaactctgcggaattgggctgcggaaaaaaaacgttttgggattgaagaacattgatgtatacgcttttggtgtttacgctactgatgaggacataaagagacatctttctgagaaatatgggaagttgtctgcgtctgaattgcagggcagtaaggagtttactgaagatcttatggaaagtgatatttccatgacaattagacttcaaattgtgtatgggagattgagcattcgttctgtacgtagtgcatttgaagagtctgtgggaagcaggctgcaaaagtttgggggatcggataataaggaattgcttcaaagcttcacttcacaatttaaagatgaattcaaaattccccgtggatctgtaattcatctctcaagagacaagggccatgttctccgtacatcaattgatggacaggaagtgggaagcatccagagtaaactcctatgtaagtcaattctagatttatattttggtgaggaaccatttgacaaacaggccaaagaagaaattgagctcaacatggcttcttacctgtagagttataatgttaaactaagaatcttctctaagacatgaattctgtgcgggggtcaattccgtgcttcgagtaatttttgtttgctgaatcattattattaatttaaacatgttgatgtataccttgagcttcaagattgcaatatgaaattag

SEQ ID NO: 21755 - DNA, 540 bp, Glycine max
caaattgtaagtttgggaaaggcagcgggagtggaagatatttatggtgagtctgagggcttggaggcagagaagagatagagatggaaatagagaggctaagaagaaatgcagaggcgctggttgagaagaccatgaaagggaacgatgcttctcatgatgctgctcatgtttggagagttcgtgatcttgctctctcccttgccaaagaggaaggcctctcttccaatccccactccatggaaattgttgagcttgctgcgcttctccatgacatagctgactacaaatacctcagggacccatctgaggaaaaaattgttgagaattttctcgatgaagagggagttcaggaggacaacaagttcaaaattttgaagatcatcaaaggaatgggtttcaaggaagaagtgtcaggaagtggaaatagtgaagggtttccagaatttggagttgtgcaagatgctgatcgacttgatgctattggtgctataggaattgcacgttgtttcacctttggtgggagtaggaagaggttgc

SEQ ID NO: 21756 - DNA, 672 bp, Glycine max
ccacagtgccttcagctgctataaggattttctttctgtagacttcccgtttgactcatatacgcaagttttcatagagccagagatggcagtgtcatcattgagtttgggagcctctatgagtatatttagttcccaagttttgtttgatgagaaggttattgaccagactattgatacaagggttaaacttgcatatgctctcgcaagacagtggtttggtgtgtacatcactcctgaggcaccaaatgatgagtggctcttggatggacttgctggtttcttgacagatttttttattaagaaacatttgggaaactatgaggcacggtacaggagatacaaggcaaattgtgctgtttgcaaagttgataatggtggagcgacagctttgagctgttcagcttcctgtaaagatttatatggaactcagtgcattggtttgtatggaaaaataagatcatggaagtctgtggcagctcttcagatgttggaaaaacaaatgggtcctgaatcttttcgtagaattttgcaaactatagtttctcgtgctcaagataatactcgttccataaagactcctagtactaaggacgtttcgacattttgctaacaaagttgggaatcctgaacgcccaattcctaaaaaattccttcctccgtggggtgggt

SEQ ID NO: 21757 - DNA, 790 bp, Glycine max
tttcaaacattaagcatggtgtaatgttctcatcatctggagattcttacattatcactggctcaattttcacaattttcttactgggcatttgtgcatgcagtttcctttcaaacagttctatcttggtggaagggaaagtagcaaattttcttttgagcacatctggaattgtgacattacgccaatcagttatccaggggaagctgctaatagaaagcattgggttccttattttgagcactttgtgccgatttgcaattgaagttgggctgtccaagcaggctgccacatctagctttcatgaaagactttacctcatggatcatcaacatagcctcaggtttacctgtatgggactatgcagctgaagttataccaatggtagttctgattctgctggcagcttggctttacaaggcctctcagtggcagcttgtttgattggccatggaagtatgtcatactgggcactatcttgagttatatgctaataattgtgcattggatcacagacagtgatagatttggtggcacattgatgtctcaaaacattggaagaacttatatacctagaatcatttatgctattgctttgggacagttgttattattgacatttggccaattatttaagaatagcagtttagattgcaagacaattttagttgcaaaaacaatggccatattatctgcgtggagttcaactgtcattcttctttcaggaaaacaggttcccatggttgcttttgcatccatagattgaggttttttaattatgtagtttgtt

SEQ ID NO: 21758 - DNA, 776 bp, Glycine max
accatgcttcagcttacgaagactattatttttctacacctcaccaagaccttcacgctcctggaccttcccatgattaccagtgctgctccaccttcccaagattaccatccttcacctgctagatcagaaagttgttatcccgagccctacaaccatcagcaatactcaccagagaattcacagcatttaggtcctaattacccttctcatgaaacttcctctttttcttatccccattttcagtcttatccaagttttacagaaagcagccttccatcagtcccatcaaactatactcattatcaaggatcagatgtttcatattcttcccagtcggctccgctaactacaaaccattcatcaagtgctcaacacagttcaggcagcagaaatggaactgtcgtggaacctaagccaacaactactcaggcataccagtacgacagtaactaccagccagcacctgaaaaaatagcagaggcacacaaggctgcaagatttgccgttggggcactggcatttgatgatgtctcagttgcagtagacttcttgaagaaatcacttgagttgctgacaaatccatcagctggccagtaaaattttttgtaaatcgaaatgtggatttcggtggtgttttctaccttttatttgcatgtcttgttttgtatattaggtacatcatgcatttaaagtgtgaaaaaatttgggaagatgaacggaaattataaaatctgctgggatctgcaatctttcttgttaaaaaaaaaaaaaaa

SEQ ID NO: 21759 - DNA, 481 bp, Glycine max
aaaatccagaaagaaccaggagaggaaagtctttcagtctttctagttccaccaacaacaagaacgaaccaatactaataataatattattattattctcacgggtaaatacataaataaaatggtgcgtgcatagtaataggctaatagggtagtagtttcttcatgttgggtagttggaactccttaagcagcttcagagtctgagaagtgagaagcggaagaagaagcgatgcgtttttgcccgtgttttggatccgaggaggccaagggggtggcggatcgcgacccggtcctgctggtttcgggcatgggcggctccattgtcaattccaagcccaagaaattcgggttcaccactcgggtttgggtcagactcctcctcgctgacgtcgagttccgaaacaagatttggtccctttacaatccccaaacaggtttcactgaaacgttggacaagaagtctgaaattgtggtccct

SEQ ID NO: 21760 - DNA, 404 bp, Glycine max
tgcgtgcatagtaataggctaatagggtagtagtttcttcatgttgggtagttggagctccttaagcagcttcagagtctgtgaagtgggaagcggatgaagaagcgatgcgtttttgcccgtgttttggatccgaggaggccaagggggtggcggatcgcgacccggtcctgctggtttcgggcatgggcggctccattgtcaattccaagcccaagaaattcgggttcaccactcgggtttgggtcagactcctcctcgctgacgtcgagttccgaaacaagatttggtccctttacaatccccaaacaggtccttgcttgacacttctgttactactaccacaccaccctatgcatttcaatttttcagttcaatcatcattctctagcaaaattggcacg

SEQ ID NO: 21761 - DNA, 418 bp, Glycine max
aatcaaaccaggcattgctttacccgatacgttgaatatcatcgatgcgtagctgccaagggagaaggtgcaccagaatgtgacaagtttgccaaatattatcgttctctttgccctggtgaatggattgacagatggaacgagcaaagggagaatggaacattcccaggcccgctgtaggtggtgtgcataactgaaatggctgcacaattcgtttttcagtattatatttcaaattgctagagataaactcccatacatttggggaatgtacgcattggcctaataagaaattttggatatatgtttgaactaagcttgagttatacaattttcaggaaacgcacctggtgaaatgtccagagatatatgccataatttaactggattctttaagctgagggttctttggtattcc

SEQ ID NO: 21762 - DNA, 496 bp, Glycine max
cccacgcgtccggccactcgttcgtccactctttcgtccacgcgttcgaaagaaagagccagcgtaaccgtaatcgcactgttagtaatatcaattctatagtttgttactgacgctgcacccaccgctaaactaaacttccccaatcaccatgggagattctaaacatatttccgttcaccgtcttctcggcgaaggcttaattgctgatgtggtgctgtggaagaattggcgcggagcggttgcggtgcttgtatctgccaccgcattgtggtacctcttcgagcgagccggttacaatttcttgtccttcgtcgccaatgtagtgttgcttcttgttgttattctctttttctgggccaaagctgctaaccttctcaatagacctcttcctcctctccccgatctggccatctcggaggaaactattgccagggttgctgatgcactgcatatttggttgaatcgagccttgtctgttgcacatgacatagcg

SEQ ID NO: 21763 - DNA, 606 bp, Glycine max
ggaaggataattagagccagtcgtttatacatagggtcaacgcccttgttttgtaacatttgtttttactggatacacacaataaacaaagaaaacaagcatctctcctcgctcttcttctcaatctcacctctctttttttcttcaattctcacaattaaaaaaaaaaatacacaaccttctaaatgtccaactaaataatgttaataatagtgttggctgacatcaacaaaagcctcaatcagctccaggcaaaaggcatgtttggttgggcttggaatagtggctgtgcagttaaaaaaaaaaaagcaataatctcacaacaaagtccaagaaaaagcaactgggctcctaacttggtgttgcgcattgctgccacataatgcttccaaatccatacctaacggaatccccgacaccattcttggacacaaaggttgccgtgtacctttgcctttcccctacttttccaaacacgagcgcggcgggcttcaccgttaccgtcaccgtggaaggtgcatccacggtgacgttatagacggagcctgcctcgcccacgttggtcaggactcgtgtgtacctcacgaccctcttaccgccaaagag

SEQ ID NO: 21764 - DNA, 655 bp, Glycine max
cgaaagaacttatgtaacatgcattaactaaggggtaatacactgattacctttgtacatttggtaccctttttaccatgttctatgggcatgaacacaagttcaattcaccaaatcttcagaaattcatgctaggtacccacaaatatcagtgacatccatttggcaactgtgcctataatcctagcttccacggtaagtgctgaatgagaatggtgaaagcaggagaggaacatggaaatgttcccttttttgtgactccttgatttcaaacactagagacacataaggaaagaaaccatttgggatgtacttcccagtgttgaaacttatcctgtatatccctggattcacatcatcaactatgctcaacagttgaccactacgaccatctaaatcggtcgttgaagacccttggaacacccaactgccaccgcctgaggccccaaatgtcggtcgagactgagtgcccctccacacctccagaagtacctcgataccagcagctggagagccctgagaaacatccaacacatgagtcgtaatgggagggcgggttctggcaggatggtgaatcaattttgctgttgaaatctctgaagcagcagtcacgtgaccaccaataatgcttatacgatcttcttctgccttttta

SEQ ID NO: 21765 - DNA, 456 bp, Glycine max
gaatgaaaaagaaccattttgtactatgataaaaatcaaatatacataactaattttttcttttgtttcttttctccccttggatctaaaagattaattcatacaacagagtttaaatgacctgcattacacgcttcccttacctctcccactttctactcctatcccccaagttcaaaagaatgctcaaatgcaggtaacttgcacaattattttttgaacaagctagccagttcacctttctcatacatggaggtcaatatatcacaacccccaaccagttcaccatccacaaaaatctgagggaatgtcggccaattgctgtattttttaagtgtttccctcaatccgtagttatactcttcatccagcacatttacactctcataatctactccttcattttcaagaatggctattactctctgtgagaatccacataatggtgcacttcta

SEQ ID NO: 21766 - DNA, 840 bp, Glycine max
agcaagtagctaacacccaagatctatggcgcgcgaaatttttctacagccagtttcataggatgatagcaaattcaatggttatggcctaattaaaaacaacttgaactatgataataatgatacaagtcaatgcagagggtagtttggtcatctaaaaaacggttgcatgtttcccttttctagtacaaggagcattaaagtcttcctacacattttgcaaagtcacactcatttttaggaaagctccaaaagcactaaagcataaatgagtgacttctagatgcttttcttactcactaattaatccatagaggcagtggcagaaacgtaatatgcaatacagaataggccatgaacaaaacaccagattccaccaatggacaggaagtgatggtgtgagaaaccacaggaaccatctgacctattgtttgacatggtccctatcaccagcatggacaatccaatggccagcacaacccaagttaaaataaggcaagcagttgagagttgcctattggaggaagccttctcaaactcttgttgagaacaaatgcaattgcagccaccaagcaaattggctatagcatgggctagtcccaaaagcactgctgcacccaaccctaacatgaaggcttgatgacttggctctctacactcaaatatccacaatcttaagtgcttaaccttgttttgtgctatttcagcctcgaagccaagaatcccagctgcaacatccatgactaaaatcaggaggcacagaaaaatgcctgctactctagccatttgttggagaagttttcttctgtccaagttgtttaagatcagaaacagtggggc

SEQ ID NO: 21767 - DNA, 179 bp, Glycine max
gacgcaaagctcatgtgtgcgtgccgtgtttaatggatcactaacttggagctgaaaaagcatgcaatgccacatgctcatttctttaaatgcgtgttacataacaacgggtttgcacttgagctagatttatgaagaatccccctgcattgatccatcccattgctcactgaacagaa

SEQ ID NO: 21768 - DNA, 414 bp, Glycine max
cgtacgtaagctggaacccaaagagcggccgtttttttttttttttttttttttttttttgggcaaaaggaatgtattacctgagaaaaaggggtgctaccgctcctattgtacaaaattgcatgggcaaataagagcatgcaacccaactagcatataacatcgccttcttatctaccgctaatttttaaaataaacaatgcatattctgacgtacataagtttatagcaaaaccactccccatagtagaagtactatcaccattagaaggcttctaattcccaattcaccactatggagattggaggcagaagaaactgaatttgtggaattcagtgatgataacgtgacgttggggaagctgccattgattccaagacttcctggaaatacacaggatccatgacttggat

SEQ ID NO: 21769 - DNA, 922 bp, Glycine max
tccataatgatggttagctctctaataaaagagcccaaataaaatcaatgtatcatcatcactcttccctcattgttctggcccttggtttcaatcaatgattgagccagcaatagagaagaggatcacttcccatcattgacgctgcttgccggtattcaagggagaagccctcatgctcttggattgtgtgtatgtgaactgtggagttccatctttcttcttccgtctaccttgttgagacaagcgagagtgataagacaagattgcaaggtcattaagatcctgcaatggagtcagagccttcacaacttcatccacgttaggacgggatttggggtctctagtaaggcaattataagctaactgggaaatcttctgcactccttttagagaataatttagttcaaggcgaggatccacgagttggaacagttttcgcttgtcagctaagtatggcctagcccatgtaacaagattttgttccccactcgggcgcttcttgtccattgatcttcttcctgttaatatctcaagtaacacaactccaaagctataaacatcacttttagctgtcaagtgtcctgtcatgacatattctggagcagcataaccataagttccaactaccctggtagaaacatgtgttttgtctccttgaggcccgtatcaagcaagatgttagatgttttaaaatctctataaatgactggttcgggaccattatggaggaaggccaatccttttgctgcaccaagggcaatcttaatcctgttggaccacggaagaggtacagttcttctgaatagatgattttctagacttccacggttcataaactcgtaaacgaagaagcctctgatcatctctcgagccgctcgagccgctcgagccgctcgagccgctcgagccgctcgagcag

SEQ ID NO: 21770 - DNA, 451 bp, Glycine max
aggcaactaaagttgcggggggttattgccactgaaacgcaattgattgaggtttactgcaaaagactttctgagatgtgaggcctttcatatacatataggggaattctcaaatacagcattagcaaatgcaaatggcaagtttctttcatattgatggctagctctctaataaaagagcccaaataaaatcaatgtatcatcactcttccctcattgttctggccctgacatattttaaacactcaaaaattatgtaagcttgaaatgtccatctccacacaacaacaacaacaacaacaacatcaaaggaggcattccaatttccaaccttggtttcaatcaatgattgagccagcaataaagaagaggatcacttcccatcatcgatgctgcttgccagtattcaagggagaagccctcatgctcttggattgtgtgtatgtgatct

SEQ ID NO: 21771 - DNA, 514 bp, Glycine max
ggcatgtccaaaataaggatgaagtttcagatcatttttcagggcaacatttaaatcatctggtggagtttgttcatttccacccacccagagggcgagactaggatgatttctgagaagcttgactgtgtctcttgcacaaaacaagaaaaggtcatggtccagtggaccatttggatttgatactgggataccccgtccatcaacatccccagtaatccagaactcttgccataccaaaagaccataataatcacaacagcgataaaactcgggcctttcagcgagtccaccaccccagcatcgaatcatgttaaaattcatatccgcatgaaacttgatatctgtttcgtatcgcttctttgaaagtcgcagtagcccatcagacaatatccagttaccccctcgtataaaaattggttctccattgactttgaacaatcttccaccagtagcaacatcaatatggctttcaattttgcggaatccaaagtgatggttccatgaatcagac

SEQ ID NO: 21772 - DNA, 606 bp, Glycine max
aaaggtaatgtgcatttgtaatagatagcgacagtagagaatgccaaatggaagagaaacaaagagattgaacccagattactgataaattcaatccatataaataaaatgtacgctagggaaatctcaaatacatatttttttcacataaacaatcactaacagactactcgttcttcaatgctgctcaagaaaaactcttatacaacgaaaagtgatacataatgtaagggtaaacttccttacgtcttccatgttaatcatatggaatttggatatatgctgcatcacagatgaaaggaatgtcagcatacataccaacaagagcgcaccttatgctctccaagacagtaaagagataaccaaatgatacggcagtccagaaatgcattcccagtttaccccagtagagtgatagtggcatccaacggctcacagtccctataacctgcagggcaatctccaataacattcccatcacaacatgaaatctgaagaaatgaggccactcttttctcctcacgattccaagatatgcaacaaagaagtatgccataagaaaccagctaggcaggctcccaaataccataagaaaagggtacgtat

SEQ ID NO: 21773 - DNA, 495 bp, Glycine max
  unsure (1)..(495): unsure at all n locations
cgaagctnggatcctctagagcggccgctgnnnnnnnttttttttttttttttttttgggcccgagagtcaggaaggcaagattgaaaattgaagaaccaaaagccaaacagaaagcgaattcttttttaaaacaaaagaaaggaagcaagaaacagaaagcagctgagcttcatccacaaactacaagctgattcgcgaaagcatagataaatatttattattgagaagggtagaaaaggcaacaaaatgtttgttgtctgaaatgtgttttaccgtttaagcgaccaaataaaatagtccaggtggacttcaatgagcctccacaaacgtgccatggaagccatagggcactcttgaaggcagcatgacagtggcctccaacttcaaatcaagtgcattcagaatctgcaactcggactgccacgtcatctcgtcatgcacaaaagccatcacgtacccttcatcctcattcccattccctccacgtgttggc

SEQ ID NO: 21774 - DNA, 530 bp, Glycine max
acttaacaaaaaaaaaaacctttagcttttcacgtagtcgaaattcatacatcatttcatctgttttccatctaaatacccttcaacattggtgacatacaataaatgctcgacaacaaaatatgaaacattcataggtgaactttatcaaatgtatcgcttcatcctcgcaacaagttaaactcgccgctttttccatttttcttcctcccttgcagaacattacaattgaagcagaaaattaaaacattgatgctatggatgttacaaggttctatcactaaattgacaattccaaatagaataaaaacaatggcaactgaatccatctaactcagcgcaaacgacaaagtcacaaaccagattacttgccactcttgatagcagattttgggccaaacctcaacgttgttgttgctatatctgatgattaccagattcactgccattttgtgcaacactctgttcttgataatcatcattgctttttgtattgttcttgttactagtttccccttgttccttctccc

SEQ ID NO: 21775 - DNA, 669 bp, Glycine max
gaaaagaagattaacgtgaaattggggtgaactagttggagatacacaggatgctgaacagattaaagcacttaaaaaaagtcacgaatcacagcatttgtcaaacttctgcgagtccttttcaccgctctgctttccaattgcttttagaagcgcttcagggatgtctcttacttccagcgtttggtcctcagccacagcaatggcttccagagaaaaaccattttcacatgaaaccctcgcttggtggacatccaggcccatctcatcaaatgcctctaatatagccaccagattgtcacctcctttctcgcacgtgaccctcaccataaaagttcctgcccctaccttctctattttcacatccttgttctctttgacatggttcgataggctaatgaactctcttctggtggctaacaggttttcatactgtcttttgacagtttccagtgcgagctttagtttgtataagcgtagaacggtactcttgacaagggaggttctcttggcagagtttgagcaggtaagtactcgcacaatgcgaagttttctgcgcagtgaaatccttttctgcaccctgcaagccatctcctctgtatagcagtatttttcctataactttatcttcctctctagtgaatgtgaatgttatatttgtgatttgtc

SEQ ID NO: 21776 - DNA, 210 bp, Glycine max
taggtcatgatttgatttttttattttgcttttctttggggaaaacacagattgactattttttttaagatgtgataactcatgcaacctcatcctgtttgatttagtcacttgacaattttggagtgatggcaatggagccgtttgacatttaatcaatcaaccgaaatatcccttttgtcgtcttcttacaaccctcaaacaccttgg

SEQ ID NO: 21777 - DNA, 515 bp, Glycine max
aaactaggattagagtctgtcaaacagaatacgagcataacaatgtacaaaaaagctgactaaacaacgtgtgaaaactgaagtccacaatcttcattttcagcatgaggaatgcttcccaaaaaagtacttctacccacacacacttttgaacaatttcttgttgcccataataggaaatatgttaaaaagagtgtatgaatagcattcctcttttgagcatagtcactagcttgaacatcaagttagttagaatctccaggcttaggatgattaaggggtgaaggttttgggataatatatggattaagaggggttccatgctcaataggtcctggatttatagacgcctttgatgaacttggcactggatcaatgggattgtaatcatccagagtcacttgacctatatcatccttattgtaagagctgcttttgatagtaccactgccattttccttaagtttcctgcttactgcaatcgatgtggctttatcatcacagttggtagcaat

SEQ ID NO: 21778 - DNA, 753 bp, Glycine max
aaggtcacaaggagtttgctgttgctcctacgggtgtggagtaatcgagtgtgctacagataaaatgaatttttaattattatcttcccttgagaacataaattatgtttgttatatttttgtttatttagggggaaaagaaagcaatatttttagaaaatagaagaaattttatgtttttttttaattttttaggtcaacaaggtgtttgctgttgctcctacgtatgctgagatgcaatgagaaaatgagacttacgtagttttttttataaaaaaagagcttgtgtgtcgaggcaattattttattattattattattattattattattatttgggaaagattttgattttgtggtaaactttgtgaattcaagcaagtcgaagaccaagcatgacattcacaaaatttactcacactttattgaaacactgccaagcaagtcagagacccatcatggagtctgtgaaacgtgaaaagggagaattaagtgttcatttatgtgagaattttactccttttagaaaagactttagttttggggtagattttataaaatcaagcaagtcggagacccaacatggagtaaaaagagcataagcgtgtactaaagaatgctaatgcggattttcaaaaataaataaataattgaagtagtgctaggaaatcaaataaataaaatgagaataaagatgaatagaatagaagtggaaagtaaacttagtaattaagaatgcaggattgaaacatg

SEQ ID NO: 21779 - DNA, 519 bp, Glycine max
caggtaaaaacaaaagcatcatcatttcataagatgaagaacttgtttaacaaatattgaaaacatacattatttctccaagttaaaaagaatacatagtgtaaaacaaaatccttgctcgtatatatacataaactcaatgaacaaataaataaagaattaaaacacatatcctttctctagtaattaaagtaaatgaataaaaataatctccttccttaacacacacacacacacactcagaatcaattctctttactcagtttcttgggccttagctccatcatcatcccctgaagctaagtctggtttaatctcctccaattgctgtagaacttgatgaacttcaggcctagcagcaggagaaggatccacacaatgcaatgctaacttcaatgtgttaagcaattcatctcctatggctggcgcatccctcatgagctccaaatcaaacacttcattagtccactcttccttcactatggatgccacccattgtggcaagtccatgccattggt

SEQ ID NO: 21780 - DNA, 540 bp, Glycine max
caagtcactggtttacttggtgaccacgtttacaatagatgtcactagtagtttcttcttccctatgccatgacagaatacaatttgtaatagaaataaactcgattttaacagctacactatgactagaagttttttgttctttatctttctcatttttttgctactatatttgttttattggctttgtaccaatagcttgtacagtgaaaaaacacgatgcactgattcttctcctttcatttgttacagaaaatttgatacacaataaaaatacaatggactacaaaaatacatgatacaggtggactcgtcatttaaatttaaacataataaatttaaacataatagactacctctgtgctctcccaaaacatatatctatctgaaggaaaactgaatttcttccaatgttcttcctttggtctaaggaacccacattgttttaaaagctttagtaaaggcagctccaacggggtaaatggtaaatgcccctccactgttccaattcaaaagcaagttagcagtcttggggttccc

SEQ ID NO: 21781 - DNA, 386 bp, Glycine max
aaaacagaaactatagaagtttcattttataacatataacagaagtggatattaaataaacatgctatcctagcgcgacgtccaaatataaacctggcctccacttgtagctcctgctagcatcccaacctcgtaagagtgtgtatcaaatctgcaaggaatggcagacatgtgctggctctctagagtcataactattttcctttcaactgatgagacaacatcaactcctcttttcatgtttccaacaaagagatatgagtcatcccaaccccattttgctctgaaagtagaaagccatctgccagtcagattgttatgattaataacagctgcatcctccaagttaactccactgtaaataccaattgtgttgtccaagcttg

SEQ ID NO: 21782 - DNA, 266 bp, Glycine max
ctggaaaaccagtcttttcgctaagcgcaagcctcgcgctaagcgcattttttgtcatgcgctaagcggagagtctctagcgcttagtgctgaacccttgcatcacaggttgatttggtccgctaagctggccaaggctgagctaagcccatttcaattcgatctgaattcggctaagcgatggcctgctcgctaagcgcaacacgttgctgctaagcctaattctttgcggcctaaactggggttcattgagctacgcgctactc

SEQ ID NO: 21783 - DNA, 345 bp, Glycine max
aggtaaactaacagtcatcgccaggggttaatcaattctgtcagcaaggaattaatatatgtctattccactaaaaatccccaaaagtatagttaccgcctgccaacaaggccaagattaacaccatgcaagatacaacaattcttatatacaaaccttgatacgctaaagaattcaggggcatttttcatccttcaagagacctggaaatgaaagcagcaatagccagcacagcaacatcttcaacttcatcttgggtggaattgtttgcttgcaggtgcttcttaccaatcttgaaagagtggtcaccaccatcgatgacatgcagctcattgggtgctttca

SEQ ID NO: 21784 - DNA, 392 bp, Glycine max
gcacaaagaaaacaaccattttaaggatttaatactaaatcaaatcattacatcacctttctccagattagaaatgcatttgcaaatgacatcgtattgatgtaaaataaatactgcaatatgtgtgctcccccaatcacgtcccgcatcaaatgggcaaaagacttaaccaagaactcaaaatgtgttaggctaacgtcaattcccttattgatgtctctccaaaaacttctctattacgactgagaatgccgcaaagccagcacaaccagcacacgctgcttttgggccaccttttgctgatattgcacctccagttgcacatccagcaacaacggtatttgttatgtcatgttttgctcgagcgttctcaacaacacactcggcagctg

SEQ ID NO: 21785 - DNA, 491 bp, Glycine max
ccgttactaaatagaaagacacattattataaagagaaggaaacttacaataatgtttaattacttaagagactaagttcaacacagtaatttaatgcaatcacaagaatagcaatcatttcaccacatctagaatagggcgcgcaacacatgcatacatattataataataatatatattaaagatgggtgagatgctgaggtcaattttcaggagagtcttcccatccagttggtatgattaggaaatttgatcaacctcatttttcactgatttaggtcaagcacacaaaaaaccagttgataatgataaacttccgtttatatatatgtaatcagtaaaatccgttagacttttgagtaccatcaccctgggccaactttgcttgcttattgccgtctagctttaacccgaagtgaatgtgaaggaaatgtgcccagtttttggctgctgtgctaaatgcttccctgtggctgatatctggattact

SEQ ID NO: 21786 - DNA, 427 bp, Glycine max
ccgatgacagcacaaaaggctcgtaatgttactcaaatccagacaaaaacaggcacacggaacaacgctcagcaacagaacgtaatgggccaactacagcaagaccctttattggaaataaaagacacaagtaaagaaactgaaatgaaagactattcgtgcagattactcttcctctgtttctgattccgcactttgaagccattcaatcaaaggtttggccttcttccatatctgagagtccttgttgtcgccattcagcccttcttgataccactgcacgatgtgctcttcctccaacagatcagcatcatacagtgccttcaaaacaatggcaatttccttcaaagcattggaagtggactttagacagaaagcctcaattgcacgaagcattagcaaatgtgatccctcccccatggaaact

SEQ ID NO: 21787 - DNA, 133 bp, Glycine max
ttaggtcaatattggcctagtcaaggtcttaattatcatagagctaaaactcattaccaagagttgatggattccttcttaattaatcattaattctacaaaatcatattcaacattcattcaactagtatac

SEQ ID NO: 21788 - DNA, 583 bp, Glycine max
gatttaaatgcgaattgaatttgtagcatgaggggccactgtgatggcgtggcgagatgatagatagatacaatatctcccgtactgcagaggaacccaacttgaacactttcttgagcaagcaaacacctgtttctgctcttgttctggctgcatcaacattcattcataatctcactctccctttctctctcacgtgttatcgttatctctcattcacaatcacaactcaccactcataactacttcttccaagccaagctgcaaaattcaactttttccccttccacttctgcatgaactacctttcaaactagacagtcagagatctaatggagtacgagaggatagagaaagctggaataatttcccccagtaaactgaggatgaagttattaggacctctccatcataggaagaaagatggatccaacagtaactcatccagaacttccccttcaaggattgaggatgctgaatttgtgaatagcttacttggctcaaaaaatgacaaccttgatgatgaagttacatctccaagcttggatgttctgtcattaaagccgtcgagtgatgctgtgct

SEQ ID NO: 21789 - DNA, 362 bp, Glycine max
gttgtatcgagtaccctagcgtccccgattacattgttctacttgcagccaccctgcgaccgttcttccctctcgtcttatctcaccttcaacgagtttcaatcattagctctagcatatcctggatttgagctttaccaatggctgatgactctgctaaaggaattgaaaatgcttctttgaactcaacacaactagagaaccctcagattgagcccataagactgccctcagtagaggaaatccgtggtcaagacatttggaacaattgtgcagtgcgcagtgttgtcagtggagtcatgggtggtgggcttggcatcttcatgggtttatttcttggagcactggacaacccattgatg

SEQ ID NO: 21790 - DNA, 390 bp, Glycine max
attatattctacttccagacaccccctgtgccgccttcccacctctcacgccgaacctctaccgttctgcaatctcgtcttactcaccctcaacgagcatcaagcattagctctgctttaccaatggctgatgactctgctaaaggaattgaaaatgcttctttgaactcaacacgactagagaaccctcagattgagcccataagactgccctcggtagaggaaatccgtggtcaagacatttggaacaattgtgcagtgcgcagtgttgtcagtggagtcatgggtggcgggcttggcatcttcatgggtttatttcttggagcactggacaacccattgatgcaagaggaaatgaccggcagacaacagcttatatatcaagcaaaa

SEQ ID NO: 21791 - DNA, 501 bp, Glycine max
gcatcaaaaaacgcttgatattaacattggtcacaatttggtatatatttcccagccccaaaacatcaaggatcaccacaactccgcaaaaacagttaaaatccttgatttacatttataatcggtcacgctaattcacactaagtacgaaatttagccacaagaatgtagatataaattacaagagcaaatgcttccgtagatttaaaaaactgacgaaaaaaccccagattttgatataagcctaaggtttcttcttccaatttattagaaaacacaaaaagcagaccgaaatgcaacttcaataatttggttacaaaaactaaacacacatattaggcaaaagaaaatacgataaataattgcataaagcaagaacagggaaccatcagaaaccagaattttatccccaaatgctataaaagcagtacggtccgcatcatggttagggttaagaaacccccatcacatggcccttctgtcgtctcggacgcgtgggtc

SEQ ID NO: 21792 - DNA, 532 bp, Glycine max
  unsure (1)..(532): unsure at all n locations
gctcttaaagaagctcattgctgaagagaaactcaaaagcatggggtcttctagttatttcttcacttccttgcttctggttgtagtgttcaatctggctaaagggcagcctctggtccctgccctgttcatatttggggactctgtggttgatgtgggaaataataaccacttatacaccgttgttaaagcaaacttccctccttatggaagagacttcaagaatcacaatccaacagggaggttttgcaatggaaagcttgcatcagactacacagctgaaaaccttggatttacctcttacccaccagcttacctcaacttaagggccaaaggaaataacctcttgaatggtgccaactttgcctctgctgcttcaggctactatgatcccacagccaagttatatcatgcaattccattgagccaacagctggaacactacaaagagtgccagaatatatttgtgggaacagtanggcagcctaatgcttcatcaattatatctggtgctatatatctcatcagtgct

SEQ ID NO: 21793 - DNA, 488 bp, Glycine max
gctcaataagagccctagagaattttattagttattaccattattaaatcaagatttcctagccttggataaagttaccaccaaaagtttaactacaatagctagtcatgtttgaaattaccctttgcatttacatcagtaaataaactagcaagtgaatcccccatgtcatcctttgtttggttacttcaatttaagatttgtgtcacgttagtgtaagattcttgattgagacaaatgccaccttcttcgacaagaatgaagtttatcattggtagtagacggcgataatgcatgcaaaccaacctctggtaaagatttgttgatggaggctttcgtgatgccttgattttctccttcatcattacacatagtctccttatcatcatttggtgatgagccaatcaacaaaccagtactcttatcattgatatgacagggatcttttttggcagcaacatctgctactctctttgggactaaccgat

SEQ ID NO: 21794 - DNA, 180 bp, Glycine max
tgggttgacataaagcattccttatcttcactaactccagcttcaaaaggatgaatacattcattaaaaaaaaaaacattacatatacatagaagataaatcaactatgaaacttacaagggaatgataacatccaatttctaaaattctagaaattctatttattatattttataaata

SEQ ID NO: 21795 - DNA, 608 bp, Glycine max
ggaacttggcatttttcggggcacccacataaaaatattttgcatgtgtttgcctgagggagagagaggcatggcactagaagcagtagtgtatccccaaccacaggacccgtttggccatggaatcaaagacccttcttacaactacaacaacttgttagaaggtggtggaggcaattggggctatgcagatttcaaccttgaaaaagaagaccgaacttgtgtcccttttcttgcgaaccaaacagagaattatccttatggagaatggaactgttctccttctccaccatccatgttgcctcaattgaatattgcatcaaatcctcaatcttcagaaaccagcaacacacagaacaacttagatagttcagtttccacccctgctcgtcccaaaaggcgcaggaccaaaagcagaaagaataaggaagagattgagaaccagagaatgactcacattgctgtagagcgcaacagaaggaagcaaatgaacgagtatctctctgttcttcgctctctaatgcctgaatcttacgtccaaaggggtgatcaagcatctataattgggggtgctatcaactttgttaaggagctggagcagaggctgc

SEQ ID NO: 21796 - DNA, 481 bp, Glycine max
  unsure (1)..(481): unsure at all n locations
aggcaagttccacaaaattcaatagtttatcgggcgggggaacacctcccaacaatacanaggtcccagatggatgatgagaaaaagcaaacgcatcacgtgcatggaacattttttttatctcaaacaaaaattataacactctcccggttgttgttccattaaccatcaactttgctgaacgaatttgaaatgatgaaacatcttaatcgtctgacagattattgccaacagtaatctttgttcaagtgaaaatgaaactcgaggcagagctagttgacaacatcaagaaccagcttgcgagactttagaactgaccacctcaagcggcggtaataggcagcctgaagtagtgccaatgacagtacaaatatccatttaaatcccatcagttttctctcttccatctcgggttcggcggcccaagttaagaatgactcaacatccttccccatctgagcttctgtagcaggagtacctt

SEQ ID NO: 21797 - DNA, 114 bp, Glycine max
gggacaaaaattctataatagattctattgtaaatgctactgataggtccatgttatggcattctaggctaggccatacctcaaataaagttttgcaacagctatgttctcaat

SEQ ID NO: 21798 - DNA, 234 bp, Glycine max
acccgtcccgaaaataaaccccgggggacggggctcataattcgggcgcccctttttttttcttttttcattttttttttttttttgccaaatttccctattttaattttttcactttacattacaaaagggtgggtacacagacctacaagcagaatccctttttagcccacataattaacaaccccataatacacttccggaaattttacaaatcaaacaccccatctccct

SEQ ID NO: 21799 - DNA, 603 bp, Glycine max
ggccaaataagacaataggtcaccaataaagccaagtccagcctagctcattttcatcctaggtagtcacacatgccctttattataaaattaaatcacgaggatatataattatgatccggaatggttatgaaatgcacgtggaatgacgaacaagtgcaaatctacaaagcctttaaaagtaaagctttctatcacatgaatgaagaatagggatatatgagattcccattggcatcacaagacaaaatttcactctcggaatactcgggatggtggccataattttgttccagcgcattctcgtattcattttttagcccagatcatagcctcttttaggcagtggatttgaaaataagaaatatccctatcgtacgtcacttttaagttcaatatcaataactccgcaacacttccgttgatatctgaaaacaactactcttacattgtgaatatttttcttcctcatccagcattaagactcttcgatctgaagtagcttcaaagattctggaccaacaaggaatatacgtcgtgaggtttgatatctgaaaacgactactcctttatatgctgtcctgggcacaccatccttccact

SEQ ID NO: 21800 - DNA, 491 bp, Glycine max
gtcacgaaaagctaaactgaatatattgttttgaaggcaattattgatgtaacaagagacttaagactgaagagaggttgatttttttctctcaacattacctagtcatggataaggtgatctaataaacatatccaaatggtgttaaaacagcataacaacaattacaagggaccaaatgtgcttgaatcgagatcattaattgaatcaggatgttaatacataagaattcaaggaaagcaaccgaactacaggaggaaataactcgaggaacaacatctgtgagaaatattgaacaattggacagaaaggttgaccgagcatgcactcttatatacccttttattgtcacttcctggttaagcgaaaggcactgttaatctatggagtttaaacatttgagtccttagatttattttcttcagaagatggccggttctctgagtcagattgccggatctcttcgatcattctcactacttcatccatgc

SEQ ID NO: 21801 - DNA, 524 bp, Glycine max
ggaaaggacgaaaaatcagttttcataattttgaactggtttgaatccaggcattcgtagcaaccaacaagataataaaaaaaaaaacccaattgacacagcacttttgtttttgtaaaaaggacaagattaagaacacagattctacttgaaagaaaaatgtttacaatagtcacatgtttgagcctcttgttggacggcacacatgattccttttctgagcatgctcttgactccggtgctgcgtccgacatgcatatccataccagcaatcttctcttgctgattcatctggtggaagaagatgtttgggtatagagaggcgaaaccaatacaggagaaatgacaccaacttgtggtaacaatcctggcatacaaaagttcgagcagtaatcatctcagcatgattcagcatcatccgccttctatcaatttctctgttttcaaactttgctatccactctgatatcacatccggcaatgtcctccccatttgtctaatgcaactatcagtgatattctgt

SEQ ID NO: 21802 - DNA, 697 bp, Glycine max
ggcccccctcccttcccaaaaaagaaaagaaagaagtaccataagaaagttgaccctaatccttattatattatattaaaacaaggaaaaaagcatctcttttgacaaaatttgtaagtgaacactttagttcacaataggaacaaaagcaagagaaagggaggaaaaagaaaaagaaaaaaaaaaagggatgatgaatagatgcatggtttcttcgtcttcaagacattccgctatctataataagatgccatgatataaagcatgagtgccgacgatgtggtgattatcaactcctgactgttgtacaaaagagtaggaataaaaccacctgcaaactcaattatgttcaaaatgaaagtgtatgccaaagatgaaatagctacacatccaaaaaccaaggccagtgatcggagcagtcgttttcccatgcggagtccttcgcctgtgtcttcaccctcttcattatatttgggggttacaggagattcaaaggtttttaacttctcaaaaagcctataaacaaaggcaaaggctaaaaactgcaaaggtttatattcagcactgcgcttgacaaggatccaagctgtaaaaacagcagatattgccaagttgatgcgcatgtcattttgacttgatttagtaaaccttggcccccaaggtataactggaagcttgtccgcatacttgatctcct

SEQ ID NO: 21803 - DNA, 502 bp, Glycine max
gggatagaaatcttgtaattcaactaaccattaaggaaagcattcataccagtccagagataaactagtcactaaagtaaacaaagcaggtcttcagccacaactgttcatatcatgattagaacagaaatataaggaaaaactcaaagggagcatcacatagagtctcgttttcatgaaagatctcaaagttgagcagacgtctcgattgcatcgcctgctgcttcccctccattggccgatgttccttgtgatcttgccatctccataacttctccaggtggtgggtggtcaaacttgcaggttgcaccaaacttgcatgttccagttttcaaataatatgggcagataacagcaccctctcttcttggtaatcctgcaggagtgagtttcactgtagcctgctttgacagtgatggtgctgagcggtcaattgggtgatgatacttgcatctttccccaaatttacactcgccagttttcatataaaaatcacattcaa

SEQ ID NO: 21804 - DNA, 437 bp, Glycine max
caagaaagtttttttcccctccccagcaagttgcatcattcaaagggagaagctaactatccaaggtttctcctgattgaaattaagaatcagacataacaaccgacacggacagtaagcaagcatagctccttgcttaagttacatcaagaagttcactatgtgatgtctatttatgcacacctgtctaatttctttgggacatatccctcatgaactatgttctgcaaaattaacagctaatgcacacaaattggatgtggttagttgttaccatgtcttgcaaggtaactttccataaataacttttcaggcttgcctagtgaagtttccctttcctataatccaataattgctgctctctgtgtttatctgcagcaagtttagaggtttcccaattcagcttcctcactgcctcttcagtttcaatatagttt

SEQ ID NO: 21805 - DNA, 647 bp, Glycine max
ttttaaaattcccacctatatatcattatgtacatattataaattataaaatgcagtgtttactaaaagatgcataacagctagacaatccctgtcaccggcctaataataaaattttggggggatgtctctttgataaatctggcataaaattaaaaaaaaaatccaaagaaaagggcagttcccaatgcaacggtccaatggctttttcttttcaaaatgaccaaaatacaaatggacaaagatgccccagtgagttagcctataggcacagtccccacaacaaggccccttcatttccctccaaaaatttctttttcgctaaggaaataatgaaattgccttccagttcaatcacctgagttgtggggtcagtaagtgcttgcagcaactacctttgctttgttgaagttattattttttttttaaccttggtttggtactgtaagaggtacacttgacactgtaaaacagttttaccaatcctaaaccctgaaactgctgtgaaagcaacatgtggatctgattccacttctgaatagaggaagacttcatcattcacactttccatgtacacatcagaggatctgcaccctttccccacttgaaagattgaagcctgaggctcataggagcccacgcgtaag

SEQ ID NO: 21806 - DNA, 241 bp, Glycine max
ggacaacaccacccaatttgcataatcaactgagccaacagtcaacaagtcaaccacaaagaccatacaaatcgtttacattcacttgaagagaatacgcataatttcaatacttcaatcagaatggcatcattacaataaatctaaaccttgaaagattcagagacggaaaccaaaaagggctaaataaaaacatgtaaaccctaaaaccaaaagggatcacaaaattaagccctttccc

SEQ ID NO: 21807 - DNA, 200 bp, Glycine max
gggggaaagaaagatagtaaagaagaggaccacctaggaattgggattcaaaccctactacctaggtatatttactaatgaatttcccaataagcaattatgagttttgtacacaactaaaacaagtagtatgttactggtaatggaagatgtgaagattcctcgacttatgttgaagtcaatatactttacctaaggca

SEQ ID NO: 21808 - DNA, 744 bp, Glycine max
aaaaactgaagcaagcacgatttttgaattcccttagtgcatgtttacttatacattgcatccacccatatttgggtcattcagaagctgagtattagaacctacgcacacaaaaatactttgattaaatacaaaagaataaagacctcaatactatttgacattttaaactagcagaaatagcaggttttggagtttcctttttctcctctatcaggtaaggtaatgcaaaataatccaaatattttttatttttttaaaaaaagctcacagattgaatcttaggttaattgagggtgatgcctttaataccatttacaaaaagaattcaaaccaagaacaaggagacaaagcataaaacttctatgtgctgggtttatctggcaaacgtttcagatccatttcaacttggtggattgtccattgcatgttctccaatttctgcacaatatcatggtactgccttgcaatgttgtcaaagtgaggatcaacaccctgattctcccgcaggcgggtaaccgctttgttatatgcaatagaagcttcttctggggcctcaacaagatatttccttatcttatgaagggcaggtgttgagtccttagtgtaagtttcgagcaagagaacgtgctctagaacactcaatttcgcactcatggtctcacaccttttacagagccaagtcttctgcatctcatcatatttatgttgatgctccaacttcaaatctttgacaagtttaat

SEQ ID NO: 21809 - DNA, 456 bp, Glycine max
ccagaaagatctggtcaaacacgagacagaatcggttagatctaagttaggtcattccatttccatatattagacaaccccaagtaaagagtttctttttcttttctttttttctttttttaaaaaagctacaaattaatacacagataacagacaatctgttctcaactgattaattctagttataaatcacattcccttttcttctcggaagcttcttcctctcctgtagtcaacctcagcatcagagcacgataaccccatctgatatttcctgcagattctggaagattccatttttgagaatatatcctcatcatcttcgagagtacggttctctggtgtacttaatccagagctgttgctacaatgcccttgtgatatatgatcttcatatcctggacatataggggcctgattgtctttttccttgcctactggacctggatctgatct

SEQ ID NO: 21810 - DNA, 357 bp, Glycine max
atgtccctctagagttctcattctctctctctctctcattaagttctctctctctacaatgttctctgtactccagctgtggtatttctgtccctgccaatacccccacctagtcccctctgctcaggctcaacagtcttttcccttctcttccaagctcacaaacacacacacccaagtgcttcattttccccttctttctaggaactttttttattatattaagggtgtttctctcagggtcgcattcggagttagagagcaacaaaaaaataaataaataataatcgcatatttaatttctctctctgttttcttgtgatgtacgtttctcaatgacgagaagttgacagcttc

SEQ ID NO: 21811 - DNA, 286 bp, Glycine max
gctggaaaccccaccttccatggcggtagcatctaacatctttcccatctcctttttactttttctgccgcgcttttttctcacgccttcttcaacataggaagaacctcctgccccatttccagcagagttggtcattttggtctcacactcagtatcgaaatccaaagattgtatttcttcgtgactggaaagacttgggtttgcatccacacgagtgtctgtgctcccttgctccattggaaacagacaaacaagttcaaaatgtgaaccctagctttgtctc

SEQ ID NO: 21812 - DNA, 217 bp, Glycine max
ggcctctgctacatacagacatgtttcaaacttctcttcttcaggttttttaaacccagatgcaactccaccctccaatggtataatacatggtttaaagtatgacaaaaacttgtcagactcatgcccttggatttccctgtgctgcactgcacgccctccaatagcagcatcaagttcaacagttttaatggccgcagttccagcctcatcctac

SEQ ID NO: 21813 - DNA, 714 bp, Glycine max
gggaccaaataactctaaacataccagctactactagagccataatcgtcaagatgctgatagatattccacccaaaagaaccttatcaacgaagtcccacttcctcatgattccttcttgctttttaacagatcccgaggcaagctcactctcaaccgttttgtgcagatgctcccgcttcctcagcatccatccaatgaaatttcttttgctttggttctgtggcactgcactgcctcttgaattatcattattttcgagagtaccctgaccacaacagatgtcatttccacaggcacaatattctggctcttctgaaaatccaccagtcttggctgagttaccgcaatcctgattaggaaccagcttgtttagagctttattgtcacttacagggttcactgtctcaattacatccccaaaaactgaccaccttcccacggatgttatcttaaccatagctgaagttcccagcatattgtctggagcaagtacaagaacttgtatatatccttttgtatgaccaaccaagtgaactccatcagatgcaatatcagtaatccaaattctttccactttgccttccatcccagagtatggtgtgaaggattcaaagacatttgtcagttcacggcttcttctcttaaccacattacttggaacctttttcatccttgcagcaggtgtccctggtcgaggataaaattgtgaaa

SEQ ID NO: 21814 - DNA, 544 bp, Glycine max
ggcaaatcccatgatataaattttcaaggccatggactttcgctatcaccatcttaaaaccttgaaaagtaattttagacttagcagccttatttgtaccattattcaatattagctgctttcagtgtacaagttttaattttccatctcatgcaaagtcatacatgaacttctaccattttaccaatatcatttttggaccctgatcaaatcaaggcatgattttccttttagcccgcgagaaaagtatgctttgtaataatcttcaacagcaattcttttgaacactgcagctctttcagaagtaacaaggctgggtgttggacctataactttgttcattagaggcctgtgaaatgtggcaacggaaattctctctttctctttggtaatagttgctcgatgctcgatgctccggtaaatcccattggtcaatatctccaaaatgtctccaacgttgatgacaaaagcattaggcaagggtttgacagggatccaatttccatctttttttatttgtaggccttctgtttcattggcttgg

SEQ ID NO: 21815 - DNA, 429 bp, Glycine max
aagaaaaccattggattaacaaagataatggccgtgatggtttggttgtttctaccaagtaacatagttcgtcacaactcacaaacatagcaaagcgagagtttacatgaatccacttgcatatacctacatccatggagggaaataaaaaggagaggctctgcaaccaaaatcctttacggactggtggtaaatatcctgcttatacaactgaaaaagcttcatgaagcaactttcctagggtcaaaatatagtccctaaatgttcatcattgagaatccagcatatgcaccataataagcctcaatatcctccacttgcaaagtaaatagggcaaaaatggagacaaaggggctgggatcagttgaaaagccctgggtttacccaatccttgcttatgtcatcgagatggtcatcaaaatctacctc

SEQ ID NO: 21816 - DNA, 331 bp, Glycine max
acgtaaaagcatccatatctttgattgaaataaaaggtgacatacaattaatggaaaccatgattcttgattgaaataaacattcatattttagatgatgatactatcacaaactgttcaccgggaaaaactgacacaaaactggaatatcttagcaacaagcagtagaacatgagcaatatttagacataagtatcaatgagtgatttcctcatctcatcgacaatggcgctgggttgggcttctctcagcttgaaaacactctcaatcacagagagctctgttgctgtggtgtctgaaccacaaaatgctgtccaatcatttaccgtca

SEQ ID NO: 21817 - DNA, 735 bp, Glycine max
gcacgacagttggtggtagctgattgcatctgcatctgtgacatcgagacagaacaggaacctcaaacctttgtgttgagaatcttagccatgggcagcaacggtttgaggtacgagatcgaacaaaacgcttacataaaactcgtccttcactccctcaaacacccaacctccgccgtcaacggcgtcttgatcggtcgcatctccgcttccaacgacgtcgtcgagatcgccgatgccgtccctctcttccactctcacatcccccttcttccccaattggagatatctctcatcatgatagaggaatatttttctgctaaagggttgaacatagtgggctattttcacgcgaatgagagatctgatgacagtgagcttggtagtgtggcgaagaatattggtgaccacatttgccgctactttccccaagccgccgttctattgttagataacaagaagctcgatgctttgaaaaagagcaaggaccgtagtgccataatgcagctttatgttagggatacatctaagaactggaagttggttcagtcagatgggaacaatcgattttctctcaaagagccatcagcaaatctagtcttgttggactatattgcatccgagaagtggaatgacgttgtagattttgatgaccatcttgatgacataagcaaggattggctaaatccagggcttttcaactgatcccagcccttttgtctccgtttttgccct

SEQ ID NO: 21818 - DNA, 309 bp, Glycine max
ttctcccagaaaccacaccagtaccaccatcttgaaacttgacttgtttttttcttggtggggttaaagttaagacctttgcttcaacaacaccctctttttcttcttcttgttcgtattcttgttgtctcgtgtacttcatgcgaagctttgttgccctcatcgcagcgtatgcatggtatcttggtcctctctcaaagtcctcctccatcatgaggaagccttgcttcatgagagagatggtgtccagtgtggggtttgagtgttgttgcagagagacgttgggattgtgttgtgttgggttcattc

SEQ ID NO: 21819 - DNA, 130 bp, Glycine max
ggggattattatatcagattgtgcagtatttgatcatcttgtttgctaatgacaggactgagaaggatattactcctatgggtgggttccctcattatggggtggtgaaggatgattacattatggtgaa

SEQ ID NO: 21820 - DNA, 250 bp, Glycine max
ggtacatgactgattttcttttaggtaaagggtagtgaccgaatttttattaacaagtaatctatccaaatatcttaaagaattgaaatgatcaaagtggtttagaatatctagacttgtgatagtgacatcaattctagtttgtttaggatacaattattcttaaaaatgagacaaaatattatatacctttaatggatatataggtccacttagagcaagttatcattgatttccatgtgaaagatta

SEQ ID NO: 21821 - DNA, 477 bp, Glycine max
gcagagagacatttctattttatgatttctataggaaacaatgtagatttaaaatcaataattaattctatcgtacaacaaagtttgcaaaacttgtaagctagttttgacagtcatgatagcattcatgaccatatagctacttattgccaactattactgtctacaagcttaagaccccagctcatatcctcacagtgccttacatgtggaacaagtgcaccagtatcagttcctctcttagccttacaatcatagaagggaggagcatggaagcatggctccatcgacatggcacgttgacaaggaggatcaggagctgttccattctcgggcttgtacagtatccacggtttcaacccttcaagcccctgcgccacgtagccgaaagtagaccacgagctcgtgaccaacatatccatcaagctcaagaggtaaatttctgcccaagctttttggttgtgcatcttcttctct

SEQ ID NO: 21822 - DNA, 497 bp, Glycine max
  unsure (1)..(497): unsure at all n locations
gaattcttctcttattcatctccctccttaaaccctaccctaccctacccgtcgcccatggcttccgagaacgtaagcaccgatacggtgtcgaaagccgtcgacgctctcctgaaatggcgtcgctcccaatctgaaaccctaaaaccaaaactcttcgacgaagacgaggaatatgtgtacctgatcctgacgctgaagaagatcccttcaaaatcccgcgtgaaccctcacaagatccctctcccccactcccttttctcccctttctccgagcagtgcctcatcctcgacgaccgcccaaacaagggcccggcggttccaaccccaaaaaaaaagggccccccccccccccaaaaaggggggggcccccaagcccgcatccagtcggaatccatccccgtcaataaaatcctcaagctctccaagctcgcctncgactaccgccccttcgaggccaagcggaagctctgcgactcctacgatctctttttcgc

SEQ ID NO: 21823 - DNA, 608 bp, Glycine max
  unsure (1)..(608): unsure at all n locations
tctctgcaactgatcttttggcgtatgagcgacagctagcaattagcaagatgggtggcgtccacgccttgatgcatcctcaaggacaacatcatcttaaacaagcagcagctattggagccagccaggcaatatatgatggtgggttccagaatgttgcagctgcacagcaaatgatgtactaccagtaacacacttcggttctcttgatgtattggggtttaatgctagctatatattctgccttgtgcacattgattcgtgttaaactctagggagccttttctttttacttttttacccgacggtagtgttgtagttacacctaccatattagacaattatgagtaaacatttgtatgggtttgtatcatgtatgcggttttctacttaatagtggtgagtgtttatgattttaagaggggattgtctgttcagacatgtttcttctcatcacccatttgggtgttactatgcgatagttgtcatcaatatcatcctgtctnnnnnnnnnnnnnnnnnnnnnnnnnnnnnnnnnnnnnnnnnnnnnnnnnnnnnnnnnnnnnnnnnnnnnnnnnnnnnnnnnnnnnnnnnnnnnnnnnnnnnnn

SEQ ID NO: 21824 - DNA, 271 bp, Glycine max
  unsure (1)..(271): unsure at all n locations
ataaataaaattaagagattaaaattaccgaattgaactcacattagttataatgggactaaaatactaaaagtgcaataagcctaaactaaaatgtgacaaaattacaacctatatcaggaagcaaacttcaagaacaatatcccagaggccaatctgacagccataaataaaggacgacattatgcctccttcccacttgggatactattntaaataatacataaatagacaagattctgatagtaatctaatagttaaaaacgggaca

SEQ ID NO: 21825 - DNA, 206 bp, Glycine max
  unsure (1)..(206): unsure at all n locations
agctggatcctctagagcggnnnccttttttgtttntntntnnnnnnnnnccgcagaatcgtgtcttattttattcgcaaggaatatacagctctgttatagctgatattttatttgctgctcagaaaggatatcaatttatttgcttctcataaaggatatcataacctacactgctcgtgagcataatgaaaaagactatgttc

SEQ ID NO: 21826 - DNA, 474 bp, Glycine max
gtgtatgtggagaagcaacactctcacccttggaagcatcaacaatatccacttcctccttaaccaaagtaatttcagatttcctttgttgaggagtactttcaacttcctccctaaccaaagtaatttcagatttcctttgttgaggagtactttcagcattcaaattaccacatgtagtttcgacagatttagattctccttcatgttccccactttcttttcctgtggagcaattagtctgctcttggcaatcaccatcatccaacaatctcgtcccttgtctcaattgtggggttgaaggagctggatatttatcatttccagaagacaactcatgatcattatcaacaaagcgggatactttctctatatccctggatactctactttcatgttgttcatcgtctgtttggagctgcaacatggacactacagattctttgacaggtttaagtgattcagacaggatgc

SEQ ID NO: 21827 - DNA, 190 bp, Glycine max
ggaaaaagtcgaagtgaattggatctcaggaccatcaggattaggacaaattttaaggcttaatgagtatttatagaaatatttacaaattatttactaataagattttcacagagaaattaaactcacatcctttaatgatatgaattcattatttaacaactagatgaatctttatttatttcgattc

SEQ ID NO: 21828 - DNA, 439 bp, Glycine max
aggctctcaactttcaccaactatcggttaatattaattgtgggaagcagaaaagaaacaagtccacaataaagccaaacattacagcgaggtcccaaaattcgagaaaccatcacaggccacaaatgcaaaccaattcaattcatttaattcaaagctgcgaagaagtcctatgcataacaaaagcaggaaacaaccccaactgtctactactctctgtcttcatcactgcaggaggtaagtagatgaagaagcattcattcaacaatgccgcatcatcatcatcatcatcatgtgtaaatgctcacaatttcggttggaagagcaattagaacaatggccaaagccatcacaatcgcataggtaacggtactactgggttgaaccatgcttccatacgatgcgttttggctctggggggtcgtagtttgtgagtttg

SEQ ID NO: 21829 - DNA, 819 bp, Glycine max
ccttggatgttgaacatcagatccattttctccatattgtggttttctactggcaaggttaaaaacacaaatgtaagtacagaataaataaacaggtaacattttatttaacccctcaaaaaaatatcacttactcttgctcaattcaaaccaggtgccgaaatataaaacatataatctaatttgcaattattcaactgctcaggataatcataggaaagttctccgaacactgtcatggtgtattattccccagtggagacgagggagctggagaaatagaacgattaaattggagccatatgagaagatattagggagaaaataaatatgaaatgagacatcaggcatcgacaaatccacctgatcatgagtcactgtatcaaataataaaatttggcccaaaatcatatgctagatcctggatggtataataaaccagctacaaaaccctctagccattatgcaagtatttcaaaactgggtcctccttcccggtgccgctttagaagatttcacaaatattactagtttctttggtttaccttatgatatgatagggcttaacacaacccaccatgggctttggaaacaatgtaaaatgatatgatggtaaaagttgatgtcgccaaacaagatttaatagccaggccaagttaaggcttgagagctagagcaagaccgaacttggtggatgaaccaaagatcttcgtggagtcatattcagcagacagggttataagtgaatttggcctccatgctcgttggcattggaaggcagctttgccatcgtcactgaaccgtgtctttacaactgtc

SEQ ID NO: 21830 - DNA, 731 bp, Glycine max
gaaaacatcaacaatcacagcatatcacattaataatcgtacataattgtttccataaacaagggcatccaagatgctaaaatagtaaaacatccccatacactacatagtagttttatttcaattgtacatttattcatacaatacagatacagtgcatgtctggatacgctttctgaatgtacgtatcagcatattttcatgtcaaatttgtaaaggtgacgcaaaagctagttatattaactttgatctcctctgaatggcatccaaacacactatcaaacaccaaccaaatccctgaaaagcaaattaactttcagagctgtaacatgtctctccagcagacaagtcttcctgacgaagtcgcttcatctcctcataggcccattccagtccggggcagtaatgaagcggtgggttaaatctgctatcactgatatcaggtggcatgaaggctccattctctaacaagaatttcacagcatccctcctcctttccttggctgcaatgtggagcggtgtccagccacaggcacccttagttctggcatcaatgtcagcaccacgctcaagtagtacatccatcactccaatgtgaccaccttcggcagcaaggtggagaggggtcaccccttttgatttggggccccaagcatacacattgacatccattcgcttcattgataagtttgtttaaccaatttgagttcgccttctgagccgaatcgctc

SEQ ID NO: 21831 - DNA, 365 bp, Glycine max
ccacattaaaatcgtacatgattgtttccataaacaagagatcgaacatgctaaaatagttacacatacataattgttttatttcaattctacatttattcccacaatacagattcagtgcatgtctggatacgctttctgaatgcacatatcaacaaattttcatgtcaaatttataaaggtgacgcagaagctagtcatattaactctgatctgacacacattgatctcctctgaacggcatccaaacacacactatcaaacaccaaccaagtccctgaaaagcaaattaactttcggagctgtaagatgtctctccagcagacaaatcttcttgacgaagtcgcttcatctcctcgtaggcc

SEQ ID NO: 21832 - DNA, 508 bp, Glycine max
agcctggaatcctctaaggcgcgccgcttttttttttttttttttttttttttttttagcttaatgaaaattcaggtgtctaccctcagagtttgccaacaaccccagtagatggaggagaaccttgaagggtattagagagcgtcatgggagggagagaaagggttggatgataatgatccatgatctctctggctcacccgttgcagctgcctccgtgataaccccatttgtcccttcccctggttcagacagagtatcaagatcaaacccaggtgcatggctcattcttcgcaccaacaatggtgcctctgtgagtagctggaagccatggggccgtctcgaagcgtggcgagagcgaggccccgtcgatggcttgggctacaagtttgagctcgtcactgagaatggacctgccaatgggataccaattgctgaggccacaatgaatgtgaaaaaaggtggccagttctgcattgactacaaagtgatgagggattctggattg

SEQ ID NO: 21833 - DNA, 121 bp, Glycine max
aagaaagaagaggagttgtcaaaataaccaccgcaacagacacatttcgaaaacattggagacagaaagcatcaacccaaagccattaattccatcagaagaatatttgaatctccacagt

SEQ ID NO: 21834 - DNA, 547 bp, Glycine max
ggggaactcatgcatccccgcctttcaaattatcagtaacataaacaaacaaaacaaattttggttgaaattggcataaactaataaaacgttcaccctaaaggatgtccaattccctagaggtggtcgacccacagtcataaaaaacgtacatttgaattggtaccaacttccaagaactaaagccaaatagaagtttagaaaacactaaaattaagcagcaccctttcccttcttcctctggagtttcttcatgtaaaactccagctccttaccttcaagaatgtacccatcagccctgccacattgtccgggacgagaagaaatacaggccaacaatcgcccaccaccaaattgctcttcaatgtgggagtcaagattacgatctttctggcgtttctcaagttttctctgcacatggttacttttcttagtttcttcagcagcagcctcaccttcctcagtagaatccttcttggctgccactttcttttttctaccaatttcaacaccatagtgctgaaggtaccactgcctgtaaggagca

SEQ ID NO: 21835 - DNA, 377 bp, Glycine max
ccaaaccaaaaaacctacctacacatccaaattatttaggcaagggtaattagcatgaacatgaacacatatttccaaactctagcattaccatatatattatatatataaacttcactaataattgaagtaaaaagaacaaagtccttttcttcttcttcctccatcatggcttcaccatagttcaagggcaagggcttcttcttgtatgaagtactttacaaggcattgcacaaggtggcaccttctttgttgttttctgcccttggactgctcccagcactgctattggaaagtgatccaaatgcttatttttgaaccaccccaattggggatgaccctagtggaggattattgtcccacccatctttcatgag

SEQ ID NO: 21836 - DNA, 493 bp, Glycine max
ggtttttgtttcgattctcgttctctagggttttctcatcccttttcgacccccaattactcttttctctgttcactcagtgtttcttctctttcacttccaatctcgatttcctcgttgtaagaaccctcaatctcgcaaaacccgcggttcaattcatcgttcccttcaatctagggtttcgtttcgagaatgccaccgaaaacggcgaagcgagggtctgcgtcgagcttctcgaagaggggcggcagaggcggcaggggaaccctgaaggcttcacagaaccaacagcaacacgaacctgcggaagagaccgtgaaggtcgaagagaaacaacaacccgttgttgttgttgttgctgaggaggaacagcacacagtggtggtggaagaagagaaccctgctgttgaagagaaacggcttgtggttgaagagaaagaatctgtagtggttgttgaggacaaggctattgacatgaaccaaatggctcctg

SEQ ID NO: 21837 - DNA, 686 bp, Glycine max
gctgtagttaccagtgaagatctctccgctgcagcttcagacatgttatcagctaccagtgagagcataacttctgctgttgaaacaaaaactaatgattctacacaagtttctgcatgtgcttcagctgaaggacccgttacacaagtggcggataatttgaacaatcataagaatgctgagatagatgaattgttacaacaggataaaccgttacagccagatattttggaaatggttcgtaaaacagaaaatttgtctcttcaaggaagtaaacaaagtgttagtgatggtggaacagaattaaaacaacccaagcaaggtgctgcaaagttaagcactgaggttgtaaccttgaggaccgtgcagcaagggcaagggcaggacgagtctaccagttgtagtgcataatgtgacaggacggctgatgataagggcatatctatctctaccactttggattccaaagatgtttgtttgaatagaaatgatagtgtagttagtaatgaagctgtttcttcaaattctggcacatcatatcagcaatctgctgatctcctagaaacaacttcaaaacagtgcaaggatgatagtgcacagaatgctggcagtggttcagtgtctctttcagcatcaagtaccaaggacaaaccaattttagagtctaataaggtgaaacctacatc

SEQ ID NO: 21838 - DNA, 550 bp, Glycine max
ggtcctgaaaatttcctccctaattgggcgtttcacatctgcgcatccttttactaccaccaagtgtgaagtttccacaaaatctggagagacaagagaagtgaatccaaaggaattaattaattgctagtggaatgcgattcactcttctttcccgtgcgcctgctccttttctttctaccgccttccttaaattcaaattcgtggcaccttccgcagcgactttcactagggtttctcgcatggccgcttcaccttcttccgcggcgcttcgcgacggcgctccttccgcttcctccgccattgattgcctctctatctgccaccgcctcaagacaacaaagcgaacaggttgggtgcgaaaagatgttaagaatccagaatctatagccgatcatatgtatcgaatgagtttgatggctctggttgcatcagatgtccccggtgtagaccgaaacaagtgcattaaaatggctattgttcatggcattgcagaggcaattgttggggacataactccattggatggagtttctaaagcagaaaagaa

SEQ ID NO: 21839 - DNA, 734 bp, Glycine max
agaggacaaccaacatgattgttttcacatgcccaaggaagaagacatcgggtatttacgtactgagcgttcatccagcaaatgatagcaggtgatcttcatcgagacaaaagcatgacaaatgacaattcttgaaagagaaatagttttgtaacagataaatttgaaacagtatttttttaaatacatatttgtataaaaatggcaaagttattatccctaactacaatcatacacgaagcaataaataccaattaagatagaccactgaattagatggattaaaacctccatgttgaagatgtgattcctgcctttctcataagttcaagaaaccactgtctatttcttggcataagttatcaacatggggttttgtggggttatcttgaaaccttgcagcgtctgcatagccactgtggattgcatttcatctccatattccacaaaggcaatccctggctttgtttcaaccattctaacttccttaaatccaggatattgaagaaagagcatttgcagcatcatgggagttgagtcattgggaagattctgaataaagagaatattattcggtggtgcaggagcctcaggtaccatagattttgcaccgcctggataagctatagcaggtgctgcaccataagcaccagcataagctggattcaggcccattccagctaaattagcatcatgttggtccttccgctttttggctttgtcatcatgcctct

SEQ ID NO: 21840 - DNA, 694 bp, Glycine max
gggccaaggatgaacacaaacttttgatcaactcattgacaagttgtgaatagagagtgttgtaaaagcttagctaagaagaagaacaatttctatgaaacagaatatctcctactcctaccagttttcccctccgaaccccgagacttcctacctgatttctggcgctttcccccgccttgactgctaaaaattgcaattctccctattcccttagaaagtgaggttaagaatgttcttccatttcctgccttgtcaatgatgccttgtttcatgaacatctgctccttctccaactcactcagcctcaccctcattcttgaaatctccagcttcagttcccggttctctcttcgcagagaagcatagttgtccctaggggacatggctgcacttggaacaccactgcttattctctgcgacagcagcccgtctcccgaactgcccgacatcgcgttcttcaaacgcagctgctcgaagtacaggacttgcaccaccatctgcagtggaagcctgtcattttgggctgcatggttgcttgcttcttgagacagcttctggcagtctatcaacttgcaaagcttcttgcattcttgttctgttagtgctggatgtgccttcaagtacatatccacagctctataaaagccatcatcgataacacgagcataatcaggaagtatctcaatcaaag

SEQ ID NO: 21841 - DNA, 534 bp, Glycine max
ggctagagtgaacaaacataagatagaagaagagtaagagaatagtttggcttgcacaaaagctattaacatttaacaagaggcagcgccatgaatttacatatcatatattcctcggaaaatggctgctcctggctctacatttcaactcataaaaccttaaaacttcagtaacaggatattcccgaaggatgaaattcgattacaaaattgatcaggtaagcaggacactccactatcctaaacaaaagaaatttgcccaaacagttaaaagatactaaaatcgaccagtctaagagcagtccaattgttgcagtaggctgctagacgctatggtctcttcagttataatactttcatcatctctcttcaatcattcatatacgagtcccaactctgcataatctatctagttagagttttagcattcttgaacatctttgtcattgagatcaatgggaagggcaacctttagctgatctgaaccactggaaactagaggcagtctaggttgtggtggagagctagtactgc

SEQ ID NO: 21842 - DNA, 492 bp, Glycine max
acaatgtgaacaaatagcatttttaaaagttcaaaatgttcatgttaaaaatgctaaagaacatgctttcattctttgctacaagaaaccaaatggggctgtggcttcacttgagttttctctaatcaccgtataatacgctgggaattatctatctacagattgaagctagggaactaaaatgatgtataaattgttcatgttagcagctcttcatctataggagtttgaggtaagaaatagaaacggaagtctaaaatatcattagcacattacgccgactacaaacttgatttgtgcaaactttagattcgtttttcctgatattatagaaggttagcctccttctttgtgcctacaacgtgaatagttgggggcgggtacgtgagagctgaggccgctttattggagacagtgttaacttcctcaaagtcatggatgggttattagtagcaccaggtccaaaaacaggatgagcaccatcccttctgt

SEQ ID NO: 21843 - DNA, 946 bp, Glycine max
ccgaagatcccctaaagtttttttttttaagcgccatatacaggaacggctcgagaaaatgtcctaacactccatgttttccatgaactcgagtatactagttctctgaaaacgtacagaacaaaaatgtacaaggggggaccagagtgagtgggggatataagtttttaattttttgatctatagaagttactttaaggtatctgaactgcaactaatcttcagtgacttcttcagttacatatttgttgtagcttcacactgagaaacagggatagagaatgacatactagcaagcctttgaggattcaccacttttcttcaaatgtattttgccctccataagtttgtatgaatgtgtcggccacagaatattcattctggctgttgaaattctagatctaattttcgtttcaaatatgatctgtcagcactgtattatcatcagttgaaatcaccaaaactggcatcaaccttatctgcttgcagagaacttccttcaaacccatcacgtcctggcatcactctcctagacttccttggaggtgataatacagtaggaccctcctgtaaattgaaatcagaagtcctagattccctcttgggagcaggtctagggagcttgtctggatccgaaggcagaggagcagaagaaaagtacctatgctctagtgcctgctgcactgaaattctagcttttggatcatatgtaaacatctttgacaacagatctaaagcatcatcagttaccatcggaaataaagaacgcagagggggggcaggaacatattggtattcgacataatcaggcaggtataccatatcaggccactgagaagccgttggagtgccaaatgctgaaaaaatctttcctaattgatcaatgtcacttgtaccctgcaaaaaaggtcgacgaagaagaagttcagcaaatatacagcctgca

SEQ ID NO: 21844 - DNA, 447 bp, Glycine max
aacaaacaactggcacattcttccactacttgggaattacaacatattatgttagcacattacagcatattgcgctatagcatattacaatgtcatagttgctaatcagcagcttcactagaaaaatatcctaacaacatcagtttaatatgggtatatataagcctggcttatttttcttccaatacaataccgatgaacttagtaggataattttatgtctcgactcagttaaaattacaaactattaggccactttgaattgattagacagccaatactattgtacctgttaattgtaggtctatttggaggttttaatccaaagatagaaaaatctacagacattggagctgattcattcttgccagtattatcatcagttgtctgtctgaaatcaccaaaactggcatcaaccttatctgcttgcagagaatttccttcaaa

SEQ ID NO: 21845 - DNA, 135 bp, Glycine max
atttatttaagtttttcaacgtccaattctcatttataatcatgtgaagggttctactaatcaaaacttaactgtaaacaagtattttatcctaccactcctagccacaatggtattatcaaagccacttttggc

SEQ ID NO: 21846 - DNA, 507 bp, Glycine max
ttaaataaaacatttgtcatttgataatttttcaaacaactaactggtttaacaagttatacaacttcagatccctttcttaaagattgtaatttacatcttcccccagcaaatccttgtcttcaaattggcaatataccaaatggaattgcgaaacaaaaaaggatccatttcatattcggatattcctagcaattcatttttcccattccaagtctgaaactttagagtcaccctttacttgaagatcatctatgcctctggattgttgattagttatctggtcccaacccataatgtgtggcagtgcaaaactgcaagctgtcttcattacagcaaactcagcagttgtgacaggaacactgaagtagtcattggtgtttaacaggttgttgacaacagtcaaagacacaaagtagccatttgcatgaggcttaattgataagctctgccttacttgaccagcattacttgataacattgaagggtcatgaaagaaatcacagg

SEQ ID NO: 21847 - DNA, 521 bp, Glycine max
ctacgacaaacgcgactatattttgtgccaagtaacatttcctagattccatcttcaacaccacaaggagctcaattacaattcaaggggaaagcttaaattaaacaaacatagcggaaatctaaaaacagaaggtgtcaaagattggaacttcaaataagagcaaacccatcagccctctgcctcactctcaatgtcagatatatcaataccaatgttccgaaacttgacaatattgaaaacagaagagcaacttttctggaatcaaatgaggcagcacgcttatattttctccatctgttactcggtaaatcatgtagcttctcagagactggtttatctcttggattgctcacattcaccagactctgcataagttgccccgctttgaaacttgattctctccacagtacacttgttggtgagttcccggtgttaaaaccttcaactgcctcttcataggattcaggtgaaactgagtttccattgacactagggatatcaattatgcactgggaata

SEQ ID NO: 21848 - DNA, 562 bp, Glycine max
ccgaaacaattgggcatgatttctattcattgaaagcacaaaattcacggtttatagttacgttgaaaattacatagcattggtgtcactaggtccaccctccatctcattgacaacgttatgtacttcttcgtacagagcttaagattaagaacaagtggagccaaattgtaaccgaattccaattaattaatcaaaaacccaatagctagtggaaggtggagaaaaagattataagaaccccaaaaactaacgtcccaagttcagcacctagaaaataacattcacattaatacagtgacatacggcattttgcaccatatacccaggccaagccccatttattttcattctcaaccccagcagagcatcatcatgaaggcagagaagagcgccatcgagaagaaactactgctgtgtacaagtccaatgccaccgtgactttcgtcattcatgccggatcctgaaggtcccatgccactgccaatgcctcctaatactccaggtgttgtgctgtatggagtggtaccagtggtggtgccggtgccagtgccggtgccgg

SEQ ID NO: 21849 - DNA, 397 bp, Glycine max
ggcgaatagtaaaaatcgaaacaccaccaacttttaatagatttgatccactttagttaaaaaaagtgaacagggttacagcgaagcatactgtaaggaagagcatgatggcactacgtagtacactagagaatccacaaagccagaggcgttgatcccttttttctattccctacacaacaaagcacaaaagctgggtatcgcttggcttgtctataaccggagatacgtgcccttagccttacgaaaccagaaatgaacacaaagcaaaatagcaaacaaatcctaaaaatattttttcatcatcatttcatttccttgcattgcattgctttgttaattctgcaccgggtaccttactcctgcggccaaagcacgttgctgttcaatttggaac

SEQ ID NO: 21850 - DNA, 433 bp, Glycine max
aaatcgcattttatttatataaaggcggcctaatgcttgtaacagccaacacacagtttgacaagatgtcatttcctcagccaaataaaaaagcgacaacccaaatttctattgtagaagagaaaatacacttcttggaaaaggtaagttccatagaggatgccataactgattcagccttcatattctggttcctcatcatcatcttcattggttcctcctgcatatctccaaccatcttcaacattggcacgatcctcttctgttgcttcgctatcttcttcatcgaaagggtcatctttcacgggccaagaatttttatttacagttaaagtgggagtggacactttgcgttttgcaattttggaaggaggcaacttgaggtttggttttggcttactctgcttctgaattttaccatttgaccgtttcg

SEQ ID NO: 21851 - DNA, 424 bp, Glycine max
cagcaaagcaccaaataatatatggctaagcgtgagaggaaacccgaaatcccatagttggccggattcacgaatcagttcaagagtacaaaatgaatatcagcaactacgatagacaggtgcacctgtgacaaacacaagtagcaggccaactataccccccacaaaattgagaagattacaatgccacaggtatcatcaacttgacaagcaataacacaagtgcattcgtcaaagtgggcaatggtttcaccaaggagcatgcaacagaagccccggaagaaatgccgctaatagggccatttgcaggagagaatcctcctggaagccccgctgaaagcaccagcgaggatttgggtgatgctggaccagctccatcgaacagtggtgctggtgctggtgcaaacactgtgtcccttgcaac

SEQ ID NO: 21852 - DNA, 360 bp, Glycine max
cccggagaagaagaccttttgccattctgattcctggaaattaataacataaccttagacactgcaacttggaaatcctttgactttttaccatttctaacacactgaatttgcaaaaaaccaaccccttaacaaaaaatacaaactcctatggctatatataattgctggttagaaaaggaataaaaaaaagggcaagagtagcagcaaattgcacattattacattacactgaattgaagacagaaacaaaacaaaacaaggtagaggtagtagcttcatggtcctataaaaatgataatcatagatcgacatcgcagggtgtaactccgaggagaggaacttgacccaccaaccctt

SEQ ID NO: 21853 - DNA, 412 bp, Glycine max
catatatgaacatacaatccataaacacaatttgcataggggagtaaattgcaaaatcatgcattttgtttcctattgttcgcaccatatgaaattcatttacaatgggaagctaacttactggattaggaattgaagtactgatttcccccttgatggggccaatggaatagaggagctagaaactcatgcaaatgtcttgcatttaaaatgagcagccagctggatcatataagaaacttggcggcaaaacctttgggaatgttgaaggatagcaagaaaagagaatagaatttgcatgaccatgcccgctactaacaggtcaaaaagagccaggaacattatgaatcctatacataccatctgccagtgttgcaaaataagattggggttcttacaagtttgcaccata

SEQ ID NO: 21854 - DNA, 530 bp, Glycine max
ggaataaaacatggcattaatcaaacaaattcttgccaccaggaaagggcacaagcatttatcattaccctatcccactaccctgattgacatcgaagctaatgccaaaaactgacatttcatccaccaactagccaagttcgacctgagctacaatcaagactcaagtatacatatattgataacgaccctatatgggaagataaatgacagcttctaaaggagaagtcggataattacaaagtagaagatataagctgttgtcttaatgtttgcaaagttggagcctacactagttcacaatcttaagtgataatttccctcacaagccaatccaaactaggatatgagaagtacaaaatgagaaatgatgggagggcaaacagaattgtaacaagtacataccgggccaaaatggctgcacttgctgggcttgcatataagacaatttaaaggaattttttgaccaatgggaacttacccgtcaactggacaaagaagatcagtgacttccgaagataaacatgaaa

SEQ ID NO: 21855 - DNA, 333 bp, Glycine max
aaaggtgaggaacttcaaaaatcatcaaaggcagttctagccaaataaaattaaccttaaagcaggtcaccaatccctccatcttggtcaacgtggagtgtacaatatcaacatttacatatttacaagacaaataatgacgcgatgaacatttacaatgagtgtgacttagcagctgtacaaactttgccttcaatgccaaggtccaaaaggagaaaggaatgaaaggcgacggtgaaccattcaattaatcatcaaacttcgaatacaaatcagcaagtgcacgatagagaatggcagcggcaggtggcctaggcaacgagccaaaaagta

SEQ ID NO: 21856 - DNA, 563 bp, Glycine max
agaagtacaacaccagattgttcttaatagctgaatttttattacagattaaaaatatctaatgtttaattagaaattttgtactctacttacaatgaagaattaactgagtgatctttcccaaaaaaaaaaaaaggacccaaggacaaatagggttaataaaatgcctcggttaacccaagaataaaaaaattaaataaaaaattagagagatagaattaaaagtctctcttggtgtcacctcaattttcatcataactaacacattttttgtcattatggggacaagtgtatacatgtgtgagcctagccatatataattcccaaccatgattttgctggtaggctatggttggttccaacttgtcaccaattttcactctttccaatgaataaaacgcagaaataaccaactttggtcttttgcgttggtgcctcgggatgatgcaaacccccttagaaacattcccacaaacaggcccttaacttggggcaggaattgaggggcctgggctgggcaagcccatttaagcaagccttggaaacattttaacttttgggct

SEQ ID NO: 21857 - DNA, 403 bp, Glycine max
ggcccctcttttgaataatagtaataaaataataataaaggttctctgttgtcctcataaataaaaaaggtaaatgaatgataacaaaggataagggggaaaaatcaaagggtttcttttttgaaggatgacagggagactcaagactttacaagtacaataattacaacacaatcgttaaatcaagccccgcaactgataccagcttttgaataaaacccattggtaccgaaaccaagcatgttagttgaaaaatgaccagttgacaatctgagtaacttcccacgaggcccactacaaatctctcaaaattggcccaccctttttaataatattggtgatcttggcatcaatttgcttttggatatttggagggcaaaactctgcaccatatccattcaat

SEQ ID NO: 21858 - DNA, 268 bp, Glycine max
  unsure (1)..(268): unsure at all n locations
tttttttttttnggggccaaacaaggaggcataacatgcacataaaagatccctaatggtactttcagagttcctatcatactattttactggtcagcaaaatttatatacacaagatgattgattgcaaagagattggtaaaaggaacaacaaaaaataaactcgtagaaggggctagaaaaataacaagtgcctgcctgtcgggtaaaactaccactcagaaaaaaaggtaacacagcaatctcatcgctggtgtaagaatgcttc

SEQ ID NO: 21859 - DNA, 367 bp, Glycine max
ggcacaaactcttacagaggccaactttggtaatgtaaaggaactactggaagcagagcctccaaaatggttagcagatagtgctgctgcttcttgtatgctttggggtgtgagatttcatcccatcatgtgctcccggcatcactgccgattttgtggaggaatattctgtggtgagtgttccaaggggcggagcttggtgccatcaaaattccaagtttctgacccccaaagagtatgcgatgtatgctgtgtccgacttgattcagtacagccttatttgatggatcatgtaagcaatgctgctcagttgccaacccatgacctgacagatctgagcactttgcgatcgttgattaattttact

SEQ ID NO: 21860 - DNA, 372 bp, Glycine max
gattgaaagctgatagaagctagctcaaccgagaagaagcaagggataatcattattagtcttctttctcttttggttactattgattgctccaatcatcgatactatgtctctaaaaatagcagcagaaatttatccaaaatcaccatcagagacagtgaaggagcctttggtggtggtaaaggaatatgatgaagatagacacaaggtcgctgtagagagacttgagaggctttgtgaagttgggcagagtggaaagccttctcttgtcactgacctcatgggagaccccatatgccgtatccgtcactttcagttgcatgtcatgctggttgcagaatatggagaagaaggagaagttgttggggtgat

SEQ ID NO: 21861 - DNA, 504 bp, Glycine max
aacgtaaaatacagaaaatgttcaatgcgaaaaggacactagtttcgtttacccttacggggtacaattgctcaatacattgtctagaatgaaaaaacaggagaacttaatcctatttcagtgataatatctacatttatggtgaagacaggaaaagagcaacgcattttagaccagagaataacattaagttaatcatgttttagcaacggccgcttgttaaggaataatataattttcctccacctgtataagtattaatagccgttgcagtatgccttttatatcaaaatttcattctttttgctggtccttgatcaattatcggatcagcagtaggagcttgcgtttctgctgcttcttgagtttcagtgcctttctccgtttctgcagttggaggtggaacataaccttctggaaatggtggtggaggaggagctggtggtaacttgcgttgcaaggatgcaagaatatgatcaactcgcttaacttcctttatgtcaa

SEQ ID NO: 21862 - DNA, 976 bp, Glycine max
actcaaagcatatatatgtgatctgtaattctgttaggaatgacattgtctagtgtccattgtttgacatccaattacacgggaactagtttttcgcaaaggaaagatgctagtccacaaattttaggagtgtaaatctcaaatctgtgcgcaggccaaaagtcaagaatcaatatttggctcaggaaaaaaaaggcaaataccaggatgtaaatactaaatacaaaggcacaaagctacaaacccaaccaccattcatatgtctaatgccacgcattaacgcaccaagggtcatcacagacactccaatggatacgaaagcctgcaaaatgagaactatctgccgtcttacccattgaaatgcaagctgcattaagagaaaatcgaggttctgtataaatgtttttgggaaatttaggcttactatccctgacgcagcttcataggtagaaggggaagccctacagtaccccgctgaaatgtagaaatctatctcaattcaaagtacaatatatttcatctaaattacgggaacaagaagcttcaagggggaacggaaaagggcaaatgccaacagacaggtgacaatgagatttaactagatgaactagcacgtctttgccttagaactatactttccctcctataatacttctgcatctatcagtggcaacacaaaattaggatgcgaatatgatccacaaattctgcacaatcagtattttaaggtcagggattgtgtgtatggttataaacaggaaaactgactcaagtagcagcgacatcgaacgtctaatgaacctacaatgccagcatcttcacggcttgctgtttcacttgaaggcacggaacccttttcatcaggcaccgtacctcctattgattcgccctgcttgtgctgcaaatgctcagaatcctgctcagggaatacctcaagttgcaatgatggtgaaatgttattcacgtgtagccatgt

SEQ ID NO: 21863 - DNA, 415 bp, Glycine max
aggacaacaacagctttgtttctttcaaacaggaattggtttttacagtggctaggttcagttcactatgcaagttaaaaacaagggactaaaatcaaagtctttttaaacatagaattaacctaaaagtaggcaaaaaaagagtaattaaaatcccctcccttcctcacccccaccccccgccctcctaacatgtccacaaaaaacagttcacgtgaaccaccatgaaaagctaccaaccacataatattgtccacctttagattctttaatcagttctggctgatccactgcttgaggcccggaacccattttggacatttgggactaaaatacttctccaccacccttgagttcaagagcttcaccacaggtgcaaacttaacacaccttgaagtcttgtactgatttattg

SEQ ID NO: 21864 - DNA, 445 bp, Glycine max
aggaagaaaaaaaattcaggaattccccatatcatattactccagatacatgaatttaacccaatgaaaatccacaatcatcaaacacaaaagaggcagtgaattacacaatgaaatctacaacagagagagagacaatggatctggaaactaatgaagggtaccctgaattaagttgtagcagccagagtatgtgactgagaactgaactgaactatgatcactatgtgactatttccacaggatacttatgaatgcaatcttcccatggtccattaggagaaggcctcacattcctcagagcctgccaaaccgcactgttacacttgaaaccacttccaaacgcaatttgccaaatcctgttacccttcttgatcctccctttggcttcaatgtaagccaactcataccaaatggagcttgaggaagtgttcccaaatctatg

SEQ ID NO: 21865 - DNA, 464 bp, Glycine max
ctgaacacatctcggagagttagataaagaacggctttgcaccaaatcatagtcatgatgaggcttagaagctagccccctctcgaaacatacacattaacactgatattaaattgttgatacttaaacaagtacatgagctagctgctgagtcatcatataccagactcactcagggccaacaaaacctcaaaatcataattcacctaaagcttcctagctggaagaaaagaaaaaaaaaagcaaaaataaatatccgcatgagatgatgaagaaagtagcatatttggaagccagagaaccaaaaagaaaaggttactatcactaggaaatagggatggcctctccattctctccttagacagcaaaccacatggattgatgaggaactctacgatgaatagggagacctggcactactagagtccctcggtgcattgcatcggtaacactccattctattg

SEQ ID NO: 21866 - DNA, 421 bp, Glycine max
ccctgcaggaaaataaaatagttactgatagcgcagtaggtagtcactgtaatttcaggaattaaaattcttactcttaaaaacataacagttaaattcataaaacaagacaaaaaaaaaaatccttcttaaactagacatatacccacattaaaaaaaatggcacatagcagggtcccaaatcccaaaatagtgtcttaaatacatatatagggttgggacaggtgtcagtaagcaagacctatgatgagaaacaatataaccgggagctttagcatagtgttgtgagcataacgtggtgaaccagaaggagtagtgggcgccacagcctcatctgttagggtagaagtggaaggctctgtgatacgttcatcagccttgggcagaacctcaacgtgtagcttgagaccatttttgcaat

SEQ ID NO: 21867 - DNA, 713 bp, Glycine max
ggaggaataaagtgatttcaaaagttctaaaaaatacttgagtattttcatcaaacagaatgattaaacacgcacgatataccatctgagagagcttgtttgcatgtgacagagcaaacataggtaaggtctttcatcttccaccagaaagaactaataataaagaccttcttcatgttgcaatggctgcattaatattattgtgacgggccacattcaaataatctacgaatacaatgttacctaaaaataaaataaaatatagctaataatagagaaattgatgtagttcttgaagttcaaacacggatgaatcaacagataatctcttcatctctatactttcttgcacatgtctctacccttacatgaatcaaacaaagatgaacaaaacgtcaaaaagccctttcttcaccagaagagcagatagaaaatcatcgcttaagttgccttctagccaaagcagggactttattaaggatatagaccttgtagctaacctgtaccatttcaccaccccgcatcacgttcattgttttcttctcaaactgggaaccctggttggactcatcttgcaatttgcctgatttattctcttctgatgaaacattgacatttctgtcattgctattaacactctggattgcagcatgagaagtcttagctgcattcctttctacatcaacctcagtcactggtaaatttgcattggc

SEQ ID NO: 21868 - DNA, 531 bp, Glycine max
ggtttattaagactccgaatgcggtcaaaggacaaggcacgggagagctacctcgttttagatcgccgtgttgctcactaccactcatacttggaatgaaacctctttgacacctaaaatccttaaatgacaccacttttgtcttagcctcgtcttctcaacactctctctgctcactcaggttgcctgcccttgctatttggagaacacaaatcaggggtttccaaataagttaaacatgataaaacggtttccaagtaggaacaaccagaggtccaaaggcatcaaggtaaagcatgttctgcaaattgttctgttgcttggtgtttgcttctggttgatctaccaggttaagcacaatcatgataaacagaatgaatttgccaacgattcaaaactgtcagtcagtacacagacagatctgatcctgaaacttggtaggagagaccttcattcaggttagcatgaagaaattcaaaatgaaaaacatgaggaggaagaggaagatgaacataatgaagaggatgaaga

SEQ ID NO: 21869 - DNA, 1098 bp, Glycine max
gcaataaaaaccatgtaacctgcataggaacataaaggagtttctactgaaatataaaatttaaaggtaataaccagagaaaaacttcaggtaacgtactctctaatctctaaaactatctcattatatcagcttacggtcacattttttaagccatcttataacggttcagcaatggcttggaggaacaccgacacatttctgggaaaaaaaaaaaaaagcggtggattccacgtacagctgtagacagtgggaatcatatccaatacggtagcaaaagactcctaactataagcaacatgcatcaaaactaggtggattcctgatgctcctgaatcctggtgattgaatattgaggacatacattatcacataggacgtatcaccttaaggagaggatctgttctagcatctaatccagacaagtaaactagaatttaggaattcaggtccaaatctacacattaaatgtcaccaagatggcctaacagagaactaggaactacaagtaaaatacaagcacctaccatcatacataaagagtgcaaccacctaaacgagaacttgcaggtttataaaatatcgcaatgcatgttgtgggctttctttcacatacccttcacattgtaaggtccaacagtgggctttccaaccctctcctaaaccaaaattacatgaaaataaaatctagaactccattttcacgagcgcattggaagcttcggctgctccatactgcatccagtctttcgcacatacaagggcctccactgtctctggccgcaaggaacttctatattgatccatctctttgacttttgtatcaaagacagattcaggaggaagacttgaaaccggaacagacagtatatcccgagccatcttggaaagagtagggtacttgagtttgtttagcttccaccaacccaatacatcaaagtctggaacacgtggcaacagcgattcttcgagatactggtccagctcagacttcatttgatggttggatgtttccatgatgtagacatcaaaatctgttagtccattgtccgacatcagagttcctcctggagatccccctgtcttcgggtgatttcc

SEQ ID NO: 21870 - DNA, 672 bp, Glycine max
gggattctaacttacagcatatacttaaataagggggttgtagtagtagactagtagtataatttggcacgtgttgaaataagccacattaaagtgttcatttcacatcggttagctactagttaatcctaaacaagtaaactgttcactaaaccaatccagcaatatcactatataagttgtatagcctcatcagagttaaaagctccatatctatgccatgaaatcatcaccctaactgcacagatcagaatgaaccccatgtttattcaacctaccattaccaattagttcacggaaattagcatgtatcatcatttcttgtcctccaggagtattcttagagagttcataacgttgcatctgattaggtgcatcacccctctctaacacattagccactttaccaagtgcttcagttatagctatttcttgttccgtaagagtcctttttgctctctcaatatcaactgggtcaggtttccctctactgaaaagcatcttcttaacatcgtggataaccctatctgttgcacgaagctgaattaaatcagatcttttctttaacctgacaaggtgagatctgtgtaaatccttctgcaatggatactttcctttcagtcctcttcctcctccaacaggtggtaactgaacattacaatttaacatttc

SEQ ID NO: 21871 - DNA, 1056 bp, Glycine max
ttttttcctaaggctaataaataaaaacccatattattatatgcttgatagaattttgaccaattttaaaactgccccttgaaaagggagggaaattttagcccccagtagattacgggttctaggaggcttatttctattatatttatcccggtttaaactaacgggcccgcaaaaatgaagtaagcacccccgattttagtgatttataaaatacaacatcagtaaacgaggcagaacaatattttcaaggacatccacgagtattaattttcagaagccgcgatccttaatgaatggtgcatactataaacagcatcacgtgacaaagactggtggtatgtagagatatcatacatctaccgcaaattcatcactgctatcaaatccaaaagccatcttggttcttcaatcgggaatttgttcatagcctccattctcaggagactggtgcgccccatgacctgtcaactcaaaaccgtatttcttgaatccggacgaccccagtctgtggatcggggaggtgttccatgcaaaccaagctgttgaatcatgaaatgacttccatccatagcttgatgctcatcatttccgcggattggattaccactggaagagtcaactgattggcggaaacctaaacttgataccggttcactaactggagatggcaacttgctggcagaggcatcaccttttaaaccagcaccattatctttcttgttgtcaataaagaatgttccaacgatgacctgaactggaccagctgctttaagtggcccaccaactccaccacctatgatttgcccgtcagtattagataagcatacactgagaccaccagttcgagttccaagttcattacggacataagaaccagtaagtgaaataatctcaaaccgaccctcataggtaatgctgcctcctgaggttgctggctggcgaagagaggcattagagatggaaccagatgcagacagaatacacatctcacgcctactttgttgcataaataacataattttctggccaacatcctcaccagcggcaacagaa

SEQ ID NO: 21872 - DNA, 602 bp, Glycine max
ataccatgcacaattacacacacctttgttctaaggtctaactaactctaaccatttcgactttcaagctagattgaggtctgaggatagtgatctttgtcttcgccaacaacatcgtccacttaaaaataaaaaagccctgaaatatctgaacttaaaagccacacttttatttgttgtgtgtgaggtttgatttgatgggaaaatatcttgaatctgcggcgaggttggaagagctatcgcggattgtgtcatctgctgcgaagcccaacaggccaaagagagcgctacccagatcgcccaaccgtgtggcgactcctcgaagtgcgaacccatttggtgttaaggtcgaacctgcgaaaaagatggaacctttggaagaagaacaacaatgtcggacacccctcgccaaggttgtctcagattgctccaagcgctggttccaggacaccctcaaggaggctaaggctggggacactaccatgcaggttttggttggtcaaatgtattactctggatatggtgttgcgagggatccccaaaaggggcatgcttggattagtaaagcatcaaggaaccgaaattcagtttggaaattgtgc

SEQ ID NO: 21873 - DNA, 246 bp, Glycine max
ctgacgcgtgggccgacgcgtgggcgtacgcgtgggtttcgatctaacccttgtgttgtatcaattcctcttaccacagatagcataagtaacatactcacctttattccaagctctaaccatttcgacttgttgctaactagattgaggatagggatctttgtcttcgccaacaacatcgtccacttgtacataaaatcaaagagaccctgagatatctgaacttttaaaagccgcactttttat

SEQ ID NO: 21874 - DNA, 405 bp, Glycine max
ggggacaataataactattaattggggatttctatgggggtacactaacagcatttacgagtattgaaattttccatgaagcttacaaataaacatagggcttaaaagttaaaagcctctagcatatgcatatgatctgggccatggaaaaggatcaactcagagtgaggtcattactagagagattatgaaataagttacatcttagacattctcggacaatgggcgatctgaagacttagcattatcaggttcaggggacccctctaatttgcgtttcttttcaggggataacagataatgttggcacatgaagaggatgtctaacaatagagacaccagggatagcaagggttttcctatggttccatagaagttcacccatgaattttgatcgattgattg

SEQ ID NO: 21875 - DNA, 550 bp, Glycine max
gggcaaattctttatttttgcctcattcacaaggggaggggtattcggttaaatttcagggataaataaggctccctttcccttcaatctttttcctaagttcatgagttaaataaaagagattacagcctattcaacaccaccagtgaagttgaacacaagtctgcaacaaagaactaaagcaaaacagccccttgaaaaatagcagactgaactccagccatccatatttacagaagatcgccatccccacaggaagatacaaatccaagattggcatcatgttaccttgaacttgtaagtactagcttccccaaccgggaaaggtgcatcagataattttccatgggctctcttgttgtcataaccaggataatcatccttgaagaatggcacaacttgttgcaagaccagccctctcttttctggcttcttcaccagatcccatttgttgtatggatcaccctctttgtgtgttacatgaatctccccaccctctttctttattagagccttggcatttgctaaaaaacccttcagcaaccttttg

SEQ ID NO: 21876 - DNA, 531 bp, Glycine max
acatcaaaaacacagtcatcaacttatgactggcgactaaattctaaaatatagaagatgtatctataactaactatgaacaaattaattaactcatcaactatctaactatttactatcataataataactgcagcaacaaataatgtactcttgaagcaccgtgtgttcccaagaatcccaacaataagttctcaccaaaatgcgtccatgatttaacatttgcacttgtgctttaacaatctattcttcgaccttaagctctcccttagctcagatcaaatacaagactgcttgtatacaagacaagtatcaaataacaagtttagcatttgattcttaaactaagccactcattacttgtccatcactacagatacaagtgtaatttgcaattcttaaacatttttttaacaaaagaaaaaatcttgattgtgaatgtgaattgcggctgataccttcaggcagcagctaaaactaggaatccttatctcgactcatcagttcttccctatctatgaaacgcctcgt

SEQ ID NO: 21877 - DNA, 490 bp, Glycine max
gggatgcagccaatttgaacatatattcattatatgggactaatggtacatagtagttcatctctgtcaaactgaggctgggtggaaaggacatgtaaaacaaaaacaagggtatactgggttacaagtttacaactacagcgttacagggtacattactctcattaaagaacttaatattgaacaacacttttctgtatccaaatacatattccattacaaggaggtttagactgtaatattttccaacacccgcatgatccgcaggaaataatcccttatccaattctgttcaaagagactctttcattcggtcgagtgtccctttccactggagatatcaactgtggcatagtcattcctccggaaacaatgatttcaatgcctcctcgaatggaaagatttggtcttataatatctttggagataaccaaaaatatatcaccaatatatagatgattcgtagggacaaaaacactacaaagctctt

SEQ ID NO: 21878 - DNA, 405 bp, Glycine max
  unsure (1)..(405): unsure at all n locations
ggccacttcaccagaggttttttagtttataacaaacgtcctgaacaataggccataggatagcacaggtagctaaatatgcgaaagattacacaatattaatactattatcccatttggaatgaaatgacctaaagcaggaaatgctagtaagtaatttacattaatttgattgaaaccttagcaaggccatctcagaattggcccttgatgatgcaacccttgggctgctattgttactgccatcagacaatgaaacaagcgttttctgcaacaccccagatggagattcaccatgtgtantggtggctggcgagggtgtgttggaagttgcttcattggtggtgggggtggcagtgactgtgcttgaccttaaaacttcagctagtggacccccaagtgatg

SEQ ID NO: 21879 - DNA, 482 bp, Glycine max
cccccacaatgctgcaagccattttattacaatcattcaaatttacatatgcaatcaatgacggcttgcttcaacagaagtataacattttatgcatgcattttcacatgaatggtttctagtgaaaaatctttctttacacttagattcagcgttataggggagtggattagaggatgtgtaacagttacatcataatctccatggtgcagtgaaatatccacaattcctctgctatctgctgtggcaatattaggcccagttccccactcttgaatcagcttgtccacaacatctccagcagcagtatttttgaaagtctcatcggctagcgtcgtggcgttgaaaccagcttgtgctggaccagaaaacattataatcccttcaacagcaggatgagaataagcctctcttagtacctcttccaagtactctgcctgactgggttgtggatccacacttgcttctgtgagccatattgg

SEQ ID NO: 21880 - DNA, 411 bp, Glycine max
gggaatcaaccatgatgctgcaagccattttattgcaaatcggtcaaatttacacatgcaatgagtgctttaacagaattaagtataacattttatgcccgcattttcacgtgaatggtttccagtgaaaaatctttctttacacatagattcagagttataggggagtggattagaggatgtgtaacagttacatcataatctccatggggcagggaaatatctacaattcctctgttatctgctgtggcaatattaggcccagttccccactcctgaatcagcttgtccacaacgtctccagctggagtgtttttgaaagtttcatcggctagagtcgtggcgttgaaaccagcttgagctggaccagaaaacattataatcccttcaacagcaggatgagagtatgcc

SEQ ID NO: 21881 - DNA, 361 bp, Glycine max
  unsure (1)..(361): unsure at all n locations
nnnnnnnnnnnnnnnnnnnnnnnnnnctgggtgctatacttgtgcaaactcattcacaccagcataaactttatattgtgccatgtagacatgtacttggaaagttaccatatcatcgtttgagaaattataaacctcacaactaaaagtttaaagctcatgccttgaattgaagagcagcaatatttcaaaggatcaaaaaagcccatggttaagatttgcaacaatcagggccatcaatcctcaaagttacatgacatacatagctaaaaccctttcttgctgcttctatttggaggccagcgtccagaaatttaaaataaatgagggcgaagcagcaaaccaactcataaacgccatt

SEQ ID NO: 21882 - DNA, 494 bp, Glycine max
gcaaaagctctacgccgctactgatctattgggcaaattggttattattatattatataacatgcaaaactaaacaaagggaacaaaatgatacatttacaactcgaccacattaaaaaaaaaatgtaataagtcctcgtgatcatgaggatgctctcaagatcttcaccacataacacaaagctcatcaaagttgttggagcattttctgtatctgctgctgattctgcatcttctcaagattcacaagagaacatgatcttgccacctcacctactaagggaatcacagttgcatatctcgatcatgaaatcatcagggtcgtggaaaaacagttgatccacttggattctaccttcctctacagttgctcgcacataatcgatttccatttctttcagcttcttatccactggctacatgctctcacactggaaagatatatgattatccttgggatcgatttccttcttctttggcaaattttaaggttc

SEQ ID NO: 21883 - DNA, 363 bp, Glycine max
gggaaaagcgctgatctatttggcagattgtttggggttacataacacaattaaagaaaacaaaacaaaaggaacagaatgacacattgacaactcaaccacataaaaaaaaaaagcaacaagtcctcgtgatccgtgaggatgctctgatcacataacataacagaaaaggctcatcaaagttgctggagcattttctgtatctgctgctgattctgcatcttctcaagattcacaagggaacatgatcttgccacctcaccaactaagggaatcacagggaggctatcacagttgcatatctcgatcatgaacccatcagggtcgtggaaaaacagttgatccacttggattccaccttcc

SEQ ID NO: 21884 - DNA, 661 bp, Glycine max
ggcttaaaacttaaaactgaaaatcttgcattcggaggaacccattataggcctcaagacaaggactgtattttggctggtttgtcctaaaaaacaagacttagtttcgatttatatgtacaatgttaaacttaaactttctgaacatagtatttacatatgcacaatatttgacgatatgcgacccaagaaaggcgcaacagaacgaacagacatctcattgatcaaagagagaatctggtttgaggggtcgggctgctcggcggaaccaggtgttgaatgcagtaaccaaatgaggacaatcttcaacatttcgggttgaaaagctgaggcactgctgcaacaattcttgagcatctgacataggcaatgtggagatgattcgcaagaatgtttcttccagttccagatacaacgatttgttgctgggtgatattggtgaaacattatctttgcatacaaccaaaaccggcaaccaatcttctacaagcttccttctcacctgtctagaagcgagaatggtgccagcagagacagcgttggcgagcctacacgtacacctgagaataacagcaggaaggccaggcacaatgttcctccacgcatcatcacgaaacgccctctgcaaatcagcactggactcgcgttcgcgtgcgtgcgt

SEQ ID NO: 21885 - DNA, 431 bp, Glycine max
ccggagaaaaacatctattgatataacgcaaatggcaaagaaattttgaatctaactgcccctatttacaataagaatctcaattctgaactgaaattaaaaagcttgttttccaaaaactaactccatccaaatcaatttcccaagacccaggttctagtacttcttcgtctattgaagagtgaagttgaaaggctacggcttctagtcaaagccccaattctcccaaacaaattgcggaaaattctcccaaatccaccacgactttccctaactctgccgcctccaacagccagagagattcttcgagaaccttcgttggagttcccgccactctccatctccgtgtaaaccaccggcaagtggctctctccggcgaacctcccgacggcgaatcccccgcccggcaacctccatatggtcaaccctac

SEQ ID NO: 21886 - DNA, 726 bp, Glycine max
  unsure (1)..(726): unsure at all n locations
tagagcggccgataanattttaaaaaaattttttttttttttgttaacaacaaaagtcttattccactgactgcggaaattgaattgattacatgaatcacaccacaatcccatctagcacagttaaaaataaaaataaaataaataaataaaaagaagaaaggaaagattaaataaattggttttgtaagaccaagagagcaataccaaggtcaatatataatatggacttacatgaatcataccactctctttcatatgcagaatgcagtttctaggccatgaactgggtattaagcatctgatggtttctgatgcagtaattagaggcagtccaccaaaattaaccattgtgtacagtagaagccaccaaaggaggaatccaaagggatagcatgatcccaaatattgagaagggaagagaaatgatcccaaatattgacaagggaagagaaagacaaatttataaatctgaaatttgggatcaatgcgatccctttggatgcctcctccagttgcagtggaatataataaccaaacttcaccttcttaattctttggtgtttcacatagatatatataagtgtgtgtaacccttctctcctctctctgcaggcttttgtgctgaaggaaagtagaaggatcatggatggctctgagtttgagggttgaaggagaggctttcataccaaaagagagctattgctagtgcttatattaacaacc

SEQ ID NO: 21887 - DNA, 455 bp, Glycine max
gggaaatacaacctaacatgcacattgaccatgggggatggaaacaaatgcttcatttaaatcacagaataacctaacctataaatgtttccgggaaaaacataaaattccaataattactactttaccacttgagtgaccaccttaatcgaagtgctaggctttaacataaaatctcaactaagccgaacgcgcaacaaacaaaaatttgatcaccaaccaccactacgtgaagcaaaatcaccatcataatccccgccacgataaccgccaccgccaccaggtcgaggtgcaaatggtttatcattttcataagatacccgaatgcttcgcccatttaaatccttcctgtccattgcagaaagtgcccaacttgcagactcatcattggagaaattgacaaatccaaatacccttgatcttccactgtctctatcaattataacttttgcatc

SEQ ID NO: 21888 - DNA, 520 bp, Glycine max
ggtataaatggttggtggtcatgcatagaatttatgtgttgtttagctacaaaaactcacaagacagaattgatcattcatgcttcagagtagcatgggatctgcccttatctgtacatcttgactcacattttacagctagtgacatcgatggttttttctacaaacttccttggttaccaaaggactaccgaaaaaaaaaatcgccccaaaacatatgaatgagttcaccccatttccctgtggttcatggtggttattttacttaattcaacctgttgctcctctatttgactcacacttcgggagaagttgctgcttgcaaatgacatggtgtcttctttcatgaggcgtctttgcttaatcctcaatataccctgcgaaacctcaccaatggaggggcgtttcctaggtgatttgtccaaacatttgtgtgcaatttacgtaagctgtctcacttcttcaagattgcattttcccataagttgcttgtcaagaatcccatctacaccatcataat

SEQ ID NO: 21889 - DNA, 324 bp, Glycine max
acccaaaagaagcaatatctttttattctaacccaatggaagataagagcacaccccaatcaagaagggtgcttctataggataacaatggtgataaggcaaacagaaaaaaaaaggccctctttccaaataagaaaaacagagctcaggaaactagctagcttacattgcatattaagacatcaggctttggctgttggaagtttttgggatttttgattcttgctcatgtgaacatacaatacaaagggggttttattatataccttgggttgtaagaaaccaaagggtgacagaagagagagagctttgtgaacactttgg

SEQ ID NO: 21890 - DNA, 411 bp, Glycine max
ggcctggggggaagaattttttttattaacctatacattgatggttgcatgtcaccatgtgcaaaattccatgcttaaactgaggaaagttatacaatgtcaatttttaattaaaacgtacggggcaggatttcttttagagggggctaattatacatatactatcttatcttaggattgggcaatggtagtcattaaactaagttagagattcccacacatgtaaaaatttcattggctcagaacattccaacccccactcttttcttctcgaatcagcagtgtgtaggactgcatccgtcgcaagataagtttgcaacgatgagactttctccacatttgaaactattgccctgtcataatcattagatcaatattaacataaatgagacacattgatggactgacccg

SEQ ID NO: 21891 - DNA, 359 bp, Glycine max
gggacggacaaccgttaccaactaccaaatgctatatatatcctaaaagctacattttacaactgattacaacaatacaaagagagcaaaaaatttagtccatgttaattctagctggaaggcatacatcaggggcttgctcttccacaaaaatggattcacaattaaccagtttcactacatattgagctgcaggatggtacttctgctgagcttcaacgaagcctttgccaagaacatgttcaatccaatcctccactgcatttttcttgtctgataaccaagcagctgcgagtatgtatgctattacctcatgatcaatttccagctgaagctctgagccgaatgtcctttgaaat

SEQ ID NO: 21892 - DNA, 452 bp, Glycine max
ccccataactagacctagatgtataccaccaaacgcgtataacgtcgtacaactggctattgctacaatatagaacgtatacacttccttttacactctccatgtggaaaactttaaccaaaaaattggcatcgaacatattccctattattttttaagtttgacatcctgtaataatagttagcctagcattcattttcaatcacaaaatatagctagtcaccaaacccggtggagataacctcaaaatgtggaagcagaatgatctgcgactgccaaaaacttgcaggccaaaaaacagaaaagcctaaactgtagttagatctatgcacttaatcttcaagctcgataatcttaaccacggacgcatcaccaactttctggcaaacaactactcggtcgtgtgactttataactcctgatgcttttccatgatcaagggcaacctttag

SEQ ID NO: 21893 - DNA, 414 bp, Glycine max
ggggagataaataacccatatatacacttagtgcaatgtacccaagtaacattctgacataaaatggtttttcgacgcgagggggataatgtcccaatttaagcaataatctcttaatctactagattttcttttctgaatactttctgcaagcccgcatctgcaaccaaaacttcagtaagcctgactgcagtgacgacaagtgaaactgacaaatgcagaaagttgacttgaggccccgaatagtaacccattgtaaaaagatgggagcataacgtcaaggaaaaacctattgtgcattataacttttggtatcctgtgtattccaacaggaatagcgagcactaagcaactatagactagatttttacaaagattatcacttactacgagtgaaccaacctgattgggttt

SEQ ID NO: 21894 - DNA, 334 bp, Glycine max
agatgaaaactccatctaagtatcatgctaatttgtaccatccaagtcaaaaagcataactactataccgatgtaatttgatactaattatcacgggatttccttccatactaaagtttcaagggggatttaatttgtaacatacaaaattctgcgcattacatgatcataagcaagcacagaacctcagttgaccaatgtaatctacggtatgcatatataagagaggaaatcaacaaataaagcagaaaaaatactccaagcaaaagcatgcatctgtggtggccaatgctttcaccttcttcggtcatccctgtatgtgtcatcagtttcc

SEQ ID NO: 21895 - DNA, 533 bp, Glycine max
caataatcggcggcccccccttttttttttttttttttttcaaactgaacactaatcttttatttcaaatctcaatatccaaatatttctcaagtttggaacaagcatcaaacagggtttaataagccaaggacaatttctcctttttcttggtaataataaagatgcctattctgttgtgaaactaaaatttgtccttcaaatatttttcttttctgagtctaaattttcttacatatttttacaaggaaatatgctttggcaatactgtagcatcagcaatgatttggactattcactgaatgcagatttccaagcagtgctaattggttaacatcagtatttggatgcattcaaaactatgcaatatgaacctctatatagagccttgatcagtcatggcttgagcaatggttagaaaggcagagatgactgctccatgtaccaaagcctcaggactttctttttgataaccaaagtcagttgcagctttcatagccctctgataagtctgcttcatagcttcctgcaat

SEQ ID NO: 21896 - DNA, 605 bp, Glycine max
caaattgaacactaaccttttatttcaaatctgaatattcaaatatttcttcagtttggaacaggcatcaagcagggttaataagccaaggacaatttctcctttttcttggcaatactaaaggatgcctattctgttgtgaaactaaaatttgtcctccaaatatttttcttttctaagtctattttttttttacatattttacaaggaaatatgctttggcaatagtgtgtcatcctatcattgacaatttccactgcagcatcaacaatgatctggactattcagtgaatgcagatttccaaccatagtgctaattggttaacatcagtctttggatgcattcaaaactttgcgatatgaacccctatatagagccttgatcagtcatggcttgagcaatggttagaaaggcagagatgactgctccatgtaccagagcctcagggctttctttttgataaccaaaatcagttgcagctttcatagctctctgataagtctgcttcattgcttcctgcaatttagattcaaagtcctctggtgaccagtgcatcaaactgcattcatgattcagttcaagttcttcagccacaaccccttca

SEQ ID NO: 21897 - DNA, 450 bp, Glycine max
ataaatcaactcgaaacttttattgtttaacacaaccaaataagtttagatcttgatctgattacaaagatattaacaaacctgagatgagaggacacaatcacactatctgcgtattacaaatatcaactgcaaaaaggagaaaggggggatataaagcggctacctatacaaccacacagccactcaaagaaaagctgaaggttagctccaagttaattttcttcctttgcctggcttcttagccgatctctctctaagcaggaaatacaaagtctgtcaggcgcataccgattccttaaacgctcttctcaccatcaatccatggccaataacataaataatggttgtcggaatgccagttacaatcttataatcaattgggggggaaaagacaaaagaaaaaataaagtaaacaaagaagggcagccgctcgcgatctagaactag

SEQ ID NO: 21898 - DNA, 350 bp, Glycine max
gcatatgatgggtacagatagacaattccagatatagaggcaacataaaacatcgttgacaaaaaaagtccaagggagcacctgtgccaacacaataacatgctaatgtatcaacatacatacattgttattaaggttattggcctaacaaaatggtcttaaattttatataatgacaaacacatcattacagattatctctgctttacagttttattcctccctccagaaagtaaactactggcctatattttatgactcataaagctttaaattattcattcttgattgggcatatcttataaaggaatatgaccaggaaaccatgtaagagatgtgatcttctaagt

SEQ ID NO: 21899 - DNA, 377 bp, Glycine max
aggtcttcacctacacaaatatattggaatgaagggaagcacatacttcattatcttggaggtttatttgttacaaacaaaatatttgtaaaactaaccataacagtggcatcatctaatcaagcatgacttttagctttacacaagacataggggaatagagacctgggctacattattgatatttttatagcttgctgacattagcctttgtcagcctcgttagcctcattcacgacttagcggaattctctaacagaagttgaatgttgagtgcttcaggttgagatgctcgaatcttttggaggtgtgttagcatacttccaggtaatgtgttccagtccatagtagtgtattccgcctgctacatcaccaat

SEQ ID NO: 21900 - DNA, 637 bp, Glycine max
ggcgcattaaaaaattgctagcactactctttttatttatgtggaaggttttgcagacctaggatgggggaagcaaaaggacatgataaaaatccaactcccatcagtttcatcacagcatataaaccatggtaattgccatgtgatgtgagcaacagttaattggcaaagtatgcccatgttaattaaaaagtgacatacttcagttcagaaattcaagtctttcaggaactaaatggccctccaaggcacaaatttacttgaacttcaacgcaatgtgaactccaatcacatcattgcacattgtcagagttgctaagcataaacacagtaccacagtggtcataaacaacacattctggggtcattagacttataagtcactttttccagcttatgcaaataatccgtttcactgaggttcctcggtactagtggaggcttcagaacgccttctctttgcttcattgtcacccagctgcagtgaaacacacaaatcttcatcacagttattcctcaatgaagacaagttctctgttgcagttctgtcctgtatgctgtttttatgcaatggagaccgcccaatgaagctcggaatgaactggtgttcgatactgggaccaaccttgattccatc

SEQ ID NO: 21901 - DNA, 672 bp, Glycine max
cgaaactgaaaattttgattcaatactttcaccaattagctttttgcacgtagagaacatacattttttaggcatgatatgaaggaaaattgtctctaacgttacttgctctgctatttacctagtgaataataataataaagagctaacaaaacatttatccttttttctgcgtgcttgaactttgatccttggctatggctttgaggactctagagtgtgctgatccacgatatgatgagccgcaaagaagaacgttaaacaatgcttgttgttgagaatgattctagtcatgccaacagagaagcatgactacacatcttctgattatgtatagtcttcctttttgctctttgaggtaccctccaagccttctgcataaaagtttcttctttgaacctctcatggaatctttgctcatctttgagtctatgctccttcctttctttgttaacaacttacactttgtagtgtacagagacagtgtgtgtgttgaaacttgaaacccttgaagcaatgatacaaatggggctccaaagggcttcttatagagcgaaatgtgtggtccaaggttcctaaagaaaatgtctataggaccccccaattcagatttcatgctcccattctctctctctctctctctctccaccaacatttatgtggcatcaaccc

SEQ ID NO: 21902 - DNA, 571 bp, Glycine max
ggaagaaatcattagctaatgcttcataaatatacaagaaattcttgtacatcatttttctttatatcaaacctgataaaagagatataggaaattataacgtgcaaatattagaatccaaaatataaatagaaaaatcttaattattcggagcatcttcaaactaatactacaaacccagtccaattttaatgactacaacattttttgaaatcggaaatcagtcatgcttcacgtgggccatcataaccattagaatataatgttgaccaccaaccttgaatccttgtccttgtttacttaaattccctccaagacaagctgggaatgaaaaaactcgcaaatcaccccaaattaacacccccacctgaaaactccacctcctgagcaggtgccaaggatgagacccagtctgatgtgtgtgtaggaagaagccccaatgcattgagcttccaaacacctagtgccaggccgcccaaattaagggctatgaataacaacttaggtccaagaagctccaccttattgtctttgtagggctcaaacatctttccgacactctgtagggcac

SEQ ID NO: 21903 - DNA, 751 bp, Glycine max
cgcacaaataaataatttcatttcatttacaagatcaagatcaagctgaagtagtttgtggggggaaattacaatgcagcacaaataaatagaccattaattttgaaattataaaaacaaataataactaattgtaaatacttctctgtattaccatggtgtcagtgattgtgttttggcacgagctgaaaacaagccaacaaattagcaaaggcaaaagaatcactcctgtacaatttatacttttgagcattattgatgataaagcatcatatttcctagagttgatcagtaagtgtataatgcataccgtaccacctttacctgaatcacatcctcaaaaactaggccagggtttcacaacacataacgaacaaacttcaaatttatattgggtggaaaggcgtggcatatcagagtagtggttacttgtcaattgttagagcttcttaggtaagttgtaattcttcttaaggaactttgcagctgcctcatcattcctattacacaagactcgcaaaagtgtgttcggttctgttggactccattgatctgctgttggaggcaatgaaagccggaatttggctgtagaaccgtacatttccatagtaagttgactgaactgctgaattatgtgctcagtatcagcacgaaacaagggaagtacacctttgacagtggtagaatgcttttctatcaattcagctggcaatccatctccattggaccagaacaagccagtcagaaactt

SEQ ID NO: 21904 - DNA, 811 bp, Glycine max
  unsure (1)..(811): unsure at all n locations
ggcatccttattttcctgatatttgataactaaattttaggttatttttggactaatatatattgaaattttgaaatacatcacctctcacaaggtaatctagaagaattaattttcaaacaggcttaaaagaagacctctcatctctgtttactaacagaaaaggagagaaaaagacaagtattaaggagaagaaaatagcatctgcaaaaaaaccagagcagaaatctgctacaaagaaagtatcagaggaagtcccatcatttattcaactttatcagatcacgaatgaaatatagcacaatagaggggaaggtcccatataacgagccgacaacaaagttagcaagctcatttgtagaatcattcgcttaatggagatcacaaggatgaaactttctcattgagtgcttctttaactgctctcaaaagcgatgccttcaatttctggtttgtaacgataataccagatacaacatcaagaaactttccttttgaaaagtccagagggttccccgcagcatccatggcgatacctccagcttcagtcacaacaatgctgccagcagcatgatcccatattttttcacggtatcctctgtgagggaaacgcanatatatagccccatctcctcttgacaaagctccatattttgctttgctatcaattctgacctgtgtgctttgacaccagtttttctgcgattgagctannatagtcatgccaggagtgtgctgcttcaaaaagattcgaaaatgattgctccctctgattattcatatcacagacatgcacccctagttgtgtaga

SEQ ID NO: 21905 - DNA, 424 bp, Glycine max
actcgagccgctcgagcagctcggggaagtcgcaaggaggtgcagaatggctgatgcaggtgcagaaggagcatcttcttccacggtaggccaaattgacgttttctggcacgaagggatgctgaagcatgacacgggcaatggcgtgtttgacacggggatggatccaggcttcttagaggtgttggagaagcaccctgaaaactcagacagagtgaaaaacctagtgtctattctcaaaaggggtcctatctccccttacatttcttggcaccttggtacacctgcaaaaatccctgagcttttttcttttcacactcctgaatacataaatgaactggtagaagtaggaaggttgtataatagaaagggggtgaaggcagccttttgtgggtggggacattttttggaaacccctggattc

SEQ ID NO: 21906 - DNA, 513 bp, Glycine max
ttttttttttttaacattaagttgcaaagtttagagaccaatttatcattaaattgtcgcattaatttatcacacttttttttgtacattcaagaattaaatttaaaattttcatcttttaaggactaatttgtcaacccatcacactttcaaagacgaatttggctatttacccctaaagttatgaactaagaaagctatgtgatctgctcttccttcaatcttaaacttgccacaggtcgctgctcattgccagtaacacccctgctgctggaactatgtttcacgtcgggtatggcaaacttttgtgcttttagctgggatgcactattgttggcaagtgtgtggctattagtcttagctgcaggcacatcatgattgtgttttcccttccgatgttgctatgacagcttttggatccattgaagccctctcaacatgcttccgaactttgcaacccttgggtcgtgcatttgaataacttcttggaaaatggttgctttgaccactttt

SEQ ID NO: 21907 - DNA, 713 bp, Glycine max
acgcaagcttggatcctctagagcggccggttggtttttttttttttttttttttttttgggcaaatcagctgtctaattagccgtgaacttttgttatttggcaatgttactttagtaacaaccttagtggccttaagccagaggatagtgacaaattgtaagtaccttaacaatttagcaaactaaacctattttactttgctcaaatcccgtcatcataaggaacggaagtggtatcaagccaaccatctccattgatgaactccgaaacagtgaaattataggcatcaccataatccatcaaatggtaccctaaccattgtacacgcttatctatgctggaaccaggtccatagttgtcatactcaccatattacaaagtttccaatccttgctcattagaccactttgtccaaccctttgggtcaatgaagtcatcaatgtaggactcaaggtaaacggtgcgagaatacaccctccatggcctcccaaggtagctcttgaagctgctagagttggaatagagatcaagggttgctatgattgagcagttttggaatgagatgccagtgtcctcatctgggctatctctagattgtgcagtgattactgtgaattgaccaggcattggttttcttgatatgatgttacattcttgtagaatcactgctgcatttccaaatatgtaatcaatggtaccataaatgtcac

SEQ ID NO: 21908 - DNA, 327 bp, Glycine max
aaaaaaacttaaagaaggcaattgttaaaaagagtcttccaatcacgacactatccaaaggtaatattttggtcaatgaacaagtggtgttgcttctataaagtgaaacagtatttaggaagaaaacacggtaaccaccgactattaacatttcgacatttcatgctttggtgtacgcaagactcaaccttcatattacagaacacataacaaagaaataagagttgaaccagatcaagctatttcagaacttgagacaaattcaagttctatttccaacttcatgtattgttatgaggaatcaagatgatcaagtacaaagatcta

SEQ ID NO: 21909 - DNA, 1158 bp, Glycine max
ggatagccgttttaagtatttaagtttattcaaaagaaaataggagtatagaataacaattgaatatataattaatctaaattctaatcacacgctagctcagcgaaaggattattagaatattctattcttcgttttttcctgagcatcgagaaacgtattacttccaataccgtgtttctaaacagaaggaatatgtacactaaagacaaaaagacttaaaaaacggaattacagggaatagaaagaaagaaggaaaggtaaccaaaaaaacaaaagaagcagcgttaaaaacttgtaaatgttggggggggaaacgggatcaaacccaaccctgtttgtaacggtcgaagaggttttctgtttgggcattcctgaaggcactacaagctatgacatagacccatatgaggaccaccactgccacaatgagaatgatatttgctttcctccattcttttctgaggttacccaatagaccagccttgcacgcattacaattgtagcatagctgattctggtcattgttccacaagtagcaatctgaatcagccatagggttcacagggtttgtacatagtatggggtttacataattgtacccacaagcagtgggaggcttgcaacatcctgactgtaagggggagatatgggaattgaagaattgatcagcagtgatgtaatcctgggtgagcttagagcagacatcagaagcagccaaacagggccttatcttctgccaactcccggaaccggtgacgtggttcctcaaccaggaggagaagccgtgaagcctgtactccttgtagcctcttccggggacatcataggctccatcgggtctggtgacgacgaatgcgaagacgagaacgaggaggaggagggcgatgaggagagccatacagaagaggtagagggcgaggagaccctgtttgttccagtaggcaccgacaaaaccggccagggaaacgaggaggatgaggatgccgatgatgacaatgggccaccggaagttggccacgcactcgttgtcgggcttcgatgccagccaaatgccggaggctatgatcgggattgaggccagcgtagctatcaagttcagcactgcggtgatgttgttgcttacccccatccccaaccccaaccccaaccccaatc

SEQ ID NO: 21910 - DNA, 494 bp, Glycine max
gggcctaagcaattgaattctttttacaatgaggggatttacaaggctattcttttgaaacataatattaatcaaggaatacattgatcttatggaaaaaaaatgtaattcaattcaaagtgcaatctctgattagacgctggaaatattatgatcagtgccaacagaggaggaatcaagttgaaattcaaaagattcagccaatttgactgcatctgaaatcctaagccgagttccctgttgtccaacaacagtggcagcaaccttagctgctaatgagcctatgcttctcaaatctgatatgcctcttaaaagaccatagagtatgccagatgcatatgcatccccagcaccacaagtatcaactggaacacatggagaaggagggatatatacagcttctccttttacaccaatgtaagagcctgtaggaccatctgtaacggatactagaggaacaaagtggctcagataccttgcagctgaagcagcac

SEQ ID NO: 21911 - DNA, 598 bp, Glycine max
  unsure (1)..(598): unsure at all n locations
acgcaagcttggatcctctagagcggccggtgggntttttttttttttttttttttttttggaaatattcaagaattagataaatacaactcaggcacagggcgaaataccatgatggtcatcaacaagggttcatcatttaatccccaaagatggcagaccgaatgcatacactacttttctttttggtgctatgttccagtataattgtagcctacgaaagaatcttaaagctacaaaacctattccacatcaccagatctacgatatggcatgtatctatggtcctttgcagcattcctcctcctccttttctcaacaaatgcttccagtttgccagatgacttgagatggttatatttttcaataagcctttgcttccgtatttcagatttcttgagataaaaaggacgttttccctgctttgctgcttctctctctttctttttgtgcttagccaatattctgcatcaatatcttcgctgaatcagacttcacttgtttatcaatccatgatatacgttcttctatttcatttacacgcttcgggtctttatattttttcaattccttcttaagagcctgtctttcagcatgg

SEQ ID NO: 21912 - DNA, 717 bp, Glycine max
aaaaaataaataatgcactaaaaatctgttgtataatagcaacaggaatttcagtttggtgtactctgaaaaatcacaaggacaattcatttattacggacatccttttcaggttataatactctccttgggcttgacttggcacaaaccgattcctcagaaatcaattgactttattattatatcagcatttttcttggacttcattataagttctgcattaagcctgtcgttgttctctatccgctgtttagcaatgtctggaggcttgccagttgaaatatgcctctttaaaactcgctgcattgctttgtcaatgtcaatatcaataaaccatttctcgtcaaacaaagacgatatctccttccataccccatcttccaagagcaaatagttaccttctacaataacaaccttgtgctgaaggttcacaaagatatcatcttcaactgggtccccaacaccatggtcaaatgatggtacataaactgatccatgcattctcagattcttgagacactgaagtagtcgcaatggattgaatgtccagggagctccccttctggcatgtgcttcctcgggattctccatttcgtctagttcagatcggtaaagatgaaaaccatccatgggtacagcgatagcaacatctggaagttgaacctgagagtcataaggaagaagctttctctggcttcgagccgattcggctcgagg

SEQ ID NO: 21913 - DNA, 1085 bp, Glycine max
aacacgttaaaatcatattttattatctacatgtaattcaacattaattattacaactttttaatactcaaataggagtatcagcggcacgagcctctccctagtttcattatggaaatgcactcaaaggaacttcatatccatgcttgaacatttgtcccaatgtttttaaaaccatggaaatctggccacggctcatgtaagctttgtacattatccataatgttttctttgagcatttaagcttgacattttccatctcttcaaggacattatgcatttcgagtaaggtcatctgtgacccatacatgactagcttacaatgatataaggatcggcagatactccacccagagatttccgcacgtctcacaaaattttctagcttttctactgcattacatcgataataagttgcaattatgcgtctcaaaatacccttggttgttatagaagtcccatgctcaaatgcctcatttatagcactctccattttcgctaaccagccttccttggcatagagtttaatcaacaaaacatttaaccatggcctggactctttttgtggaataaacttcaacaataactctatcttcttaagtctatctgcatgagaacttctacaataggcacatatcatacatctgattaatgaaatttcctttatattaacatgatcccttataaaggaatacatctcttccatcttttcaagattacccgaatttgcatacccacgaagcattagaaggtgggttttcatgttaggctcaacagagctcaacttcagcatttgaaacaccttttccatatcatcccacatccaagccgtgatatatccagcaatcaagtgattgtaagtgcagatgttcatggcgaggtttaacctttgtatctcactgaatgttgcttccatgtgatcaacgagcatcagcctaccataaacagatagaagaatattgtacgtggcaatagaaggatcgcaagtcagatccctcttcaaatcacaaaacaaagactgacagttatcaggaagaccattgaacataaaagcacccataagcgcattgtaagtgctggtcgtc

SEQ ID NO: 21914 - DNA, 543 bp, Glycine max
acgtacagctggatcctctagagcggccgcgagggtttttttttttttcttgttttttctggttcaaccggcacatctgaattgacattctttattttaaaatacatgcccaactacagtgctgtaaaactgtagatgtgtgtccctggatgactgaactataccaaactgttccattgtagtcattatcaagaaacaaaaagtaaggcttcttattgggcacagtgagcaaagccacatgccaactcgtgcagcatgtgttgatattagagataacagtgtgagctctccaaacttacaggaaacaaaagcagccattctctggaaaatcgcacataaagataccataagagagaaaaaaaaaaattaagccttgggaactttgtctagcaaaacattatccggaacgttaagctctgcaggagtttcttgaacaccacctagcactgaatgatattcctcaccacgacgagcaaatttcttgtaaagaacttttacaaattcagtctcatcaagtccttttgcattttcagcagcatgagc

SEQ ID NO: 21915 - DNA, 736 bp, Glycine max
actatattgagattgaagtttcaattcaaaaataacataaccactcttctctcctttgaaccaatagaaggggaaaacagtggtgattaacatcctagacagcagaggtatagctggcatggggcgaagaaaagaaatatcataatccatgaaaatacaggttcaaccggcacatctgaattgacattctttattttaaaatacatgcccaactacagtgctgtaaaactgtagatgtgtgtccctggatgactgaactataccaaactgttccattgtagtcattatcaagaaacaaaaagtaaggcttcttattgggcacagtgagcaaagccacatgccaactcgtgcagcatgtgttgatattagagataacagtgtgagctctccaaacttacaggaaacaaaagcagccattctctggaaaatcgcacataaagacactataaaagaagcaatcaaaactaagctttagcatatgtgtctaccgtaacatgatatgcagatattagctctgaagaggttctgtaaactccaccaagcaatgaatgatattggtctccatgtcgagcaactgtcttgtaaacaaccttttgaaattcagtatcaagtagtcctctcgcattatcatcagaataaggttgatgccttattagaatattttaagacagaatgtaagaagaagggcatatcatcatatgtgaacattatcaataaccatcagggaataagtggc

SEQ ID NO: 21916 - DNA, 378 bp, Glycine max
gggcgaaaggatgtgaaagattaaaccattcgcctgtcatgagttgttgtttcctgagacgatctgggcgttttggagctgtggggaccgcggcttttggctcatactctgttgtgctctaatgacagcgctcgttttagagcttcggctgcattgccggtccctgagccattgcagaattccctatggttgacatgtcctgtgttgcgtgatttgtctcctcaaccttcaccttttcccgaccaatttggaatgcgtccgctctattcttatagagttagtccggttccatcgtctggtgtatctaaggaagcttctgcggctgctggtgatgagtctaagccacatgattgttttggcaaagatactattgcaaat

SEQ ID NO: 21917 - DNA, 368 bp, Glycine max
gtggaaccccgtgaagaacgagaggtccttgagcggatgatagccaaaatgtgtttacttgcagttccatcttccctcccctgttaattcaccaaacaaataccaaattgcatcacggattagttgatccctcctttgaaaacaaaacgatgccgattttcaaaaccccgttcaacggctactccgtaaagttcagccccttctacgagaaccgcctggccgtggccaccgcccagaacttcggcatcctgggcaacggccgcctccacgtcctcgacctctccccggagccttccctccccatctctgagctggtcgcctacgacaccgccgacgggatctacgacgtggcctggttcgaatcccac

SEQ ID NO: 21918 - DNA, 528 bp, Glycine max
cagagagacaaagaaaagaagcactttactcaattcaatttctttcgttcctctcactcacaaactcaaacacaacatgatgtgggaatgggacgattaccaagacaccatccccaaacacgacctaccccaacccgattcccacctcaaattcgatttcttctccgccctctccaggcccaaggattattacaagatactggaagtggattacgacgccacggatgacgctattcgctccaattacattcgcctcgcgctgaagtggcacccggacaagcacaaagaccagaactctgctacctcgcgattccaagacataaacgaagcttatcaggttttgagtgatccagtcaaaaggagggaatatgacataaatgggatgcgttacgaatatgattacaatataattgattatctcaaccgttacaagggccttatattgacgtgcaatggccttggcataaagcattcgatatggtaaaaaacaaaaccaacatcagacatccttccagtgcatctgggaca

SEQ ID NO: 21919 - DNA, 756 bp, Glycine max
accagattccattcaccactgccactactgctcaaaagtgatcttccgcaaaaactccatccttttcaattcccattctctctctctctctcaaacctgctctcacacatcaaatccaaccacccacccatgtgaagagggtgaggagcagaagaaaaacccttctaatggaaaaactctgaaattagggtttggtttcccccaaagggagagaagaagaaaaaagaaggaaggagggaggggatgatgaagcggctgttgggtgggcccgggacgattagcgggttcctgttgaggtttgggcaatgcgcatttggtgccgcttcgattgctattatggtcacttcctttggcttctctagctacaccgctttctgctatttaattgcatcaatgggacttcaagtgctctggagctttggacttgcatgtcttgatatttatgctttgaggagaaagagagacctacaaaatccaattcttgtcagcctgtttgttgttggtgattgggtaacagcgactttgtcacttgctgccgcatgctcatcagctggaatcgtagtattatatgcaagagacctgactgtatgtgcgactagtaagcgtctcacgtgcaacaggtaccaggtttctgtagccatggcttttctcacctgggttctcacagcgatgtcatcgcatgtgatgttctggatcttggcctcagtctagcttgacgtattttctttgctagacacaagagaccaacatagatat

SEQ ID NO: 21920 - DNA, 620 bp, Glycine max
tgtttctatttgtgtatctgcaaaaaggagacctacccttcagtattttgttgtagcttaggcttggttcggacttgggagagctccaatttgatcactccaaaacaaaaaagatatcaatccaatccaatccatctaaatggctctcagaattcacgttatttcccctttcttctcaatctccaccacctcccccgccgctctctccagccgccgaatctcctgcaccgccgccggcgatggaggcatcagcgacgcggccctcgcatcggagttggcggcgagggccgccagaatgaacgcgcatgcggcgaatgcggaggaggccatgcgcaagagcagaaagctcctcttcggagagctctgcgagtacatgggcctggacgaagaccaggcccaacacaaatggagcaacatggatgatgaccagaaatgtgttctcgtgaaagggtttcttaaagagtggggttctcattttcatcccttgtccgccaggtccacaaaagagatgttggaggaatatctgcgacaaggaaactcacctcccaagccaactaattcttctttcttcttcgagggactcaacagaattattggttttccctagaatatatattact

SEQ ID NO: 21921 - DNA, 447 bp, Glycine max
ggatacaaaccaaaatttactaaatatcctgctgatgctacattcatccaaactctgatatcaaggaaaatatcatttttcctaaatacaaataagcaagtctaaagctaaattactgtaataattttcaaccaaataactttcacctaagaaaggcaatgcagtagtctatctgtggaattgcctatcaaatgttaaaattgcatattacgagataaaatctgaattgagaaagtaacacagttccacgaaacgttccagcttccccaagtatatacttccatgccaacatctcaacgagagggaatcatgccggttttcctggcataggcaaagatgccaccggcctcgatcactggacccgcgtcgccgatcggtttcaagcgatactcctttccggtggtgtgattgatcaagcggctctctccgagctcaatcgtcaccaca

SEQ ID NO: 21922 - DNA, 450 bp, Glycine max
ggatacaaaccagaatttactaaatatcctgctgatgctacattcatccaaactctgatatcaaggaaaatatcatttttcctaaatacaaataagcaagtctaaagctaaattactgtaataattttcaacccaaataactttcacctaagaaaggcaatgcagtactctatctgtggaattgcctatcaaatgttaaaattgcatattacgagataaaatctgaattgagaaagttacacagttccacgaaacgttccagcttccccaagtatatacttccatgccaacatctggaaggtaaaaattagccagtccaattgatgtggacccgtccgatgttagaatcccagggaatacttagaacttgaagagcaaatataaataagagccaagctcacaggcttttgggaacacataacgaacatacgcataaaggaactctaactt

SEQ ID NO: 21923 - DNA, 461 bp, Glycine max
aaaagggaaataaattaaactattacaagaaataactggctcagaacaagaaacaaattatccattggtgaataaaatggcattcattttacaacaataggataagaagcgattcctcatacacgcaaaaaagtaactattaactagtaattctacagcttctaatttccctaacctcagcaatgcatggattcaaaaaaacatgcctttgaggaatacacactatcatactatgtgagttaatctgcaatgatatcttcattctcacaagtatattatgtgaagatattacaccaaaccagatctacactgtacaagggatggggtcagaagatgggttttgcttacaaactgaccacatcatctccctgaagtggttaaggttctctttttagagacctcagaattgagaatcattgaaggtgaaggaagagattttgaaccaggagcaggagcaggtt

SEQ ID NO: 21924 - DNA, 433 bp, Glycine max
ccaccaaagattcgtcctaagtgactgttattaccaactaataaaaaatagtgattaaagtacaaaaactcgatgaatgatagtcaaggaactaggaacataggatgatacaatacaacatacactattcaacgtcatcattggatacatatgttaaatgattaaagacagaacattaaacataatttctatcggttaatttagtttagtctagtcttcgcatcttgacatttacgggaatctccttgtaagaatgaaccttctgaactgctcttcgcaagggtcttccaaaagaacaccttggagcttcattccttgaatcagagctttttcctcttccagtttttgaaattggagattgagtgacaagatatgtagcatcctctaactcgaacaaattttctagaggttcatgttcatgggttttgaacgt

SEQ ID NO: 21925 - DNA, 427 bp, Glycine max
ggatgttatgaatgaactatttattcaggaataattggaaaccatcgcatctagttttacactttcagtaggcctctagcaatcatttctcggaggaatttctctgccttatcattttcatctttttcaagtagggcacaaataatggttttaaaggttatagcattgggcatgcaacctttgccttccatttttgacttcaaatccatcacatcaccaaacaggcccgctttacaaagcccattgatcataccattatatgtccgaacattcagatgatagcctttaaccaaaagatgctggaaaaactgctttgcattctcaagtcttccacccttgcacagtgcatcaagaaggattgcgtatgggtatacatttggctgaattccctgctctttcattttcttgcataatgcaattgccctct

SEQ ID NO: 21926 - DNA, 471 bp, Glycine max
  unsure (1)..(471): unsure at all n locations
ggggggnnnnnnnngggtcacggacacaagttctgttgaatttgatagcatttttctcccacggatagattgatgtccagagtacatgccagtttataaatccgttcacccagacactttagatacgtacaactcttcactgttccatgcacataatatatatacatagaaacgttaactttttagctataagcacaactgtttttcatatcttcatctttattgcaaaccacgacgtaagtgccgcacgactatttccgaagcatctgctcctcagcatgtcatgtctggagaaagttaccttcaaatatgagatgctgaggaaagatgaattaacagaaacaaaaaagagctcaatttaaatgtgaactagcagaacatgcagctggagtattgtcatcatgtgaaagatttctctccactagcttcaacattggtnctggttggctcacccctcccatggaactatcc

SEQ ID NO: 21927 - DNA, 459 bp, Glycine max
ccgaacacaactctattttttaattatggtttctaactgattgttatgatatcatacaatcatcatacataagtatccataatccataagtagtgtatagatcacatggtctagttaatgagcaaccaaaagagtagtaataataatgcatttagccaccggctaattggatagacatgccataggctagccaagatcatatattattgatcacccaagatgaagaatcttcttatctgagtgagggtaaacagttccaccttccaacatatttggattgaagaagctacgggaagctaatgcctgaatggcattcagttctggcccagaaaccatgtttacttgctgaatcctctccacgtcagttatcttagttcggaggcaaagattttcattttccagttcaatctcccttttctggaagtattcaatttcagccagtagcatctcatgtttctt

SEQ ID NO: 21928 - DNA, 443 bp, Glycine max
gctctagatcgcgagcggccgcccttttttttttttttttacacacatttataattgcgtcagattttcataaaaagtaaaattggtcttcaatattaagtctcctaagtcctaattaataataacattatagtaataagtaatgtctaacaactaacattaacacctaccacaaccaacgacggttaaaattaaaaggaaaaaaaatgtacacactaactccgggccccactgaaacaggtccatttggtccaacctcttctctaactatgactcttttttttttctaacctgaaaaaaaaattcaaaaaccgggaagcgacggtggcgaagcggtgtcgggctcaggcacgtcctccttcttccgccgcatctcgaggacctttcggtggtggttgggagtgcaactcgctggagaaagtacggctacaggcgggtctata

SEQ ID NO: 21929 - DNA, 412 bp, Glycine max
ggctacttaaaaaaaaatcatcttaaatggggtgtgtatatttgtcataatcacattacatatcacaaatagttaaattgataaaatttaccactcgctttaaagttgtgtacttatgtgggtgcattgatcctccaaaataaatatactaatagtcaactatgaaactttagggacttttaaattgaaaaacttggaagttttgaatccataacttgatctctcggagggttatgcacctgtagctggcttctttccatcaatgaataagcccatggttttgagccaccgcatcagatttcgatgttccttcacatatagccatgcttgaagaaatttaaagaggctctcgttcactcctctctcctcaatgtaactgtgaaacgcatctctcatcttttcatctagttct

SEQ ID NO: 21930 - DNA, 499 bp, Glycine max
taaaatcacaaaccaaatctcgcaaatttgaatgataatagctgtgtttgaattaaaaaaaaaaaaaaaaagggcggccgcccgtcgtattttttttttttattttttatccagtccgctagcaattggtgtaaattgatagtaatcagaggcagcacgacctaagagagcacgggaatgaatattatgtacacaacaaataatggtttctccaagcagctaaaatacctatgcgagtcttatttcatctcactgtcactacaatttagctaagcttctaaaaagatatatgtcggaaattctatgcatctatgaagggctttacaggatgaatcgccaaagaacaataaagaatcgactgaagcaggcaaattgatcaaataaaacctgccaggtagagtaataatatttaaattttgggctacgcctggagattgcaacgttgcaaaatagggaggtcaaagttcaaatatttcgtccagtaacttcggtatcttct

SEQ ID NO: 21931 - DNA, 295 bp, Glycine max
ggcccccaaccccgggaataaaataaggggggccggaaaatagagggtaatgcgtccatctcaacaccgccaagctatgtatattgcgtgacttctacagacaggaactacaacaaaatttacacagacatttctgaacgatccaaatttggcaaactattctaaatcaactctgaggtgacgttttaacaacactaggcatgctgaacaccccgggcggggtgctccatcatatggttcgcgaggagtcccacctgcgttaacattgctggaatatactggaaggctgagcata

SEQ ID NO: 21932 - DNA, 392 bp, Glycine max
  unsure (1)..(392): unsure at all n locations
cgacagaagggggattcagtctctcagtatattaattcaccacccacagtttctcacttttccttcttagttcttcccttttcctttgtttctaccaaaacagcaaatcaaaacaaaccccttttgatttgatctctctccatggcttcttctgtatccaccacaccacctttgtactttgatgagaagtggaagctgtcaaagaaagaaggatccaccagaagcaggtcctcaagcacccctttcatcaagaattcttcctcacagagaaggtgtgcttttgctagcaagtgtgcgaggcttgtaaaggagcaaagggcgcgtttctacatcatgaggcggtgtgtgacaatgctcatatgcntgcgtgactacagtgattcgtgaagaga

SEQ ID NO: 21933 - DNA, 454 bp, Glycine max
gaattaagaagctaagacagagtgtgtgagcatgaatgtgggtgtgtgtgagatgcattctgtaatctgcaacagcgccgtttcactttcgccttaccactcttgtcgccggaaacctaaccgattgcgggccaaatcctctctgctcgttcagaaacaggacacccaactcggcgagccactctccgactccgtctccgtctcgcgccgcctcattctccttcgccatgccaagagttcctgggataaccgctctctccgcgaccatgaccggcctctgagcaagtctgggaaagaggatgctgtgagagtttcccgcaagctccaacagttgggttggattcctgaacttatcttgtctagtgacgcagcgcgtactaaggagacacttaagataatgcatgagcaagtgcaggagctggtggaagctgaggttcattttgtttctagtttc

SEQ ID NO: 21934 - DNA, 436 bp, Glycine max
aaataataaaaaaaaaaaatagagagagaaattaaacaaggcaaatcacggaaggggcgaacaaggatcgtggagctgcttccagtttctctctctaaaacgcgtaaaagcgaataactgaaaccctagcctctgtgtctgttattattagtatttacttcgattccacgcagcgaattcaattctctgcgatctgtatccgtgaaatcaatgtgcctctcttggaatcgtactgctactcgcaacggtgaccgccatcaacgatgaagcagtcacgtcgccggcagaggactctgctcctcgctctgctctttctctccgtcgttgctccgctcgttttcgtctctcaccacctcaacaccatcactcccgacggacgacgagattttcttgatgagttatcgagttttacgcataggacagaccctttaaatgc

SEQ ID NO: 21935 - DNA, 810 bp, Glycine max
gaaggctgaaaagcagaaaagattctataagtttgtaggcagagacctagcttacctgatatcaagtcagtgagctgcaaaccgcttggatccacaaatgattccaaattgcattcagagaatatgacaaagcagcagaatgctggttcatgcaaggattcccctcagtctcagtctcaagaatcttctattattgatgataacttcattcctcctctaccttcactagaaattaaaggtggctctgaaatggacttgtccgatattcagaagaatctaaaaaatttgtacgagtataatgtcatgctaaggaacaaattattagctgcacaatctctgctcaagtcttcctcaactgggcacacttcctcagtaagcaagggaaacttaggtatcttttcaaacaagagtctttatcggtgtgcactggtcagatttgttccatgatttttacagcaagcatggatgttctacaatggaagttgattcttgattgaaaatgaaaactgaccaaagggaactaaagattgtaaaactttgcaaaacgcaaatgcaagaatgtggtgcatggacctctacttctcctggccagaaattccttccaacattttaagcttcttagcattgtgatcaccatttgttgataaaagggattttggttctttcatgttaatttccggtgtcaatattcatttcacataaccttgtacagctattgatttgttttgtgcacagtagagtagcagtagagtagcaccccacttgttcttacaggcattattgttgtgaatgaatagtccttcagaacgt

SEQ ID NO: 21936 - DNA, 453 bp, Glycine max
aaaaagagagctttttcattgtaatttccattactaattccactatttgaaattgaacttgtctatgtacatagaaaacaaagtagttcaattttgaaaatgaaagaatgatgcccactatccatatccggcacctatctaggcatcagcaccccacctcacctgtaaaattgtagaacatgttcaggaacccccatgacggaggtagagtactgatctataaagggcagcaacatgtaggaagcagatgagcacaattaggagatcatctaagaaaccaactactcctaatatcccttcaggaatgatgtcaatagggctgaagaggtatataacactcgctatcataacaacaaagacgcgagcgcgaatgagaagaggaagggatctgtgagggtggaggaattccctgagcagcctctgcaagagaaagggaagatctcgcagtctctg

SEQ ID NO: 21937 - DNA, 516 bp, Glycine max
ttatctagagaaaggtttcaaatataattgaacaaaaaaattccaacgaaagtttaaataactcaactgaagtacaactaccagactaaacgatgatcaagtaacaacaaacatttataggaacatgggtatagtgttaatcatactaactccgcaaaatatgactcttgaccttttcgaaggtaccccccggctcttcactaccagataagctgtgtcacgaatcatcagtgttagttttgcttgggggcgatttcagatactgaaacttgggttgaatactttttaattctcaaagaaataactacactagacaaaataccaactacgggaaaaatgtaggaccaaatttgagatttcttagagccagaggctgtagcaacagcagcaccagcaaggcttccaatagatgtattttgcaaaatcatggggaggacatccaatagcagtaggaagaagaaaatccaaaagggtcctaacatcagtagccgctaaggtatagttaataacataata

SEQ ID NO: 21938 - DNA, 469 bp, Glycine max
  unsure (1)..(469): unsure at all n locations
gtccaattgcttagtggcttatattttgacatatatacatacaacaatgtaatacaaaatccatcacaaaacaatacattcatgctcatttaaatattctctttgagttgacaaatgcttccatatatagttgcatccacatttggcttttgccaatgagaaaacaatcagggttgtccaagaagtgaaggcttgtagaaaacatggctttgtgcaatctcaattcgttctcgaggatcattcagattttcatccctcaaggctttcagaatagcttgtgatgactgttcccttgatatcaaaattttgtagaagtgtcttcaagatagggcagagctctacaggagcacaggttttgttttcttcaggatgcaacacattcaggctagattggctcaanaagttcaaagaatgcctccactggtgacactccctgaatcattcctttgccactaatactgtcacccat

SEQ ID NO: 21939 - DNA, 702 bp, Glycine max
aaaaaaaagtaggcttgatccaatattttaaatcatattcgtgcaacagttgaagcaaaaaattgttacaaatcctacatcagttggccataaacttgtgtcaatttacgaagcatatgagtagatgccatcaccagtaagaaatatacggctcatggcttacattagcttgctgcataagtatttataaaactgcaagattttttttcacagccttaggcactgtcagattcatttcctgaatcaatattcatgggttgtggattcttgtagccactaatctcatccatgtaacgttttttatcttcacgcgccttggcctcgtatggttccttctcttccgcagacaactttttccatttctctccaagtactcttcccacatccgtaaatgaaattccaggattagttttctttagattctctctttccaatttagaaaagaacatgaaaccggacattgcccttttgggtgcatttgggtcctttttcttcttctgttttttcttctttccatcttcatcatcttttgatttctttttagaagtagatgccttagaaggcagatccttctttgattcctttttggcaggcttctctttctcatcaccactatcagtggcatcagaatcgtctgccccacaatcatcagtaggagaaccttcatcatccttgtcagcaacaaaatcagaatcctcctcc

SEQ ID NO: 21940 - DNA, 363 bp, Glycine max
  unsure (1)..(363): unsure at all n locations
agagcggccgcgtcgnttttttttttttttttttttttttcctagcatgcacgtgtaaaatcgtgctaactggaattgacaaacaagttgaatttcaatctgttccaaagatacacaagatgcaaaaggaagtaaaattattccaacaagttactcaagtttaaatctcattgaggtgttggtctgttcttctgaatttcaaagtagtaactgacatccaagtagcattttcgatcgtcatctacaaacttggttcttgctgcataggttcccctgacgaacatgccagaagggatagtttcttcttccaattcaaatgtnatatggttcctgcttgggactaaaagttcccaacatcttttt

SEQ ID NO: 21941 - DNA, 600 bp, Glycine max
gacgagtaattaaattttataaatgcaactatacaaaatgaacaaatagtttacaacgaatgaaaatgtttcttgcacacattattttgtgaacaaacctaaaggtgcataatttattttggtaaataaaatgagggaaaccgaggtagttgattaaaatgattaaatttctgaaaggtgtgcgtgaataaaatgattgctgatttttgggtagaaaccaccaacattcttagtggtggactagggcgatgaaccacatggtaggccagatgcttcacacgatatcgtgcatttgttgcatctgaacaggtcacaatagtttcgaggccaagtacattttctccatgctcttttcttgatcacaatttggatgaaccacaggatagagcataatcaactaattctcttctcaaaattttgccagccggagattttgggatagatttgatgaaagaaactcgccgtatcttcttgtatggtgaaacctgctttgccacaaactccatgacctgatctgcagtgatgttgcttccagactttcttactacaaaggcaattggaatctgtcctgcctcttcatcaggatacggaactactgca

SEQ ID NO: 21942 - DNA, 682 bp, Glycine max
  unsure (1)..(682): unsure at all n locations
ttttntttaaaatgaaacacatactcttattaaaagactatgatttcaaataaattaacaataaaaatattacagtagcataaagaggaaatatagctctcctcatatttcagaccatctccatctctaatatataaatatcaataaactataaaattatccaaatacgcaggtatccagtcttcgcaagcatctttaacacgaagaacagtgaaacatttcaatgacactctaaaacttcctttcacgcttgttggttaattcccgaaaagaccccacaaaaaggttttttctgcctcaaaatcttgagatctcaactttgtttgccgggtctaggaggtccaaagtagtttgttatcaatcccattaaagaaaacatcatagccatcataacttgtttgagatcgttctcgacattccgcatgttcgcgacggattgcgcgcagaatatgagcgccagccaagagctcagtttgtacctgaacatgacgccggcgacgccaaatatgacggcgatgaagccggcgtagtcgatcggaaggtcctgcggcgaaatctgcggcgccacgtagggtctcgccgccgagggctgacgaggatcgttagggtttgatgacatctccgatttctctctcgcgcgccacagacaggtgttgacagaggttatctgattttctcagtc

SEQ ID NO: 21943 - DNA, 481 bp, Glycine max
gacttgaattgtttcaatttgttgcgggggcttgaatttgttattacaagaatgcccctttggaaaagacagatagcctcactgaaatatcatgtctgagtattctacaaatactttgttgccctttttgtacattgtcctaaaccaaaatctgcttgtcctaaactaagtcagcaatgttggcgtgctttgagtcgaagcaatgatctacagccaccgttttgcagtcttggtgtctgaatgggaaggaggagttctagcatttccgtccttgtcatatgctactactggcttccctccaagtgaagatctacgggagttatttgacagtggtggttgagtccccgttagagattgcctctttttagttttctcagcagctgaaattggtgattttacatgatttgtatgaccagtgcccttgatgggtgacttgacttcaaccatattattttgttggctccttttatcagggccattt

SEQ ID NO: 21944 - DNA, 369 bp, Glycine max
ctggacagtactgttccaacaacacagcgatgatgaagagagttcagcctattgctattgttacttattcaccattcactcatgaatcgaaacagaaaaattatagcccttacatatatgaatgatagagtgctggcacatctcattaacttactatggatagatctcaatgagagaccttaagccaaagactggagttatcttgtagttgttataaccagcagaggaaatcaacttagcccattctttcttgcttctctcttttccagtgaccaacaccatcatcagcatatcaaagaagagctgtgtttcaactgattcatcatctctcttctcattctccaccaccatgtctatgatgatcacctt

SEQ ID NO: 21945 - DNA, 639 bp, Glycine max
aacagcactgttccaacaacacaactatgatgaagagagttcagtctattgctattgttacttattcaacattcactcatgaatcgaaacagaaaaattatagcccttacatatatgaatgatagagtgctggcacatctcattaacttactatggatagatcttaatgagagaccttaagcccaagactggagttatcttgtagtaaactagtactgattattacaagccatatagaccacttagttggtctgatttggtatgacagtggcagatatgtagttggactactagctagtgctagcttactagcttagtgaacaatatacatataaaaatttgaagttatttcaagtgatcaatgatgataaaatcgttcatttttttttccaatcgatcaattatttgctttaattctttaaaatttgacatcactcaagtataaaaactgggtgttaatggtatgaatgtaaaattgtattctgaatgtgaatagtgatttacctttaacagaatggcatcagctggaggaattgcttcaaacatgtcccctgcaacatattaaaggtaaatcactattcacattcagaatacaatttcacattcataccattaacaacaagtatttttccaatcgat

SEQ ID NO: 21946 - DNA, 261 bp, Glycine max
aattggcacatcatgtaacgtttttaaccgcaacatatactcaatacttcagaaaaaagaaaagtcaaatttgaagagatctataactattttttctagaatatgagcagagatttacttgtcaaataatcatatgctagctactttacgtacccacttaataaactagtactaattattaaaagccatatagaccacttagttggtctgatttggtatgacagtggcagatatgtagttggactactagctagtgctagc

SEQ ID NO: 21947 - DNA, 502 bp, Glycine max
gccaaattataacggggaccttctcattgttctccttctattttgtcttgactcccctgtttcctacccactatatgttctcaaattgccaatcatggggcgcagaaacacacagaactattactaacaatgtgaaaaagaaagccaactctatcactaagtttcaccaatcaccacctcctctggttggaaaagttcaattctgtgtccctaccaagttctgcggacttctgaagcttactcatcacagcattcttaaaattgatagcttcttgaatctgtgagcaagacctttgcattctagtcccacttaaactactcctagactccatcatctcgtcgagggtaagcctcttctttggcccagctggatcggggcgttgctttggagcactatgagacctcagtttggccttgaaagactgagtgctggccatgtagtttggaaaattgtcatgatactgcccatagaagaagttgttctcggtgcaaacacttttag

SEQ ID NO: 21948 - DNA, 847 bp, Glycine max
gggtgaattgtgttgtgaatgctatgaatcccaaggaaatcaatgtttgtattcttcaatttgagggaatggatcctctatagtagaattgaatcttaacatacatttgtcatgtaaaaattttgcatctatcactttctttgtaggcattcaatgtatggggcattatgaacatataaatgcatcaacaagcacaccaatctccaatgcaacaagaagcaattaacttgcagtaatgcggtgcacaaaacaagaaacataagttaaagggtctaactcagattggttaagttgaatgcgtgaattattataaaaatctactaacaccaacttggattcctacaaaataaataaaaaaacaacatatgtagatgaggagtccagaagaagaacatacctttcctgatatcttgaacatttcccccaacacagaagccaacaaggaagacttgccagagccaacagctcccacaacagcagcatggtcccctttcttgatttccatctcttcaactctcagagccgcattcccatctacatcgtcccacgagaattcgccatccttgatctccacggccgtgtcgctgccgttgcagccctcgactctctccactgctccctcatccatttccttgctcatcaagaactcatccagcctcccgagagaaatcatcgcctgcgaaatgacgatgagagcctgagggaaggtcctcacgggctcctgcagaatcttgatgactgaagtgattgtaaatacagtgccagcattcagaggaacaccaagaagagtagcacttccaaacgtgagaacagttaccaacaacggagcagagctcagaaacacgaa

SEQ ID NO: 21949 - DNA, 564 bp, Glycine max
gattaatattaccaaagtcattctttaaaattccataacatacaaaaggagttcaatcgtaggatgccagctcttcaattttatttgtaatctagaattgcccttacaacttacaaggagtatttataaattatattatataataatgttcgtacattagttgaaatgatattcatacctgtaaacaacatcttatacaaccaattccataatttagatgtacaaaaagaaggtgttacatacaaaagaaactagaaaacaatagacattgccaactatgactagtgactacaccttcatattatattatccatttcatcttctagacaacttcattctgtactaggacgtggaataagtgagcttggcaccagacttttatactatgatttgctcttctttcaaacgcaaatgtacaggtctttggtcagtacttccaaaatccatatccttgagcaaaggatgtttctccggcaccacattatgtggttttaatggcattgaattgctactagctgtgttgtggctgctgtttctagcagcaggcacatcatgattatgttt

SEQ ID NO: 21950 - DNA, 491 bp, Glycine max
gcccttacaacttacaaggatgattttataaattatataataggaatgttcgcacattagttgaaatgatattcatacctgtaaacaacatttttatacaaccaattccataatttaaatgtacaaaaggtgttacatacaaaaactggaaaacaatagacattgccaactatgaatagtgactacaccttcatatccatttcatcttctaggcaacttcattctcttcattctgtacttggacgtggaataagtgagcgtggcaccagaattttatactataatttgctcttcttttaagcgcaaatgtacaggtctttggtcattacctccaaaatgccttatctttaagcaaaggatgcttgtctggcaccacattttgtcgggtttaatggcattgaattgctactagctgtgttgaggctgctgtttctagcaccacgtacatcatgattatgtttaccctcatacgtggttatgacagctttggg

SEQ ID NO: 21951 - DNA, 616 bp, Glycine max
ttgggctacaattacctcatcaaataaagatatacgagtacggaggttgttacctgcgcaagcatgggcattttttttaaaaggcaagtacaattgccttttaagaatgtatttgaaaatatacacaataatatgtcagatattaatatcatacaactgatcaaatatcatgatgttagttcatcattcaagtttgtagtaagaccaacatatgatgacccggaaacatcactttaccactacaagccctagacagcttcctgttttacctgccagccttgatttcctgtacaagtatttaactgcattctgctgcataactactttgaaaaatagcatgcctcaactgtcttaagtttattgctgcccctgctgccatcacgttccatgcaatcaccatcatgcaaatcactttcagcaggctgtatgatcttaccaaatagcagaattgaaccagaagcaactttggtgtcacagttccgggtcccagcaaactctctggcaaaggaatgaaaactactctggctatgtggtgacaagtcatccgattgagaactgctcatgtttagctctgttgtcacggttcccaaactttgcactggattgttcccaaatg

SEQ ID NO: 21952 - DNA, 770 bp, Glycine max
gcattaacctccgtctcatccactgataaaaggatttggaaaaggaaactattcatacatacatatacatacacctttcatgacccacccacaccaccatcaccctgtaaagtaactattggttacccacaattaaattccccctttgcctttaccctacccacctatcctacaccccccccccttcaaaaaaaaaaaaaaacagaaaccctacttcttcctgaaagaagagggggaaaaaaagaaaaataagctgaagaaaactaggtcaccattgttcatgattaaggagctaaacaggtagtataggaatagcctagtgcttaacatccacaaagaacaaactaaaaaaagggaaagaaagaaagttaaaagtataaataactaaacagatcatagtactagactctaagcaaataaatactgagttcaggtgctccattgctgtcaggattcatcatgtagaaagcttcagagtctctggacccaacaattctctcaaaccttgccctcatgtacatgacttcaccatcggctccatcactgttaggcaaaacacctgcacccattgaaattggctccactgccttaagtatgtcccagtctttggcaccgcattctctcctggtggcaaagccgcattttttaccgttgcagtaagtcctccagacggactcctgaagcagcctcagggtcttcttcttctctgagtctctgtctttgtcacactccaaagcaattcgcaccagccccgacgccatttcacggac

SEQ ID NO: 21953 - DNA, 476 bp, Glycine max
ttttttttttttaaaggtaaaactccgaacttttcgcatttcccaccgaaaggccatacagtgtatatgtagtatattaacaacagcaaatttatactgggcaacaaaataacagcttgatcgggagggagttgcaacttgcaatgtattatggaacaaacgttcattccaaaaactcccaaccccccataatatttacacaactgctaaaccaaaatttgcccgatgcatgccactgcctcagtgaacaagtccattcaagtttaacttcattagctcgaaaccaaaaatcaaaagcataagccaaaaatgttggcagcaacaaaaaactgtatgtggtcaatgaacctcagttaaattttagacttcagcttagctttgagtttactcaactcctcaccttgttgctgatacaacattctccatgatttggttgctctttcttgcagcaagcaccactctatgcccatatcata

SEQ ID NO: 21954 - DNA, 494 bp, Glycine max
aaacgcgaatgggttttgaatctcataaaagaaaaacctaaaaaggcttttccactgcaatcacactgcgatcggaatttcacaaagcagatttccaatcttaagtaatagctgaaataatggaatggcatgtgaaaacagcgtgtagcggccttctcaggagttatttaaaggagaaactaagatcgcgaaaatgaaaatgacataaattaggcataaaacgcagtacagagttcaagtgtagatgggaagatcggtccaggcaccagagacatgtccattctcacaaacataagccctaaccataggctccccatcgtcatggaagccaaagccaggcctcaagcaaaaggaagagtgcatatcccacgtgaactcacacgcgcagaaggcgcaaggcatatacaatttcctcttattgccaccctgaatagtccttcaaaccatagttcgcctgaagttcttgaaaacccctatgaagaggcagtacttgc

SEQ ID NO: 21955 - DNA, 512 bp, Glycine max
ctctacccattttttttttccttcccccccctcattttttccttcttcaaccagattctagaagaaagatgtgcccatttctgcttacttaaatctcaaacacaaaaccgaatctttgacaacaatttcaagattttcccaccaacccaccccagcaaagcacctggtcgcttcaaagattttatttttagttcttggggtggggtttccaccgtttttccctttcaccattggcatctgcagcatcactcaattgcacaaacagaatggtcaacactttatggtctttttgtgtggtttgaactgtaaagtctctctctttctctcactcacttttttctctctctatgttgcattcttttgtgtggcttagtctctggctgtgtctttcagtgttagattcttggtgggtttagtttaattttgactgaacgaatgagatcttgatgagggttggaaccagtttccttgcactgctctcattgttgccattgcttctttcttcgcaattt

SEQ ID NO: 21956 - DNA, 572 bp, Glycine max
gatggcatgaaacctggtagagctaaaacctaccttttatcgttgaaataccatatgtcttatatacgacttagaaattttattgacttttacagaaacaactaatgatgacacaacatttacacaattcttgaattcataaatcttcccaaatggtataggtagctgcagtggcttggcttaggtgtgttgtagacaagaacaacctttcacttggacatgaatgcaagactacttccttggcataattaattaataatagaatggaggtgctaattactactttccaagattgatatctggatttctcatggttttgagccacatgtcagcaactattcgcgatgaaatgctccacaactggtcttgttgtccctttgccaatgattgcttccctttcttgttccctgcctttcccaaaccatatgcaaccaaccattgcattgcagtaagtctctgcttcccactgtcccatgcattcttctttatggcacttgtcaacttgaaaccccccacatgcatgcttgttaccttgaaccttttctcctcctccttcccttttgtgtcaggct

SEQ ID NO: 21957 - DNA, 352 bp, Glycine max
gcacaacacagacaactaaattacagagattcctcgtattgtacaagcaataagaaacgcacaccacagtaaaaaaggacacaaaattcagattatacagcacataatataacacaccagaaaagaaaaaagcagtgtcaagctatggaaaggagaccgaaccaggtgtcatggtttggtccataaggcgtaacactagtggagccagcatgcgagcaacccttggtaaggtagggtaggttagagtgccaagaataaaccaattgaagcttaaaagagcaacagcatcagatgcaggtttatttctaatggtggagaaaaactgcaccacactcttcaaggacatgcctac

SEQ ID NO: 21958 - DNA, 515 bp, Glycine max
ccggcttatagatttatccattatgattacgaacattgctagtttagacaaagcatgaatgattacaactagttacaactacaatacaccatccaagaaaggagatataaagaaggaaaagatcacgggttgatccctcctgctaacatttaacatttatcgataaaaaaaatccaggaaagaaattaacgaggaatgagttcataatacaaacaatatatgaagcaaagtgtatgatctaaggcaaagagttggtgtagatgtagtcttcattctccaaaactgtatcttccaacccaccatttccttccctgtactcaaagccttgtttttcacagccacctgatcttctgacactctcagaaccaacaactcgttcgttggtaactgcttgcccttgaacagtagtgaagatgaaaaccaggaagagaagcaatgttggtttggagagtctcattttattggcaagaaactttgggacctttaaggggttaattaaagtatgattatggatc

SEQ ID NO: 21959 - DNA, 458 bp, Glycine max
gactcaatatttatttggtgatcaacatcagactataatacatagtggttgccactcaaattgtgtgtacatatttgtctgtaaacctctgctgaacttggaaacggcctcactgcgcgagaacccagcctagagcaccaccaaccactgcaggagaggcgcgatccgcctttcttgaaatagtcccatttcggagcatgggtcaccttctcaaggcttgcataaatatacagaccattgttaatcctgcatattgggtgctgtattcaacgtaccacaaactgcataccgtgttctctttaaagaaagtctagtaataataatgtaaaaactggccatctgtgcctacaactacaagtaccacgtaccagtacttgtaccagatatatggtaactatgatatagacaatttcaagttattcattatcacaacttctggtctctctcaaagatgcaac

SEQ ID NO: 21960 - DNA, 377 bp, Glycine max
gacaggaaattttcgtttcaacattaaaatgcaaaggagaataataatacaattatgtccaggcctctggagaaactaataaaattcctcgtcattatcaactgaaagataacattacaacagatatacaaagttacaaactgcagtatgcccaattttcctctacactcagaagaaagaactataattaatctgttgatcaaaccaattgacaccccttcagtcttctataggttagtcatacagaccctcttgttcccagatgtccacaagaaaatcaaccatttccgcaaggggaatatgctgagggaatggcttgttgctccccagtaaactttcatatgttgcattccaactcaattggggttctcgcaact

SEQ ID NO: 21961 - DNA, 660 bp, Glycine max
cacgcctccgattctcaccagcgagttcttcatagcggatctacgcatgttgagccgattcgtacccttcgaaccggctcaacatgcgtagatccgctatgaagagccggttcgaagggtacgaatcggcgttgtggttgctgcttcctatgttcttgtggaggctgcatcgaaaggacccagggtgcgtcgtaggggagcacatacacgtcttcttctggccagagatcggacggttgttcttcgtcgtgatgatctggttcgagatggaccggttcggagatatggaccgtggatcgattgagaaccggacggcagaggagagaggggcggggctgcatagattgacacgggtgggcgatgccgcacggtgatggctgtgagcgtgatgctgacgtggctggttgaagaaggatgaagacgaaaagccagagcttgtggaggaagcgaaggccgatgaaggagaagagaaaggagttttggaagtggtgtatgagcagaatctggtggagggtgagagggagcgtagaacgggtccactagactttgttctggaagaggatgaagccattgaaagagaataataaaagcaaaagagagagagagagagagagagaggagagagaaggtagaagattgctctctaaggtcccctttggg

SEQ ID NO: 21962 - DNA, 841 bp, Glycine max
cgtccaaactctgcttccatagcaaaatttatgtacaaaatcaatgtgtaggtccagtgtcatagatctatgcagccaaattcaccaatctgctccagacgacgaaaccaaaactcgccggataggactcgccgttacctcccaaccgcttcgccggaatccaactctggcggcagatcagggcgccatgggtggtatggtatataaaccagcaaaatcaagaacaacctgcaaggtgtaaatagaaaaaaccttttttctaaaagaaaatcataagatcctgggctttggacatgacagagagacgactgggcctgggctcgaaccccgctctcctcctctgttgatgcgaactgggccgaatcagtgctgtcagggcccgtttcacccactcgccctccacgcctccgattctcgccagcgagttcttccgagcggatctacgcatgttgagccggttcgaagggtacgaagcggcgttgtggttgctgcttcctatgttcttgtggaggctgcatcgaaaggacccagggtgcgtcgtaggggagcacatacacgtcttcttctggccagagatcggacggttgttcttcgtcgtgatgatctggttcgagatggaccggttcggagatatggaccgtggatcgattgagaaccggacggcagaggagagaggggcggggctgcatagattgacacgggtgggcgatgccgcacggtgatggctgtgagcgtgatgctgacgtggctggttgaagaaggatgaagacgaaaagccagagcttgtggaggaagcgaaggccgacccacgcgtccgcggacgcgtgggcggacgcgtggg

SEQ ID NO: 21963 - DNA, 401 bp, Glycine max
gggattgaatcatatcactattataatccaatagatgatgcatctacataggatcctagagcggaaatgataatgttacaaaaccaaacttaatagtaaaagccttctaaactcccattatttgttgctgctttgctaggaaaatttccaatgacatgtagagagtttgaattactccctagaagaaactgagacagccaagaatagaaaatgtaactaatcaaatgaaacttccactgcaacatgagagaacttataatcataccaaaaataaaaggaataatcaatgcctctaagttattagcaaagagtaaacaaattaaagctgcctccagcgtctcaaacaaatactactaatctgagattgttgaatgagagagaagcttatgtcaggaacaaac

SEQ ID NO: 21964 - DNA, 495 bp, Glycine max
ggcaagaacaagaagtcaaccatgtctaatttatagtattatagggacaaccataacattagatagtcgtcttacgaatggatatgtcaattatgtacacatcggaaaggagacttgttcaacatccagatagcaatagtcatgactcacacggtcataatttacatgacatgtacaccaactgtgtgatgtgacaatcaacgattatacgcagaaaagtaacagaaaagtattggtgctttggatcaatgaaaagcaacaatggacaatatgccccgtgttatacttgaacatgcagctaccatcttagtcaatggctggagctaccaagatcaaagtccatcgtgtaatcatactcaattgttggaattacagaagccataaattttaggaataaaaataggtacttgtcaacttcaggctcaactccgtgtgacatcaacacatcaatgattttcttcatcactgctccatgtcgacatggatgaatagatg

SEQ ID NO: 21965 - DNA, 364 bp, Glycine max
ggccacttaaaataatctatttattactttcaatttgttcttatataaaaatttcaatagaaaaataacatttattttctggtagaataatggtgtagttatctgacacctttctcgtgtccaactattcttttatagaaaaaaaatgtgtatgaggggctgctcaatgcttcattattgaaagccccctagtgtatggagtaataatcagcagaataatctgactatgtactacatttgcagccaatttcttttatttacattcgatttcgcgcagccggcgcatgtttgcattctgtatgtatggaattcaactacacaaagtgaaggggtatcgttattttctatattgagcttaataaat

SEQ ID NO: 21966 - DNA, 358 bp, Glycine max
ggcaaacaaagacccctcaagtcaccacaatttcattttctttttgaggctagtatttgtatacaaataaacactcaataaccacaccactattgtgtaatagtaacagtaattagaaccaccttaaccttacatcattactcaaaccaattaattagcttagcatgccactgagcatgtagcagattttactgggactaaaacatctccagctccacctacagaagtagtagattgaactgggacacaattagcagcagcagcttctagcctttcccatgttactcttctcctctcagctgcagaacttgcacttgaatcttcctcctcaatcctgcgttggcatgcagctaccagc

SEQ ID NO: 21967 - DNA, 213 bp, Glycine max
aatacaaagaagaaggaggtcaggagttatatataactactaaattataaactcaaacttaatggcaatgcatgtctgtcctaagtcctaaattaacgtacacaacagcagtatatgctattacattcatatagtaattgtagcaaacacacacatatgaagcatgaagttgttatttatatattttgggtgaactagctagccaaggaaagc

SEQ ID NO: 21968 - DNA, 678 bp, Glycine max
  unsure (1)..(678): unsure at all n locations
aagggtgaagccttaaaccttaacactgtcagtggtagttcctccgtggaatgggtacaaggatcattattggctaaacagcaacctttggcatggtacaagacaacttttagcacaccagcaggcaacgatccgttagctctggacatgattagcatgggaaagggtcaggcatggataaacggtcgaagcattggacgccattggcctggatatatagcacgcggtaactgtggggattgttattatgctggaacttacactgataaaaaatgccggacaaattgtggagaaccctcccagagatggtaccatattcctcggtcgtggctgaacccaagcggcaactatctggttgtgtttgaagaatggggaggtgatcctactggaatttctttggtgaaaagaacaacagcaagtgtgtgcgctgatatattccaagggcaaccaactccgaagaacaggcagatgctagactctggcaaagttattagacccaaggctcacttgtggtgtccacctgngcaaaagatctctaagattaaatttgcaagttatggattgccacatggaacttgtggaaacttcagagaaggaagttgtcatgctcacaaatcatatgatgctcctcaaaagaactgcattggcaagcaatcttgcttggtgactgtagcttct

SEQ ID NO: 21969 - DNA, 446 bp, Glycine max
  unsure (1)..(446): unsure at all n locations
tccctggttttttnnngatgtcacctggcttctagtagcgcgaggtgggaccgaatgatgaagtggctcttcttgcttggttctcgatgatgtctcgatcgtctgtggaggcccttttgatgagcccttgagttgaactcttttttcattggtagccctttttgcattttggaacagatttgttgttctgatgaaactctttctgttctggcaccactgcttgaagctttggttttgttaaaactcttggaagctcaggttggtgagtgttaactcgagaaggaggggggggtagtttcagcatgttttgatcttttggggtgagtggtgatggtgcctgtgatgttgttgttgcgcttggtttgcgtttgtcaatgaatctaacccttgcggagtaagaaaattggtttgagtgtttatttgggctggtttcactttcatcaatt

SEQ ID NO: 21970 - DNA, 840 bp, Glycine max
gggaaaaaggcaacactgcttctcaaatttaacacatctcaatctttttggaacgaagtaaaagagcacaagtcgtggttccaagccagagaaaaaagaagactagtatttacaacacgcgtgtctaataggtgactaagcagattgtttacagagcaattatacgcaacgtaacgcaacgcaacactgtttggattatagctatatatatgtaacatcatgtatgcataagcattggttggttcagacaaaaaggagcttaagatttagaatagagaggaaagcaacccatgccaaacaaggctttatcaaatcagcagcgatgggattgaaagggcgaaacaagcgcatgcagccaaactgggtgagaaataaggaaacacacaagattaagcctagccgtgttgccccaagggcaaagacaagggggtcccacagcaccgtgaagaggagctgagtgaagtaaagcaacagagccatggggtttctgtggaaacccccgtctgcccacaccatccaagcagagagacccatcaagaagcttgaagcaggacacgtcaagtgtagggcccacgagggtgggaaccagaaggggcttctcgaagcgtaatgggcactggaggaggaggagcctatgtaagctgataaggcggtgagagagagagggaggacaacggctatggcgagtgacttaaggccgcgtttggccatcagcattcgtttgcctctgctggtcctattgacgtcgttggtggttgctgtagtggtggtgacccgatgtttgagatcattagaaggcatggtggaatggaagtggaagcaagagaagcgagtgtggtc

SEQ ID NO: 21971 - DNA, 719 bp, Glycine max
tcaagaaaatcaaaataaatcggagagaagcttccatgtggagaaagatacacattatttatttattatttatgaaaatcatagatttcaagatcctattggtttcctataattaataatctaggaaactctttaaaagttttagaactcagaaataaataatgaaatccacaaggaaacttaaaaagaagaagaaaaaaaaggaaaatgtaaggatcaataaagataatcttcaaattccctatctcgcctacaaagaaattcagaattgcagattgcaactatttggcttccgtgatgcaactaacaaaattttacaattgaaaattaagctgtttttggctttgccttaatacgcttcacccttgaatagaggaaaacgccagcaagagctatagcagttccaaaagcattcacaggtgagacaggtgtttggaagaagatgacagagctcacaatgaccacaacccgcttcacacagttgcccacggagtgggtaacaggtgataccctttgcaatatcatatacgaaacttgttgatacgcatggaaacagagagcagcaagaagagatctgatgtaaagttgtctaacattcaccccagcagattgcaagtaagcaggggtaaatttgacaccctccatgaagatagccacaggtgctaacaagaagaaggacattacagttattatagagaagagagtaatgttgtccatag

SEQ ID NO: 21972 - DNA, 521 bp, Glycine max
cgtagatgctctctggcatcgcaccggtgaaatcagcacgctgaacaccgttatttttgcatggagcagttccatcaggctcgtgctcatacataaataatgaaatccacaaggtaacttaaggagaagaaataaaaaggaaatgtgaggactgaggatcaataaagataatcctcatgccctatctcacctacaaagaaattcagaattgcagattgcaactatttggcttcctcaatggaactaacaaaattttaccattgaaaattaagctgtttttggctttgccttaatacgcttcacccttgaatagaggaaaactccagcaagagctatagcagtcccaaaagcattcacaggtgagacaggtgtttggaagaagatgacagagctcacaatgaccacaacccgcttcacacaattacccacagagtgggtaacaggtgataccctttgcaatatcatatacgaaacttgttgatacgcatggaaacagagagcagcaagaagagatctgatgt

SEQ ID NO: 21973 - DNA, 487 bp, Glycine max
acatgaagagtcttcattattattattatatcaatacaacaacgtgaaacagttcaaggactatttatctgctacgtaaattttgtgttgcaggaaacacctggtgcttcacttaaggacttgttcagtgttcacacttgaaatacaaaaagcaaatacaaagagaaacctctcgataaatctttgcaaggagaactcctaggaacatgacatagaaaagtaagaaagttgttcccagcctgtaatttgatgactttgtaggtttactcaacataaggaacaggtatcctctgtgtgccagggccagctaccatatcatcccaaagcatatccgaaagtaacattgttaattctcccacccttccattgccaatgggttgatcatcccagacgatgataggcaacagaggaagcgtgcttcctacatacatcatttcagcagcagctttagcttcctccacagttagttttttagttgctacaccct

SEQ ID NO: 21974 - DNA, 897 bp, Glycine max
gatgcaacttcaagaaattgcaaaacacaatatttatcatggtagatttaggtcaataatatataaagctacatccacatcccttgccaaaatcaacatattttcttctaattttgacggctctatataaagattagctaagaggagtttagcatgacgtgttacaatatttattacatcaaattttcctcctacgagagtctcttgaggcacttcataagtgtatctgtttgttcaggcttcccaacagtcacacgaacgtaccctttcagctctttcttgtcatagtgacgaatcatcacacccatttgtgctaggtcctcctttagcttctttgcatcctttcctgatgtaacctcacaaagaatgaagttagaatggcttggaaatggccggaggaatggaacttctttcaaaaggtcataaagtctccctctttctttcaacaaagcattttttacattctctagataggtaggattttgcaatgctgcacatgcagaaatttcagcagcaacagatacattatacggctgctttgctctccaaagatactcaattatactcaaaggaaaagctccatatcccactcgaagtccagctaaaccagctcttttgctaaatgtccgaagaacaatcaaattatcatgtttcttcacccaactcatccctgattcaattgctgaaaactcaatgtatgcttcatccagtatcaccaatataggaagctcgagtatttttaacatctccaaataatccagatggaagtataattgatgacgaagttctcttaaaaatactcgagcttcctatattggtgatactggatgaagcatacattgagttttcagcaattgaatcaaggatgagttgggtgaagaaacatgataatttgat

SEQ ID NO: 21975 - DNA, 506 bp, Glycine max
gggtgtaaagtatcttccatttgaaaacagcattgtgttgttacctacccccattcattcactcaccaacaccaaacaaacaagtccctgctggtggcggacactccgagggcctctcccctcttcctctccacagtataagacccaaaactcacaccacccgacccatcacgcaagacaaaagcgcgctcttgtgttccgtttccgtttgtttctgttttctttctctttcagatctcgaaaaatgcagagcgcggctttcactttctctccctctctccctctccgcaacccttcccctaactattggaggagaccttctctctccctccgtctctcggccaaacacggcaacagcaacagcgatgacgtgaactccaatggcgtttcttcaactttcttcactcgccgatcttggactcttcctccttcctcttccttcaagttcaggcctctccctccccgcgccgccgaaagcgccgttcccgaaagtgcgcccgtcgaaa

SEQ ID NO: 21976 - DNA, 464 bp, Glycine max
gggtacaaagaagagagaaatccaaggctactgagtctagtttattgcagttactacaccaccttaccctctcatacagtctcaaaaatgaatagccagtatctcatcaccctttcttttgtgttattaactttggttttacccctatcatcagcaacgaactcatttgagtcgtatgacacaaaaaagtttccagctttgtatgtttttggtgattccctgattgattgtgggaacaacaatcatcttccaagcggtggagcagattatcttccttatggtatagattttatgggtggcaacaaacctaccggtcgtgccactaatggaaaaaccgcggctgatttccttgctatgcatctaggactaccctttgtccgtccctacttggatcttacaaattatcaaaagaacaaaattagcactggcattaattatgcatttggtgggtctggcattttttc

SEQ ID NO: 21977 - DNA, 452 bp, Glycine max
ggggcaatgagcagggatgtttcaatagtcaaactttagaactgaatcactaacacgggcctagataattgattagtttactcaaatcccaaaacatagttcaccgaacaggaaacaaatactcggtgtcgccatgatctgtaaatgtaattaacagtaaatatctcaataaggcaaaaggatttacagataactttggtgtagaaaataaaacttggcgctccaaaaaggaaatggtaatggaagttctcgaatgcagaaatatgagcagcaaatataggaaataaagagatcctgacaacaactggcaatataaaaaagagcaagtcattatcagaagtcatcatcatcttcctctgcgatatgcttagccaattcttgctcttgttgatgcctctctctcctcttctcagcattttccttttccttgtctttgtttggtggaaaacgca

SEQ ID NO: 21978 - DNA, 514 bp, Glycine max
cgcctgatctaataatgactctgattactgcaataggtcatttaccattattttctttacagacaatggacctcatatacatgcacaaaaaatacacattgccgtctattgttgacatcctaagttaactctccgtatggagatttctgtcaagttgtagtaacgaaatcaagcaaagtaagaaaagtaatttattctaatggccaagctgaccgcatttatctccaatgctttatataaagtaaagcttgcaggggaaacttggtgatataaacattcatgttagctgtacaaaaggaaaagttgggacagtaggaggacttcttgtctccaagaccttcattggatgcctgaggatgtatgaattagaccaacaaccctatgcgcttttctccagtggttatgagcttctccacacgagaaactatatgtttgccataagtataccgcttcagtgcatttaagtgaaccttgatgcgagaaaggatcagctcaagacttcgatcatcacaag

SEQ ID NO: 21979 - DNA, 554 bp, Glycine max
acataaaagtttggttctatcattatcaccacttcaatttttcaactaagaaggaaaaaataaactgattgcctgatccagccacattgcattgtttttataatcaatttacatgttgtattatacactcactttctcttccttctattatcaactggaggattcctcatgtcattttttgcaagaccagagccagggggcataacatatggcattggggaaggagcttgagaaggtgctgctgtcacagcaacacttgttgcaggtactggtggtagtgcagacacaggtgcctgagatggagttgaagcaggagcaggagctgcaggtgtggcaggttcaggaagtgatcttggtaaaatgtgttttagccgattgttcctatagttcgtccagaagtagaattgctgtctgtgtgccagttcctaaaatacaaaaacaaatggtatttgcacaatccagaaatacaaggcaagcagttattcaaagttatttatttcaaagatttgcagtgcaggccatctggcttgatctgtgaacgaccataattaacc

SEQ ID NO: 21980 - DNA, 561 bp, Glycine max
ggcgaaacacagaaaataagtttccataatttatgacttgatctcagacaattcaaggtaagaattaccctagttaaaggtctcataaacctctgtacattataatttataaacataaccaacctgcagctttgaacttggtgtgaacagatttaaaagtgctaccgaaaaagctaaaccttactaagcagtttctccttcagttgttggaacacattcgataggatcagaaactttacattcaatggaatcagaaaccttgcattcaatgggatcagattcaatgtgatcagaaaccttgcattcaatgggatcagaaaccctgcattcaatgggatcagaaaccttgtgattagcattcacttcattcaaatgttttacttggtcctccaaaaccagcaacctctcacttagggattcaactgcactcctatgagcttcaaatttatcaaaccaagtggactcaaaatctgtagtcttcctttcaaaatctatcatgaaatctctcaactttgccctttcttctgcttcttcttcagacgttcccttccccccccccct

SEQ ID NO: 21981 - DNA, 255 bp, Glycine max
ccgaaaggaaatgcaccaaatcattaaaaattggtgataggaacacataaccatgaaaatctagtaaatttaaacaaattataaatcataaataaagttgggattactgacaacacatgctcctcttgggaatttcctgtgcaggaccaggaacaataaccttcttgccagacaaagatgctgagttgtcatttccctgattatcactagcagctaggttcttcttgttgacaatgttgaatatttctgtcaaaa

SEQ ID NO: 21982 - DNA, 547 bp, Glycine max
agcataaatattgcataaatcttttacatttttactacttatgatgtaacttgtcatgtcaaattgccaaattgatgcttagaagttacaataagtttgaggaacttggactatcagactcacacgagtatttctctaaaacgacccggtaataattctcttaatctctgttctctggtagagccaaattaataccagaaccaatttacgtgtagtcgttgccaaaaaaaagcctcgttgaactgtaacatttccccccccctaagaaagcatatagcacgcgattctcaaggtggcacaccgaaagccaatgcttctttggaatctgagcacttccttaaagccgaccttatctcctttaacatctcattaattctgataccctttagaacactaactccaacaacagagagaggtcgtggatagtcctcaagtcttttttccttcctgtcggtttcatcagacaatggatctagaacttcagggcttggttttggttcggaagcagcaccattgttgccaattctcataatttcttgagccaatg

SEQ ID NO: 21983 - DNA, 480 bp, Glycine max
taagcacgtaaacattttaaagacatacattggattcaaggattgctatcgagtggctgaactataatatgggagcaaaacacttatagttacaatgataggacagctccaaagtccaaacacaaaaagctgctaaccgcagcaactgcacagaacagctgaactaaaccataaaccggctaagaacaaaagccaaaaatctatcttaacttagaccgctttggcatgctactgcttagactcgctcctcgtgacttaccaaagccttttgcctttcttcttttcctatcttcttcgctgtcagactcatttcccttctccctatctgcattgctagcttccctctccagttcctcccatgtttttcccttctcttcctctgaatcctcctcggaaccttcatcgtcatcatcatcctcagactcaacaagtgattcactgtcagaagcttcgtcctccgaatcagattcaggttccaca

SEQ ID NO: 21984 - DNA, 596 bp, Glycine max
aagcactaacatgaggctaccagcttttctttttaaaaatttatctactaaggcaatctactaaaatatttactttatttacaaatttcgtgaacgaatgcccttccattagtacctttgaggccttattaatcttaatctagcagtcgataccacatcagttccaatctgcttcaaagaaaccagcatctttcatttcagagtagtacacattctccaaatgcaaatcttcctcctgaaaaaagtcagccaggaaggttatatacagcaggggaagataggcagcatggtaacatacaaccgtgaaatgatataaccagaaaccaaaagcagcgccgtttccagtaatgccacaagcaaacagcgcaattgcattcaagatgaacataatggtaacatacttatagtaagcaggccttgcaggtaacctttctctccacctagaatgatacatgaacaatatgaaaccataaacaagggtaagcaacagctccgtgggcaacccacaagttccacttcacgtgaggagtagggtaaccactgttgatgaaaattggaatcccaaatgcaaacagatatattgccttcaacaagat

SEQ ID NO: 21985 - DNA, 358 bp, Glycine max
cgattaactgaattgattttataaaatagtacactccttttttcttagaatgagttcggataaaactaatttgaattaggttcagatacaatctggttcaatccgaaccaattattttgcacactttcaagtgagtcaatatcttttccatgacatgatctgtggaaacgctcacataatcctattatttacacacacaacaagtctatgatgttccaggatagttacacaatataaacatatcaagagagcaaattgttacatttagacagaacctgtacaggaaggcaggtaatcacaactaggaatgcaccctgccattctcccttcaatcaatgcgcggcaacaccgaccgact

SEQ ID NO: 21986 - DNA, 558 bp, Glycine max
  unsure (1)..(558): unsure at all n locations
nnnttttttttttgggctaaacataaacaatctcactcacgattgactgtgttatgattgagatttggcgtgtcatcgctaccacatggtaaatttaattttaacactacaacaaggggtccgaaatatatgaaatctatgaccctggggaaggattaaggcaccgacagctgagcattttttagcgaaccaaccccaaccataataacaaacatatttgctaaacatgtcttgtaaaaaacacaatgaataatcactaaccaatagcacagccttcatgattcaactggagagaggaatgactgaattccaaaaacaatgaaaagaattccacctgagagtgcaacaattttttcagatatctgagaagctaaactctttcctccaacaacagcagcagaagtgcacaatgcttgtcccagaatccctccaagaaccacaccaaatgggttctcatctgcagccaaacctatggtagccagctggctcttgtcaccccattcaccaaaaaaggtgattgaaaatgccggtaaaaagatagaagaaaaaacctgagac

SEQ ID NO: 21987 - DNA, 379 bp, Glycine max
gacagacacattggcagattcagaatttgaaagtggacaagaaaaattgtaaacccagaaagagaaaaacctcgtctttcttcttctcactacttctcttctctgctttatcttcttcttgttcaacttgcacacacaagtgttcgaatttctacgaacaatggctcccaaatcgatggaacctcacgacgaagctgaagaagacttggagttggagaggttggagtctgatttgaagcaaatggcgcacaagattctcgattaccgaacaacgcttccagatcagctcaactccacgctccgttcgattctcgatgcccagagaccctttctttcaccgggtgcatcagaacaaaacatttctagagaagaaagttca

SEQ ID NO: 21988 - DNA, 740 bp, Glycine max
gggaaaaatgtcgttgatatcctaggcaaatagtaaaccgaaagaaatattcagggaaatcaggaaatgcctatcacctaggtttgaaattaaatatcaaggaattcacataagctaacaggtattttcactgctttgaatttgttctgataggttccttgacaaagctgcaatcctagatgagaactgctcaaaggatgaaaacaaggaaaatccatggatagtttccacagtgactcaggttgaggaggttaaaatggtactcaagctccttcctatttggtctacatgtatcctcttctggacaatctattctcaaatgaacaccttcaccattgagcaagctacattcatgaatcgaaaagttggatctctagttgtcccagcaggatctctatcagcttttctcatcattaccattctcctctttacttccctaaatgagaaactcactgtgcccttagctcggaaactcaccgacaatgcccaagggctcacaagtctccagagggttggaattggactcgttttctccagtgttgccatggcagttgctgcaattgttgagaaagaaaggagggcgaatgcagtaaaaaataatactacaataagcgccttttggctggtccctcaattttttctggtgggtgctggggaagcatttgcctatgttggacaactagaatttttcattagggaggcaccagagagaatgaaatctatgagcactggactaatcc

SEQ ID NO: 21989 - DNA, 484 bp, Glycine max
  unsure (1)..(484): unsure at all n locations
cgtacgnaagcanggatcctatagagcggccgcnnnnnnnnnnnnnnntttttttttttttttgcgtatagttaggggggaaagcaaccaaaatataatggaaggcaaacctatcagtttgcttcttttcttactaagcatgccatgtagtaataacaataacatttacaaaagtggccaaacaaaagcttataaactaaggagaattttgaggagacacacttttacaagcctctctactaatgcaccagacagtactcctgtttggtgtaactattacaaaactggattctgtatcgatagatggaagttctaaatcagaagtactatagcagctagagtcacaatattgcccatctgccttgttgatcttatcaagtaaggactgcctgttatgtgaaccgacctcccaagtttgagagagatttatcccaggagagcattttatcgccacaggtgaattaggattgcttaaagaatcctc

SEQ ID NO: 21990 - DNA, 375 bp, Glycine max
  unsure (1)..(375): unsure at all n locations
cgtaagctnggatcctctagagcggccgctggtttttttttttttttttttttttttttccgacaattagataggatttaatgttgagaccttggtgcttaacttgtacatagtgatggaacataaaaagaagagggatgttataccttattgcccaactttcatttccaagcgcaagaagcaaccaaatctctattcatccaacccagataaagagctccatctctctcttgaagtctatatctatcactgtagttctcgagcaacttcttgatggtaccattcaccaatgaacttaaagggtaaggagtgaaaccggccattgcaaatcttgacctccacttgccgagcacctcatgtcgttccaccctctcg

SEQ ID NO: 21991 - DNA, 300 bp, Glycine max
gggacataggaaacttctcctcattctttaacctttgtcttcgatgagaatcttcccaaatcaatatcaaaatctggaaacttacaagctaggtacctaactcgtcagtagatgtgaccattccaacgagctagccagctggctgccatggcaaaacaactttaatttccgaataattatttttccttacccggcattgtgttttaccattccttcttatagagtacaagttatccgcataaccttcttattagcctaaaggggattaccattctggacaagcaatatgtctttccaagc

SEQ ID NO: 21992 - DNA, 433 bp, Glycine max
agagtttctggagtatcttattgtacaaaagtttcagaaattcgagtgcagattccttcagtcagttgggggtagacatttagaactggtaaaaatataatgcacgagtaacctcaagggcaaatcttaaatacaatatacttctcgcctagctcaaggtatacattctcattctaaacaacgaacctaataactgtcagacaacatacagtttacacatatcagtgaacaaaaagataaatgaagttacatgaataagtaaaaagttcctatacgatctagcgagcagaaacatataaccagcattccgggctgaccatgcccttatatggcatctattgatcagcactattcaggtgtcagactgtttaaatagagtggggcagctaacatgtctgatatttctaaagcagaaatgctttcacaatcattt

SEQ ID NO: 21993 - DNA, 621 bp, Glycine max
gacaatgactaatcaatttgtataacgttttctcgggggtgatgatgggaagttccagtccgcaacggaaagagcacattgtatgtggatgtgctggttacattagtttccactagttaccaaatcatgatgggttaaaaaatatactataaataaaatgtgaatataacccaagaagcctaaagattctctagagtgagttcaaattaaattcccattttcagttcttcgtgtcctcggtcatcataatctccatatcccgtatatctcgcttcagaacattgcctagtcttgcaatggcctccagctgctgctgtaaaacctcttgtagatcaccaagactctgttcatgaattttggttgaccctggaagataaacggagctaccaaatccattgctattagctttaacacgagatacaattagtagattttgtactcttctagacagttccgctccagatcctttcagctttctagttattgtggctaatttctcagcaagttcagcttccccttttgttaagggtatacgacagcctttttcctccaatgcctccactattttcactactcctttaaagatgtggccgccagatttggtccttttggttccagtcc

SEQ ID NO: 21994 - DNA, 582 bp, Glycine max
agaaggaggaagccccaaatccaagatattttatacaaaatgttggctaatgaacaaatgacttgctatttgggtcaaaaactacattccattcttcacttgcacaaaaattatcaaagtaggagacatcacaagagggaaaggtggggatgaatgatgtgtatgggaacatctattcggctttactggattttctcttcattcggctaaaaggtccaactgttcgatccataatgtacatgtaaatgatctggctccaagatctgtaggacgctaaattatcataaaactctggagcaatctccttcaccttgtgaagcttgtttccaggaattcttgggaaatcatggtgttcattatggtatcccacatgccaagcgagataattcagaggtccatagtaagaataagtctcctggtcaggattgaacacataatgctcggaaatgaagtgaccagccattggatgcatcccaccaccaacaaaagtggaaagtatcaaataggcaagggctttccagccaaaaaagtaaaccattgacacatcaagtgctatctgaacagagaagttgatgaattccc

SEQ ID NO: 21995 - DNA, 397 bp, Glycine max
tatttttagatcgctcccaaaaggggcgggcgactgctcccaacaaggaaactaattacagataggttgccattgcctataagaacaccacggctgaatctacaaattaatccaaaagtctcatcacattacggatacactcgtttatgccacataagcatgatcaattactaacccctaacacacaattatccacttaacactaaccaaggttttaaattgcagtttcatccaaatacttgtcattgcagataaatgcagccacagttgctgtcacaaagaacccaaaaatctggacattgcaattgcacaccgcatttaaaaaccttgcccctaaccaaacttaaacacaccaccaaacattaacttcaccaggtggaaactacagagttcaaac

SEQ ID NO: 21996 - DNA, 545 bp, Glycine max
atgggttagaaactagctcttattaaaagatacattaacattatatatatcgtatgaaatatgagtccaaaatggatcatttataagttcgcagtctaataatgacctttagcaaattaacgtcaattctaaaggcacaaactgattcaggaaacgcaggcatgcatgtgtggcattatttgctctgcactatataggtgctacacgtaactattcaaatagctagagctacatcaaccgatatatatatatatataatgactgtggcagaacttccagtagctctaatttccagcatatcatcagacaagttggagagcagtgtggtcttgactagaatattgttgttgatcatcagaagctatgagatttacagggaaaaaattcctgtcgtatgattgtgaaggaagggactcgcacagtgttcctgacatcatatttgattgctgttgttgagctctctcatgttcagctatcttagctcgcagataattattgtggttttgcagctcaatttcccgctcttgcatgacctcggcatcagc

SEQ ID NO: 21997 - DNA, 869 bp, Glycine max
acaataaaataactactttaaaaggtttatttcttttagagaaaatataaatataaatacaacagatttctctaaacaaactaataatgttcttttgttgcgtgcggcgttaaaaaaaaaacgatacatcgttccaatgttttttctaaagaatgtgacttgcgccttttaaactttgaaacaatgccataacatgcaaccacatgtcagttagttgctttaatggacatcttaatctcatctttgaagaaatattttaagagaaaaaagttacacaaattgtctgtaactaagtttccgatatcgtgttttgttgtttagccttttcagcctcaatcttccgtagcattgatgaactcagcttaatttcacctgattctccagagaccaaatctacaacttcaatcttcaactgtgaaagatctctttcagctcttcttctgtttatagccaatcctcccggtaatgtctctttgcttacaatcacagcctccaagttctcatctgtaatggaagggccaaatggatctgtgattggcacagcttgcacttccaactccggcttgatagactttatgaaagttttgacattatttatcctttcctcaatgggctgtatcagttcagcaaactgtttttttgccagcataggtccatcgcaaactccaattacaatccggcgccttgccaactccgctgaagcggtgaggaagaggcggtggccgtcgtgcaatcggtcgaaggtgccaccattgacgacggcttcgtaggtgttgggcggagagagtttgggaaccaccatcaccatggtgtcatcgtcaccgtgaaccgccattcgatgtgcaggaatgactttcactggtggcagt

SEQ ID NO: 21998 - DNA, 435 bp, Glycine max
  unsure (1)..(435): unsure at all n locations
gggcactcacaagacatcctaggcagcagcagtatctatctattcacttctttgttgtacttccaactcactcatctcagcttttggcttctgtggatctgtgcaaagactcaatgaaagatactcccaccgattgtgtggttcctataactcctgaggctgtcattgagaatggggatttgcaatcccaatcccctctcacactctcagtggtcaggaaacaactcaaacgtgcctgcattgattgcgattctgaccgtatctctgttgataataataatgacaatggcagcccccgaactcctaaggatggtgtttttgacccctttgcacctggtcctgataacatggcgctggcacccaacagcaacaagtatcttgatgagtacaggaccaccgttgcccgccgacttganttccatccctcctttgatg

SEQ ID NO: 21999 - DNA, 394 bp, Glycine max
cttcctaccggttgcaagagaccaccgaagggggccaccagccacttttcttttaattggtcctttcttggcaacaataatcccacccggaccaaatgtaaaaatcgcgttctccaatgatgctgcaaggagggcagcatccaggaaaaggaggatgggaattctgaagaagatggaggaactcaacttcctagggcaaaggatcgagaagcaccaagagaagataaagaaactacaaaaggaaatcaggaagaaggagatgaccatgttcatatatcggtgcgttcatgcagggaggcttctgcctggtagcgacaacatgaccctggatgatatgaacaatcttgtgtcgatcgttgaacagaaaatgaaggacattagtggaaggtttgaa

SEQ ID NO: 22000 - DNA, 237 bp, Glycine max
  unsure (1)..(237): unsure at all n locations
tnnnnggtgtggcattcgagaccttgagttctgttaatacaagcttactgcttccccttaaagtgatccagagatttaacagtgtttcattggtctctaaggcatggttcatcaagttttactggttccaagttaatcttccattttcatttgaaccccacaactcgttttttcccatccgtaggcatgtgtcacccgacgcgacgcgtacgcgtcgcgtacgcgtggtctacccga

SEQ ID NO: 22001 - DNA, 570 bp, Glycine max
gttctaaaaatggtatgagaatatcattattcacttcatatagctcgtagagagattggtaatttacacataactcagcatcaatttgcagcttctctaacatagaatacatctggatcaatgagtgaatgtattctatgtaaggatgcactataactaatgatgaaaatgaagtagcaatcagaataagagcagacacaaaactaggcagcaaaggaggaaacaacttattctgctgagtgatttatcaacttgcattaaatgtcttctcatccttgggttactggtccccgaaagattgtacgaattggcgtatgtatgaatgtttgacacgtggttaccaaagacccttgcatatatcatctcaccaaagattccaaatgtgttgtctattgaaccacttgttctaatcataggtgaggtgtaaccgcttggaatcgagttgaagtgttgttgaggatgataaggattactatagggatggtaactttgagaaatcggttgggaaacacttctaatgttgtgtgttctgagaccatgaggtctttgtggtatgacagtccctacttg

SEQ ID NO: 22002 - DNA, 485 bp, Glycine max
gataaaaatttattgttgaaatgttgcaaagataatataattaaggtaaatgtgtaatattttatcacatgttagtaaataaatcctaccctcttttattgtttatagttttacataaaaaaatatacatcaagaggaataaagggccttagaaggtttggtagaaaggccaaacccaaatgggaagaggggatcatagtgaggatctccaacattcattggcagttgatcaacagttttgaaccatgtccttggaagctttccagtgaaaccatagccgccatataaaacatcagccacaccttggccttcgctacctgggagccatgcagcaacaagtgcatctattaaaccaacatatggttcaataactacaggacgaccagaaataatgataaccacgcattttattgctccacagacatttgttatgatcttaggaccaggttctgggattgtcaagttcatgctgtcaccatacattt

SEQ ID NO: 22003 - DNA, 581 bp, Glycine max
aaagaagatattaataattgtgtaaattacataaagataaaccttatcaacagtgcatacaaatgttgtgcacaatggtaaaacaaatgcagacaccaggatttcaaaaggagacaattcaggtttgactgggcttactacagagcaatgagtgggtttgactgggcttaaccaattttccatatatctacatcgagaacccttatttaattgataaatattagtagatacgatagtaattaacagaacaaagtattcgagaaagcacaaattcctttatttatttcttccttcagggttcgggttccatattagcaataatgcagcattcaaataaccatataacacagatgacaagctaatgccacatacaagataatccagatccagatgtctcaattacaatagtcctgctcccatcactgagaattcagcctctgaaaatccaccaactggtaaagatcacctcgcctttgcttagttacaggcagatttgtccttctctgctccaatattgaataatcaatttctgctatgatgattgcctcctcatgttctgtagtagccagaacttctccaaa

SEQ ID NO: 22004 - DNA, 586 bp, Glycine max
gggttccattccagttccgatccagaaacctttttctcagtcgctgctccgtcgtcactgccaaattccaattcccgtgttacttcgttcaaccgagctttttctctctctctagaactttcctttctcaaacccgcacctcgtcaaacaccgcaatctcgctttctccgacgcgatccgtgttcaatttccccccaaaatcaggcacagtgatggctgaggatctcggcgtggaggcgaaggaggccgcagttcgcgaggtcgcgaagctgctgccgcttccggagcttctccaatcgatctcgtccatcaaggctgattacatttcgcgccaacaggccaatgatgcacagcttaatacgatggttgccgaacaggttgagcagtcacaggcaggactaaaatcactcttcttctctgagaggacaataaatcagcttcgtgaaaactttgtctccattgagaatttatgtcaggaatgccaaacattaattgacaaccatgatcagataaagatacttagcaatgcaagaaataacctaaacacaaccttgaaggatgtagaagtatgatgtctatctctgat

SEQ ID NO: 22005 - DNA, 442 bp, Glycine max
ggttgcagagaaaaatatggagggaaccgcaccagggtgttacaagtgcggcagacctggtcgctggtcacgggattgccctttctccgctcccaattccaatcctaaccctaaccctaaccctaaccctaaccccgccaccactcccaatccaaatactccaaatccttcttcctcttctttcaagcccagattcgccgccgaaaagcccaagaaactcccccgaacaaagcctaagctcacaccggagcttcttctctccgacgagggtctcggttacgtcctccgctacttccctcgcgagttcaaataccgtggtggtggccacgaggttcgcgatttgggtaacctgcttcgtctgtacaccgaatggcactctcgcttgctcccttattactctttcaatcagtttgttcacaaagtggagaaagttgctgctaca

SEQ ID NO: 22006 - DNA, 493 bp, Glycine max
aggcgtgcgaacacgtgcgagagggctaccgtaggggacacaagcaagctctatatagttcactgacatatattgaactatcttcaatttcacaacatgaagaaagtggctgtcacattggccgctctgcttattgaatctgcccttacagcgaccgcttcatatgctatagccgccagtcgcagcaaattcgacaccagacgactacaattgttcacacgtgacgacataccttgtttggttcgtgcgtggattaccccattggcggagatgctgtaacttcaggagattgttgccaacgtgtgaatgcagtgaatgcatcttcacacacgcaaagtctacgcgtggccgcatgaatgtgctattacaacgtagcaactagacttactttgtcgcatcgagacagggcacggacactgtctatagcgtgtgcatgagagatggattttatcatgagcgcgaacaccgattgagtcaacgtgaccgagagctc

SEQ ID NO: 22007 - DNA, 432 bp, Glycine max
ctggaccaacattttatgtcactccaaacagaaagtcgaacatgatataatataagatgaaatttttctcttgtacaacaagcaaagtcaccattgacatctatttctcgatactttatctacccccaccattcatcacaaccacatattcgcaagacaaactattttctcaacaaagtgaaatccaaattcaatcaaaatctcaacgggttgcttaactccattaaaatcttcacgagtaaaaacttggtctcaactgaaactgactttgcaggcaacaagtatcataactcagtgagttaactaactagaacccaacatcttcaatgctttaggtcttctataccacaatattgcaaacaatagagtcctcaacagaaccccatttgcaaaatgaggaattattatacgtacccagtaagggtaatatgg

SEQ ID NO: 22008 - DNA, 504 bp, Glycine max
ggcactaatattatttattgatttttggaaggcaggggtgacactaatatatgttcaacgtattgtgctattttcaatgtcaaacataaacaatgccaatcacacatttcaatcatttaaaacacacacataaccacatcatttcatttcaaagatcaagaatgagttacacttgccaatgagtggccacatagtttccaaaaaccaaactgttattattgtgaatacaccgtgctcttggattgcagtatttgaacaagcggccacaagatatccaatctgtgtacatttttgttgttttgaccctcgacgacaaagcatatccatatcttttcaccatgagcttttgttgcaccctttaaaatggtaaggcccaaacttcttatggcttctgctatttcaagaaaatggctgcattcctcacagagcatctacaccagaaggcataattagttagtatagaaacaaactcaataaccgattgtatcgacaacaatagcaatt

SEQ ID NO: 22009 - DNA, 626 bp, Glycine max
aaaaatggggtttcaaataacctttgtgggggaattattaaccattccattccttgtcttgaaacccttattattaaattaccacctttaaatggttaaacaaagtaacataaaaatttctccatcaatcaaaatggggtcatcatcactctatttgtctcagaacatggtaactctttttcacctcctcagttgcagcttcaccatccaattcaaaacacacgtttggatgacaatgttctattgccttgtgaagggttgccttaacatgttagatttacaacaacattacagcctttattcttcaacactgccctgtgaatcatattattgcgaaaggtcacacctttttctttagcaccgccgctaacctttttttcgtccaaggggaaaatagataaaaatggaacctcgtcgaaatcagacaaaggtcacacctttttcccgtccaaagcaatattaaaaccaaagcggaaaaaaatcgaacaaagaaggcccttaagcggaagaaaagaggagaagacgagggagagaaagagagaggaacggaagattaacaaagacgcaaaaagaaaggggaagagagaaagagagagaaggtaatgatagaaaagcggacgcgtggg

SEQ ID NO: 22010 - DNA, 470 bp, Glycine max
aaaacggcattcaatttttgcagtttcagatattattgatgaatcgagtaagtaatgtacaaaatttctgaaacaagcatacacgcatgcttgtccatcatccaaaaatggatcggaaaactgcttaatctctattacagtcaaggcaatgaatcaaactaagctcctttaaaagttccaagttccattcgtttgaaggtaactttactgaatttcccctagcaccacctattcttctttatgggacttgtttttatatctgaggcaagcatcggaggggttctgccctggttgagctctaacacgagtagacctacgaagaacagactcatctacaaacctgtgcatcaaatccttagatgttttctggagttctgagcatattgtactataatatttttctagctgctttcgcagtaccctttcccgctcacccttgcaattcagtgaactcatcaatgcatcaagct

SEQ ID NO: 22011 - DNA, 579 bp, Glycine max
ggtaaattaatgggaagaattctaaataattcctatagtacaactaaatttggccaacaagaaaaacaaaagccggaaaaccaacatttgaaaaataaaataaaataaaatttttgaaactaattcaacttgatgattatcaacaattattcattctttctttttttccaaaaataaattttggggtcaacttgatgggcatttggcagttattctcctgatcagaggtgcaggcagaaatattcaagaggcaaccctggttaagtatgaatgtttatcatgaattcatgattgtggtggaagatttgttcttgggagtatggaattggctagctcttcattcaccttcacaggaagaggtggcatttgcttcatcacctctggcgagtcattcaactcgttcataattttaaggatgttatctctagtttggcagaaaagattgatgttctcctgtacctggaaagcagaaagatttgtggagatttgattcaaggcctgtgcattttgctctaataggtcaccggtgggacctccaattgctgtataagagatgccatcatcattgtccattgcaat

SEQ ID NO: 22012 - DNA, 662 bp, Glycine max
aaggaaattgatgcttgaacaataaaaaaaacagttgtaaagttcaagaaaaacgagacttttacaacactccttattactaacaactattacacaattatttgttttacaaaagcatcctccctaattttagtatttctacccagataccttgttactcaaactaaaaacgtgaaagactgcaaattaacacagtacaaaggtcaaaatgctgtttccccttcagcttcaaggaattgctcctaccaagcatgatcaaaagtggaaacttagccaatgtccacatcaatagccaatggcttatcctctgaaacaaaggcagtttctggagctgctgcaggctccgcaaactgtgttgaagtggactttgattctgtggctgaaaatggactcctcgagtgagcagcaacactagtgtctacttccatagcagaagctctgggaggtgatgctggctgcacctccacatctggataagcagccttaaaccttgcccgcaacccctcatccaccaaccttacaccactcaattgattaccaagagacatccatcctgcatgagtattgtgcatgcgagcaaatagttctagctttcttgttcctggacttatcctctccagcataggatacatctcatctggtttgcggcttgtttccctcgt

SEQ ID NO: 22013 - DNA, 611 bp, Glycine max
gggcaaaacggtctaacattatataacaactgaggtcttgaatatcatactaaatatgtgaacccattcaggtccaacaaattcaaacgctgtgtaaatatgggaggggagcaaatggaataaaataatataaaatagtagagtatctgtattctgagacaaacataaacaactgtaagtaaaactaaccgcaagaatacaatttgcactaagcacctagagtgcatttaagtatctaagcacttgctcattgaactcaaagctcactgaattccaagctgaaattgaaactaagcacttgcatgacatgtcgtctgcaattctctttacaacatgctcctaaaacaagaacattagttctagatgttactcattttgaaagcttatgatcagcagcatgacacaaagactactgagaaagattttaaccaagacatgtgaactcttacattcatggaagcttaaaatttcagcttcagggcttgtgaagtttgaagccaaagactctcgggacatagctctgtgatggtttctgtggctgtagttgtccataagtcatcaagaacagatgaggaaatgtagttccaaaatgagcgccatcaatgtctaag

SEQ ID NO: 22014 - DNA, 386 bp, Glycine max
aaatggaataaaataatatggaagggtagattatctgtgatctgaaacaaacataaacaactttaattaaaactaaccgcaagaatacaatttgcaataagcacttaaagtgcattgaagtattacgcacttgctcattgaacttgaagctcactgaattccaagctgaaattgaaactaagcacttgcatgacatgtcgcgtctgcaattctctttacaacatgctctttcatggaagcttaaaatttcagcttcagggcttgtgaagtttgaacccaaaaactctctggacatacctctgtgatggtttctgcggctttagttgaccataactcatcaagaacacatgaagaaacgtagttccaaaataagctccatcaatgtt

SEQ ID NO: 22015 - DNA, 561 bp, Glycine max
gtgggataaatcagaactatgggttggctatatttctgaaaacggagagatctacaagcgggtatgtgttgccgggaataatccttcacttgtggagtctccaactgagcccaagtggtcttctgatggagagctgtttttcatcacggatagggaaaatggtttctggaatctccataaatggattgagtctgagaataaggtcttgcctgtttattctttggaagctgagtttgcaaggccactgtggatttttggtatgaattcttatgaatttcttcaaagtcatacacggaaaaacttaattgcttgcagttacaggcagcaggggaagtcatatcttggaattattgatgatgtgaagggctcaaaattaactgtgctggatatccctttcacagatatagataacattacttctagtaataattacctttttgtggagggagcatctgccgttcatccatcatcagtggccaaggtgactttagataatgataaatcaaaagcagttgacttcaacattaattggtcctcctctcctgatagtttgaagtatag

SEQ ID NO: 22016 - DNA, 487 bp, Glycine max
ttttattttttcaaaaacaaagaaaaaaagaaataaacttttaacataaaaaggaatatatttctatcatctaacataaatctacaatcttctgtactataacaagctcaaaagaatcacgtataattgaacaatgaatgccacagcatccaaaccagacagacacacgcatgaatgttacaacagcacgattaagtccactgagtttctgtggtgaggtcaatatatgaatcaaatcgtgtctcgggactcagtagccactattaccgcatcaagaggatcatcaacagtgttagaagcaaggaagtagccaatgaaaaaccattcctgaaaccactactgcttggatacactgaaggaagagaacattcttcgccatttgaaaaataccttagtgggaaaaccatctccacgagctacgttgattccaggagtagttttctttgtaaatgagataactgattgttgtttaccaggcaccctagga

SEQ ID NO: 22017 - DNA, 391 bp, Glycine max
ataagacaaagcaattggataaatttatagttcatcgggtgtgagctacttccctaaaaaaaagaaacggtttgtcctaaacaatttcagacttatcaagcattacataatataaaaaagatgttaacagaaatatgattgcacatcatcaaatttgggtaaacaactaaacaagaacggcaatcgatactcgggtggtcaaattgaatcaacacttttttcctcctcctctgccacgtaatcgctcaaaagaagctccaattcaattccataaaaaatggcaatttttttaagcatatatgtgcgtcaattaattggttcactcattcaaggcgctcccagggaatctctgggtttcgtttcctatacagcacactaaccataggtcata

SEQ ID NO: 22018 - DNA, 393 bp, Glycine max
ttgagaactaagtatataactcaactatagaaggtaactctactcaaccaggtttcagactagaaaatcgcaaatgagacatgatggcttcttagcagtcatgatttctgtgagtgagacagactgaggattcaaattgacaacgaaaaatcaagtatgttcagactatcataaaaaataaattcaaatacaataaagaaaaaatgtggaaatcaatagctagctcaatgcattataaattaacatcttactaatcgcgctgttcaaatctggtcattactccatatgagaactgcattttcttcctccaagttactcatcaatggtatcaaagactcacttgtgcaataaccttgaatcatcacatctgtataaaaaaatgtcatatgcttg

SEQ ID NO: 22019 - DNA, 554 bp, Glycine max
tcaaggggaatgggccaggtgggtcaaaatttaggttcctgaaatgacatccaaccatggcagatagtaactatatcgtagacaaggattatccacttgagacaaggctacatcgaaaccaacaaatgccgagtccattccaatgcacgttgatccctgtcagctttattttcagataaacttggtcatttgtggtacaagggtttctaaatctagggaaaactcgaactgatacaaaacaaaatgtgtttaaacaacatcaacctcctgtaatcaacaggagaataaatcacaggagaaacatcacgaaggtctatccactaggtgccactactcttttcaagcttttcaatctcttcatgctcctttctttcagcctcgtgccgttctctttcagcatcttcctcttcctcaatctctaagacataaatcctggtgtgcatgcttactcaggctttactaattatcccaccgcctgcttctattcataatcacctgttgacaacctgacatacccaactatgactgcttttttgctacatctacttttaact

SEQ ID NO: 22020 - DNA, 491 bp, Glycine max
accaaataaacagtgaatgttaactcctgatgacctgcaatgcaagggtgggtatccaaactgtacaagaagcacagttgggaataaatagccgtttttttatttttgtgaacaaggagatgctagatactttcttagtcaacttgacaagagattataaaacaatcagcataaacactaagcacaataaacaatcagaatgttttcactgtctgaggaaatttacagcagcccaaatggggaagatcatgataatgccttcaacttgtctgaacattcgtcatgatctgctggtgctttgaagttcttcactgatttacccaagacatttaaaacagcaacacgctgtaattctttagcttcctctaatgaaagctgaattgatctcttctctaactcaacagcatgcttgcttagttcaactgatgacagggagcgaagcatttggatatattcttcttgatctgattggtccaatttcctcaaaaaca

SEQ ID NO: 22021 - DNA, 477 bp, Glycine max
ccaacctaacctataactttttaattcccctggcaataattgtttacttacgcaagatctgaacgtggatatcgctggcattcaagcgctaagcctaacatcattttaagaaaacagagaatgttaacttctgattatctgcaactgcaatgcaaggatgagcacaaggtgtccaaactgtaatcgccgttttttgattttcgtgaacaaggaggtgctagatactttcttagtaaactaagcacaataatcaaaatgttttctctgtctgagggaaatttacagcagccccaaatgggggaagatcatgataatgtcttcaacttgtctgaacattcgtcataatctgcgggtgctttgaagtttttcactgatttacccaagacatttaaaacagcaacacgctgcaattctttagcttcctctaatgaaagctgaattgatctcttctctaactcaacagcatgtttgctaagt

SEQ ID NO: 22022 - DNA, 471 bp, Glycine max
aggaaaagaatcactctgcactcatatcttgagaggaaatcttgatacttcagcatacacacctttttttttaaagaaaaaaaatactaaatttaataaattcattgaacaaaatcaacaaatactatctctattcctacgtacaaaaaataaatgaaaatattttttttctaaatataaaaaatatatgactactttcaaatgcattgatgggtaatatttttatattattaattgatggccaacccttttaatgagataatcactcatttttaaggaaagggatggattttattaaactatggacaatataattcatatttactggttgaaaaaagtatctcttgaaatgtaagtagtgtcattaaatacacttaccacttaaatcattcaattttataaatatttctaaaataaaattaaatttataatattattaaaataaactaactgtaactacttttttttatt

SEQ ID NO: 22023 - DNA, 511 bp, Glycine max
gccaacctaaacaagacaaaatttcggcccttttttcaattatttttattattcaggcccaactctttatcttcttattaaaacaaccaacaacatgcattggaattttcacgggctcaacttccacccacttaaacaatttcgagagaaaacgttaaacctatggcagaattgcagaagaaaactctttgagaagttagaaagcactatgtcaagggaggcttttcaattcttgtgagttccaagattttcctgagaatttatgcccatctctctacactttcaaattcttcactatcagaatttatgtccttaaatctcacgcttgccaactacattctttgaatcgcttttaaatttcaaaattcatgctcttgttcttaaatcgtttcaaccccttttttttcaatctctattttagctttcaatttctcttctccctgcatatccttcttagttatggattgggtcatatttggccatgtggttagtcattcctcatataccaaaa

SEQ ID NO: 22024 - DNA, 556 bp, Glycine max
tacaaaatccttttcgacccccgaaaattggagtgtatgccctcccaccagatggaaaggggaaaaaaatgaaacaatcataatatcagaaatacagtcagcagcaaggcatgctcacaaaatcataggtaacatgaaacacccatcaaattctgtgagtagatcaagttgctaatgaagatctcaaatcgtcagttctgttggaacgacacatacaatctgggcatggaaagctgtatatagaatcatttggtctcttaagctcaactcccttggaatcactatgcgacctcatgctcagcagttgacggttaagaacttttccatccaatatttgggattatcaaacagtaatgccaacttccgcttatctggcttaaattgtttagcatgtccaccatacaagaatcttctgtgacccagcagaaaatgagggaagttgcctccctgagttgtgacaaacacctcactttgaagacaaactgtgtaatctatagcagccatcctggaagaataattcttaaatggagcaagctcctcttcagaagctagggtc

SEQ ID NO: 22025 - DNA, 612 bp, Glycine max
atataaaattgctttaattcgatcaatttctcaacggaaaattaaattaggttattggatattctaacacgattctgaaccaaacaccctgctgaaatgtatatagatcccatcaaatgaagtggatctcatcctacatctagtggggtttaccacatctacatgaatttcaactaataacaaataaatatgtgaagttacttaaaataacgaaattttaatctgatcgcagccggactttgaattctggaaaaaaaatacaaaagtctgaactgccaggtgtggttctgttatgctgaagagatatactgcaaatcaagtaaattgtgcatagtgtaaacctgattcacaagttgctatgaataaagaggaagggcataaaatttttgtactcccaccaaatttgcttgttaatgttgtgaaggggaaggaaatgttttctcaccctttgttagtaaataatgaaaagccaaaatcttctcaatacgagctcactcctgtacacaaaaccttccgtgagctcaaaacaaatatcacatgatggctgccaaccccacaacatcaccatcatcaactttggactcaggagcattggctgggcgcggtcttgtt

SEQ ID NO: 22026 - DNA, 533 bp, Glycine max
aaaaaaaaaacagccgggccattctttatggccacggctgaattaatgggaaaaggaaaacctatataggagaaaagcttggtctataaacaatgacagagagcataactcttatcatcgaagatcaattacctcaaattttaaatctggggtcatgtatacatctggacatgtcttggaaatcggaccaccatctggaggctgactatgtggatgaaagccacgttgatcacattgtttaatcacagacattccaccaggggctgtcaacccaaaaatgccatggtttctcgaactatctcttggcgccataactattgcaacagattctggcagcataatctgataggagtaatgggtgtgcaaatcaattgatgacataaaacaagattgtgtaggatgtgtatggatccacccaaggggaaaaagagaccgtttatcttgcacttcaaatatttcctcttcatttgtagtctgacaagaatctgatgttgactcctgctttgggattataagggcagtaatataaaatt

SEQ ID NO: 22027 - DNA, 555 bp, Glycine max
  unsure (1)..(555): unsure at all n locations
cctatttcttatttttttgggtgaaagagtctatcactgatattctaagagctcagttagacaatgatgtacaattaagtaaatcctttctaagctctactttcataattttttagccttccctatctcgcccttggtttaattataggtttgggcccgtagacataagtttcaatttaacccccatagctttcaaatagatgagattatatccaaatcagattgatattgtcatgtcaacaaggcattcatattgttgacatggcattgtgccttgccatttccatgccagccaagtaaaaaaaaggagcaactcatcatcaattttatgccatgaaaaaaaaagggacttgccacatcaccattaaaccaacaaggggacttaatctcnaccaattaaatngagcggtgaacattgttaaaattgaaacaagggaccaaaatataaatttagtacgacaataaaaccaataattgtaatttagcctccccattcttcaacgactaaacagcaaaatgtgcacttaaaagagaaaaatgtggggtggctgttga

SEQ ID NO: 22028 - DNA, 597 bp, Glycine max
gcacaaaaaaaatctttaataacgaaagttacatctaccatatgaggttcatgttaagacatgctagaaatattatacaagtgtccctctatgtccggaataaaacctttctccaacatttccagtcttactacatcgtaggtagtacgattagggttcaaacccttttccaacatctcattgagaagcctgtttgcatcctctagcttgcctgttttacaaaatcctttaatcaacacattatatgtgacaacatttgcacgcttcccttctttctccatctgggtcctcaccttcaatgctgccttgagatttccctccatacaatatccatccatcaatgtattatatgttacatgattaggtttgacaccaacgttgagcatttcaaccaagtattttttctgccttacttggttcaccatctttgcaccacccacctattaagatgttatatgttacaacatcggctttcaattcatagttctccatttcattaagaagcttctttgcagctcttacattctgatttctgcacaaccctgcaattaagcaattataggttgaaacatttggaaaaatgccttcatctagcat

SEQ ID NO: 22029 - DNA, 505 bp, Glycine max
  unsure (1)..(505): unsure at all n locations
nnnnnnnnnnnnnnnnnnnnnnnnnnnnnnnnnnnnngggtttttgctcaggggagcttcaaaaattgaacaacccttgaaaaacaaatttgggggccccttagcaaaacaaagggttttatttaacttacttaattcttggcaagaatttgaaagaggggtccccattttgggccttccattcttcgaaaattttttcccccgaggggaagacccctgggaaaaaaaaaaaaaaaaaaaaaccgtggcaagaagcattttcctttgctttaatttaggggcgcccttttaggccttttttcgattccttgaacaaaaaggccacccttccaatcaccacttttgatcttataaacccccatttccaattccttggccttttggccatcggtggaaaaactttcccaattccacctccaaccattcatttgctttttccttggggggctggagatcgagacttttgtttttttttacagggggtgccctaacaggggcaaggaaa

SEQ ID NO: 22030 - DNA, 717 bp, Glycine max
gggggattaaagtttattttactggcatttctcatccagatatagcctaagcaaaacaaaaatatctgtaagcaaagcaacccacgctatttcgggtggggcagagaaccaaaagagagagtggcagagaattgttgcttagcagcacatagtatctacattattcctctaaattacaagtatgacagtcccaatgtgttggaccttcacctcatagctgctgatcaagatatgcatctctgggagatttgggtgacatgggagatccaacggtagttccaatatacccgattacatttccagaaacattcttcaaccagaaggtgcttcgtgttaaccaaccaccctgttctggttcttgcatttcttggttgcttttcctttcttcctccaacaatatatcaagccacctcttggccataaaagtctttatggcttcaagcccttgatttacaatctccattggtggcaattcaagaggattttgctccaagttgagcttgattaaattatcaaggcgaccaaatgtgtctggaagagcatgaatctgattattgctgagatccaattccctgaggttagccaaatcaccaaatgtctcaggaagttctttgaggtcactgaagttgctgctcaggttgagaacttcaagattagtcagtctcccaattgcaattggaagcccatgtagctcattaaagtgagcatccaaatagt

SEQ ID NO: 22031 - DNA, 711 bp, Glycine max
  unsure (1)..(711): unsure at all n locations
gggggctggatggtggctaatttattggtttttttcatttctgcccgggataattttggaagtataaaaatgttgggcagctacgcatgcagtttttgttatactatagaagaattgttgtgtccctgggaggagagggaaatcctaagtattataaaccctctaacccttcaagggcgaattagcacacgaacccaacttacacacgacacattgaagggatgtagaccacgcgggcgacaaccattatatgtcgaccccggcgctcacagttttacttacttggactctttcgcttccgccatcanncgtttgctctttggtctctccatgagggtgannatttctgaatagggagggggactatccacatcccagaaaaggatttagttttgaaaagatatttctcttctttctcttgggcttcnaaaattggtagagaccattcagctggagcctttcatgggataggtaattccatacctatgatcttttaaaacctcaacagtttcagaaggttgcaaataatcacatacatacacccctgctagccatggtgcaaagactcttctaggaaatggaaggctgcatccttttttggcttccaacatcatgattgttaccagagtcaacatctacctcatcacagattatatccaatctactttgcagactcgtaatgatatctccctttatatcagtgatggctta

SEQ ID NO: 22032 - DNA, 256 bp, Glycine max
catggacaataactccatgcaatgatcttttaaaacctcaacagtttcaaaaggctgcaaataatcacacacatacaccactgctaaccatggtgcaaagactcttctaggaaatggaagactgcatccttttctcaataagtgcaacactagttggggaacaggcgtttcagctgataattcatcgcttacttggcttccaacatcatgattgttaccagagtcagcatctacctcatcacagattatatccaat

SEQ ID NO: 22033 - DNA, 564 bp, Glycine max
tttggactttcatgttcccatcaatattagaactaataaaccaataactagctagtttgcagttcccaggaaaccaagatctgttggcacatgtacacttacaagacagctaaataatttcatgtaccttttatttatctagactagatacatggtgaatagggaactataccagcatattaatccttaaaatgctgacaataaattgaataggacttccctatgtcagaaacaaggcatgcctaacatattgtctacaactataagattattgttcccatataacaatgtacatgtaacctatgaatttctctacacaccagtatacagcaaagccgcattactagctgttttcaatggaggcctattaatcttctctagtaatctactaaatactaactggactggtatgcaagctactgtagtgggcctagagatttctggtttagtcaatctatctgtttgataactactgctatcatgtaatggctttctactaagattatgttcagtagataatgaggacagagttcgagttttttggctagatgacaagcccaattt

SEQ ID NO: 22034 - DNA, 439 bp, Glycine max
  unsure (1)..(439): unsure at all n locations
gcaaaatgaatgagttggctggtgatggtactagcactgcaattattttggctcgggccatgattaagtctggactactagcagttgcttttggggctaatcctatttctttgaagaaggggatggaaaagactgtaaaggagctggtcaagttcttgaaggagagaagtgttcctgttgaaggaagggagcatattaaagctgtagcctcgatttctgctggaaacgacgagtatgttggtaacttgattgctgaagctatggacaagattggttcagatggggtgatctctattgagtcttcctcatcatctgaaacctctgtgataattgaagaaaggatgaaggtagagataatgttgagaggaaagagattacgagaaaagacactntgaataataatattttcagtactggaatgtttaccatgtgatattat

SEQ ID NO: 22035 - DNA, 1005 bp, Glycine max
aagcagcacaacactagttcccaacgccgtcaccccctttgtgcagtgaagaagaagaagatggccgtaaaatcgaagaaagagaaagaacacctgaatcttctcctaggttcccaccttactactatccatgaaaccctccaggttttggatcaaacaccgccatcttcttcttccgccaaagtcacctgggacgatgtcattaagatggctgaacaagtctcaaaacaagctaccacggtgggaatgctgtggactggagagaagccagatgccaaagcagttgaggaaaatatggcatcatatttcaacaccctgcaaggtttccttttactttcccatggcagtacagtaggtgcagggcctaccttgtcttctgctgttcatgcatccgtcaagcaagtcgttgattccagcttcagattgatgaaggaaactgtctctttatacgggtaccattctaaagacctgaaaatatcagtaccacaattggttggtgctgtctgggaagcctgttctgcccttaaaaagactccttccacaaatattacagcaattgggagaggaatgacacaggttgctgtttcagtgaaggatgttcttcgtgagatgaaagaattgaaacctgtttcatgtgatgatcaagttgacgaagctgctggtgagagttgtgcagaagcagcgtctgagccgcatgatgataattcaagtgaaggtgatctagggaatgacctgtcacctgaagagatgaaagtggctgaaagagcaattgaggttgtctctaatacgctttcatttataaaactacgtagtcacgccatcagaggcttgctttagccggaaaaaccaaatgacaacagcagttttgtaaattctctggagaagttgttgcagctgtgtcatgaacttggtcgacagatcgatgagattggagcttgcctttatcccccacaagagattcctgccataaatgcagctttggagaaaattcacagcattattgat

SEQ ID NO: 22036 - DNA, 498 bp, Glycine max
ctgttacaatgacacaaagcgttgtcgtagacttcaacaatctccccgaaggttgcatagcaaacattctctccttcacatctcctagggacgtgtgtagactctctttgctttcatccactttcagatccgccgctcaatccgacgctgtctggaacaagtttttgccttcagatttccacaccatactttcccaatcttcctctttatctcttccttctaagaaggacctctttctctatctctgccaaaaaccgctcctcatagacgatggtaaaaagagctttcaactggataaagtatacgggaagaaatgctacatgttatcagcgaggaatctcttcattgtatggggagacactcccaggtattggcgctggacttcgcttccagatgccaggttttctgaggtagctgagctaaggagtgtgtgctggttggaaatcccgggctggatcaacacggtgatgctgtccccggagacattgtatggggcgt

SEQ ID NO: 22037 - DNA, 394 bp, Glycine max
tccgtggaagtagctaggcacttgtgttgtgaataatcaattaattttgggtcggttaatcttgtcttaggtggataatgaattactgttttttctaactaaaatcgattctgatttgccttgacgaggcgctattatgggaatcccacgtaaatttccaaaattgctcaaccaccatacttaaccaaacaggttataagggcatttttgagatctcacctaactagttcgctaatgccaatctgtcgccactgtacttttgccattacctgttacacgactttaatatgcgcattaaaatgttaactcatttaatagaggtaaattatacctcatttccctactaggatttatattaatatgatgcattatgttgtgtgacgactatgccccc

SEQ ID NO: 22038 - DNA, 434 bp, Glycine max
  unsure (1)..(434): unsure at all n locations
agcaaaaaaaattcatatttcccactaaacactggcaacaagattatcatacaaagagatcagaaatgtctatacaaccgagaaccctagctcgtacatgtttatagtttaagctaggaacacgttctttctaatgcactctttgtcattgattaaaatttattaagaatcacaaaataataagagaaactcatccaataggaagtgagccccacatcatttgtgagtctaaataattctcagctaataacaaagagtgtattagaatgtatattgctatcattctactcacaatttttgtgtagctatgtatattgttttaagcaactcaaacatcagagaactatagttcttcaggtcaccaagaatgacantaagtgctactatgtaaggtacaccccctttacaattgaatgatgatgatgatgatggtg

SEQ ID NO: 22039 - DNA, 448 bp, Glycine max
gaaaggtaaatttttatttatttatatcaaaatgcatactaagcatgggattatacatgcatcttcatgggtcgatagagaggacttgtccaacttaatgcaaagactcaatcgacagaaccatgactgtttttaaaaccacaaagtacagacaagacaacaaagggtaataaggcgacactgacatcgaaacacttttatcattgtgcagatacagacggctatttctacaatacacaacagagttgcagtgtaagaatacacagcaccttcaccattagttttttgtgcgtaaacgtggagcaatcgttatatcaacttagcgattaagatcattctatatttttaccattgttttctcttgtaacttgttcacgtagacacacataaattcagtggtgaagattatagtgtattaatgcaccatatgatttgttagtatattgtg

SEQ ID NO: 22040 - DNA, 476 bp, Glycine max
gggttgactaaccattgaaatgtcagcttttcattgacgggctagatcatacattctaatataaatacaactttgcggcataaattgtgttttgtgtggcggcttccaacttagaatgtataatttgcatgttccacccactgaaagcttaccaccaacaatcaactgtagaatcataagaaccaacatcaaatcacacacattctgggtctttcatttcattcattcatctttctccccctcattttacagagaaggagaagaaacaaactgtctcggtaaactaaaaagatctttcccttcaaatggagaactccactcccgggaaccagcagctgatgtctcagcagaagctactccaccatcttgcaatccaggcatgggagcattcatgctcccatttgagggcactggtctcattgatgattgagctacaactcctgaagtatttgcatcatacatcggagcactattac

SEQ ID NO: 22041 - DNA, 572 bp, Glycine max
agagagaattatttttatttctaaagttatagtggtgaataaattaagaacacatttcaactatagacaattcaagtgcgctatttattactggaacatatgtctgcctggaatagattaagattctatagctagcaataagaaaaaaaagtaagcataaactgcgcccccttgacaaatttgtattagcagatgtcaacaaaaaggacaaatgcaacctggattcggtcatccactgtataaccttcaatttagtacccccattattcatgctacattacactttcattttccccaaaattcaaaagaaaaatacagatcaaacaagatcatcaacaaataaaccaataataagcctcccaaagttccaaaaagactaggaaaccaagttaacaaattaagccaaaatatatctcttttaagaccctaatgaagatgcagatgttaatgtgaagagaggaaggaagcccttggacacacgcacacacacacatatatatatataaactctgatgaaatgatgattgattcacggctatagcctaatgagccatggctacctgggggtgact

SEQ ID NO: 22042 - DNA, 561 bp, Glycine max
aactgggtcaatttgcttctatattccaaattttccatttaatgattattctttccaaggcatttcaagtaatacacaaacttttgttctttcgtttttctagtttccttgtctatgtgactatgttcacataaaaacaattcaaagtatgacaaacaattgttgtaaaatagtgtatggtactaaaacaaattgaatggcagctagcagcagaagaaactgcattttgttcctccttgtagtgaatgaaatgccagccaaatgacagacacttgaaataattctgatgaaggagttcctctatgaatttggaacaaaggtgccaacatagccaacccccgcaacaaagaaggccatagattgcaggaagagatatatgaagtagtggttctttccatatttcagatcataacatgcacagaaaaacaggtaggcccccactagaagttccaggaaatgaagcctttcaccgattctgatacgaggctttctagctgctttgccacctgactttgttttaagagcatctcccaatttctcagtaactacccattcatttac

SEQ ID NO: 22043 - DNA, 949 bp, Glycine max
aaaaaaaacacaaaatttatctttaatattattttcatgtgtccttccaaacattcttggagccatcggaattaggatgggcaaatcataaatgatcatctatgaacccacagacttgaatatgttgacaaacaagtgttaatctgagatgtgtgatagttaggctgtcctcaaagacttttccttccatgtaacgagctgtaatgcttcatgtagaagcacttgtatgcaatgctactaaagaagcatagtcacctcccttgttgagtaatgcttcatgcttggccttctctgctatgaccccatttttaactactgcaattaaatctgcaccctttataggaaatagcctatgagccactactatttgggttcggtccaccataacccgggctagggcattctgaaccactttttcagactccgcatccagtgcacttgtggcttcatctagtagtaatatttttcggactcttcactatagctcgtgcaattgccacacgctgcttctgtcccccagataattgaactcctcgctcccctactaacgtgtcataacccttctgcaaactactaatgaaggtatgagcatttgccaattctgctgcagttataatttctgcctcggttgcgtctgcttttccatatgcaatattggctcggatggtgtcattaaacagcacaggctcttgactcaccaggcccatctgttgtctcagccatttaacttgcatcctttggatttctgttccatccagtgtaatgtgacctgagtctgggtcataaaatctttgtaataatgaaatcactgttgattttccacttccactttctccaaccagtgctactgtctgtttattgtatcagtatactcaatccattagtttaggaagaacaaattagagtagtgaagaaggcaagatgtgcaaattagaaagttaccttgcca

SEQ ID NO: 22044 - DNA, 535 bp, Glycine max
aactatgataaacgtccgaaccgaagtatatttatttcaaccagtaactgtaaccaaccagaaagagaaagtgatttcttttgctacactatcgtccgtcaacatcaaaacaaatcacctatatcagtatatcaccctaaaaacaatttaaaaggtctcaaatgacgctctacttcttaagcagtggttgcacttgcaccctcaatgtaagttttggttagtatgagcattgtgtttcttcaagtattctattcacttcctgtaatagctaatagaactcccatatgaacaatcattccgttcaagctgctggctgtccgcttgccattctttcgccttgtcatctttaaagtttgcaggtattttcttggctctgaaagatttgatgacggaaagtagcaatttgtcgcctgctattactctcactttctgtatcagctcatgtcgagaaatcctcttttctctataatccctgtgaaacttggcaatggaggcaacctcggacggaggcaaaatcttcgaaagcatcgaaatc

SEQ ID NO: 22045 - DNA, 406 bp, Glycine max
tttttttttttgaaaattatcaaacaatgatatatgaacatctcttatatcatttacaatttattatatttacatttctcctctctaacatctctttctctccaggctgaaataaggttgcactgatagttgcttttttccaaaattattaaaccaagattattctttcttttgttttttttttcttttttggtataaaaatcaaggtttttatattggagaaaaaatagtagctaaaccttgatctactgttatttgaagtttatcataggccatcaaagccttctgctcacattggtacgaccctttcccccttgccagaacctcaccatctgcatctatgatcccttccttctcttgggcccccaagcgtggaccaaggtccaagaccaaaactttcaccttt

SEQ ID NO: 22046 - DNA, 277 bp, Glycine max
aaattgatgccatacataattaattatattcaatatggattcgagttccattctgaagattttaaactaatgttttaccttaagaatttcttgtcacaaaactctgaagcaggcttgggcaaaactaaataatgtgctaataaacacactttattgtgtggtcatgtaaagatgaaggatatgaatactcctagagcaaatactattgatttgatggcaatagagctaggcaatcttccattgtccttccttaagaaaagtccttggtatataggca

SEQ ID NO: 22047 - DNA, 556 bp, Glycine max
ggccaaccgtccgcccacgcgtccgaaaagaagcatgagacggggtggtgaaaggtgaagagaagaagaacaacgcaacgcaacgctagcagagcagtgtcaaacgaacgacggtttcgttgaaccttgcagaatttgcctttcatctagagattgttgattaattaaaccccaagacttcttcactccaactaccacatctgtttcaaaatcctctggatgaaaaatggatgatggccgccaacacgaaaatggcaggcataagatggaatactatagaggagcacattccctgtggaatactgattcccagcatcaagtaaaagagccaaatgcactagttatgaataagaagattaggtccattatggctgaaaggcaggctgccattctagaaattgaactagagactgctatatctgaaaagaatgaagccttagctgctcgagatgcagccattcagcagagggatgaagcacttgctcagagggataatgcccttttggaacgagataatgcccttgctgcccttcagagtcggaacaattctgtcaac

SEQ ID NO: 22048 - DNA, 503 bp, Glycine max
aaggtaatccgtataattaacatatttcataaatacacaattagatttcaaattcaatttgtttacaacagaagcaattcaaaataatgtcttcaaagtagagggaaaagccattgaccaaaatacatataaaacattcaaacagactacttatactacgtagttcatatatgccagcacttatataatattatccacctcagaggaaacaacttttcagaagcatccaaggtggcaagaatacagtggttccagggtcaggtctagaccgttccttcctagttctggtgcagcttcctggctgtaattattgccgcctatgttcaaactggtgcgaaggggttgctgctgtggcatgaaagatgtatcaaccctgtagtttggctgctcccattgtgcagcttgctgtgctacagcctgctctttctccttgatcttctttgaagggtgttattctcctcttggatccttttctcctttttctgaagctcagaaatggactc

SEQ ID NO: 22049 - DNA, 567 bp, Glycine max
cttatggaagatagaagcatgtcatcgaagacttatagtctaggactaatatttctagcatcaaagcaagtttgtagtttgtttggttattcagttctttaggctacatatttttattttctaaaaaatggaaaactgttaatgatattgttaagtcccattagttattagcagcaccctctcgccagcctatagatgaccgaacaattttttagctcggccagttgaagtatgactatcggattgatgtatgagctgcaaattgtgcagatggttgtattcttagttttgacaaaggctacctttgtcactactgctctttgtttatttaattctgatacacttcagactttttagatagaaattggtttatgcgtcttttttggcttcacttcctctgtttttgtagaacgtgtatttttacaccttgcctagccgattcttcctttaaacacctctctttagtatgggctgaatgtattcaatttcctcttcaaaaaaaaaaaatgatatataaattaattaaaaaaataaataataatctatatcttctatattaactttctt

SEQ ID NO: 22050 - DNA, 555 bp, Glycine max
aaccgaatcaagctcttggtcatggtctcagtattagctggattatactatactgataatccaatccagaaaagcaagatcaacaagctacggtacataatcatcatcatgactttttaaattttaattttaatccaccagtctcaatctactatgatttttaatccaagctgaaacaaaataattatgctcgtgttcatgccaaccacaagcccaaagtgtcaaaagatcagaccagcctaattccacaacatttcttaattcttacacttaacaacatatgcttcagtaattacatgtcttagataaaatctattcagagaaacaacaacagtatcaaccccacccgaggctcttgttgttcctcttcctttcagctcaaaagtggggttaatttcacttttcactgtaattgttccttttatttaaacttttagtaattccacaaaccatcaagatccaatggggcaacagaaacagatgcatgattgtgattctcaaagggcctccaacccacatcaaaatttgaagaggtttcaacgttgatgtcagtag

SEQ ID NO: 22051 - DNA, 679 bp, Glycine max
gaggaattccgatctcatttcctttggcttcaggataggcctaataagaaaacaaataattccaattcatatatgaacatttttgcctccttatttcttgaaaatgtggaattggaattcctttcctttggcttcaggataggcctaataagaaaacaaataattccaattcatatatgaacatttttgcctccttatttcttgaaaatgtggaattggaattccccgaggaattccgatctcatttcctttggcttcaggataggcctaataagaaaacaaataattccaattcatatatgaacatttttgcctccttatttcttgaaaatgtggaattggaattccccgaggaattccgatctcatttcctttggcttcaggataggcctaataagaaaacaaataattccaattcatatatgaacatttttgcctccttatttcttgaaaatgtggaattggaattccccgaggaattccgatctcatttcctttggcttcaggataggcctaataagaaaacaaataattccaattcatatatgaacatttttgcctccttatttcttgaaaatgtggaattggaattccccgagggattccgatctcatttcctttggcttcaggataggcctaataagaaaacaaataattccaattcatatatgaacatttt

SEQ ID NO: 22052 - DNA, 485 bp, Glycine max
gcgtcgggaacattgatagatttttataacaattatgtgaggacagatagatcttatggttttagagcattgatggtaatggaggatcattcactcttattagtacaacaaggagaaattgtctggagtagagaggatggtcttgcatcagttgtagatgtaacaacgtcagaactacctgtggaaaaggaaggtgtatctgtggcgaaagtggaacagaacctctttgaatggcttaagggacatgtgctgaagctcaaaggaactttaatgattgcaagccctgaggatgtagtagctattcaagcgctgaggttaacgagttccgagaaaagcaaaatgactcgtgatcataatggttttcgtaagttgcttatagtacttacaagggcaggaaaggtttttgctttgcacactggagatgggcgtgtagtttggtctattctacttcatactctgcgtaaaacagaatgtgtgaacatccg

SEQ ID NO: 22053 - DNA, 335 bp, Glycine max
aagagttaaccacagtcacatttcattgatttgaatgcatcattcaaagagattacaggattctctaaatttgtacaaagagtatcctaatcctgtgttgcctaaaagacattattacatctcattaactcgtcccataaaagtataaaaaattaaaagacagcagcttttagtctccttcccaactccttcctcatcagttgcctgtcaaagcccgaagcagccaacattcctctattctcttcagcccttcttaggagatatggcataacagtctccactggtccaaatggcatatacttgctcacctgaaatcctgcattgctcaaaccaaa

SEQ ID NO: 22054 - DNA, 461 bp, Glycine max
gcgtccggtccgtgttatcctaatatcttgtctccgaccgttttggtaccttataaatcctataaataacactttacttcttacagcgccatcaacaactcctatcttcttcttcttcccaggaactctatattgcctacacaaactacccttctcttatttcttttttcctttcaatctcattattattcttgtctgaggctctggatgatgatgatgatggtactagccccatcctacctgggcttgcctgatgatgtttcaaaacactgccttgcactcgtgcctcgttcgaacttcccagccatgggtggtgtctgcaagacatggaggggctttattcgaagcaaagaatttataaccgtgcgaaaattggctgggatgcatgaggaatggctctatatcttgacagcaggcagtgaaggaaaagggagccattgggaggtcatggattgtcttgg

SEQ ID NO: 22055 - DNA, 389 bp, Glycine max
ttttcaaacaaaataataattattattattatacacaaaataaatatcacaaaattaaaatataaaaaaatctaaccctgtagttcacgttttagttttgacctagtgtcaattacatacacatgatcgtggaattggggaacggagcctgaacccaaacccaaacccgtcaacttattttccatttacaagatccgacccgacccactggcatgggggcagtgatccagtggtaaacagaacacagtaacactagtttttgtcacggttgagactatcccaaagcgacgcgcattgcctcttagcaaaacccacgcgctggttttccaagtcatacacgacctcaaatccttgctgttgatagttcccaaagattggcccgggcccac

SEQ ID NO: 22056 - DNA, 468 bp, Glycine max
gcattggcgtattccacttcatttgcatgtagaggaccatagattggtaacatgtggggtcatcttataatacacaataagactttgtgtgatccataggaatcaaacacaagtaccaaggagtttacaacaactcacccatcctgttcaacctgttcaaccaatcaactgagctacactcccttggtatacccagtaagactaggatagtatgactaaatggataattaactcatatcatgaaatcaagatgcctcaagaatagttgaactacctaccactttccatcaccatctatcactgatcttttttattttgaacaggttgcatctctgatttctttttctccttgagaattacctggctagggatcacatctattaggaaactttccccattccacaccgacgcagaaatcttcagcaattggaagactacagacaattcatatgacaagaatatgggaac

SEQ ID NO: 22057 - DNA, 396 bp, Glycine max
aaaaaccgcaaagcattcataaatagtatcaccattcatggcaaaatagttccaggtgttgggtttcaccattcaacccaaaatcaaaagcccaaagggggaaaaacaggtgaccaccttaggggtacatattgactttacaatatatgagtgtgtttggtttgcagttggcaaacctcagacgtcggcgagtggtacttctcatttttgggcatgggaaagtgggtatttccgtttgcattgcaagtatgcaaacgggttcccaaacacacatacttgtttgatttctaagctattacgaagtagattatttatgtgcccatcttttctttaagggtactgcaaagtgaggtgatataaggaagacctgtgtttgacccgtaaaatacatttgtg

SEQ ID NO: 22058 - DNA, 574 bp, Glycine max
attggaatcaaatcaatgctatatagtaaaccgggaatttcatttcattcatatacaatgataaacgagatagaagcactaacaaataaaacaatttctgtgaaccatatataaggaataaggaatggaaatgctgaactaaacataggtttcggtcatgttagcttgttcctccaatatccttttccttggtcaaccaattcccactagttacaatacatttgacggtcaactcttccaatggaataatgtttcctcataaaaccactcccatagtaaggaactgcttcatataaggaaacaacgaacgaagccagactaaaacttctggacttactgcaacaatggctcctcctctctttgtaactcatcaagccgtctcctagcataagctgtgaaaaagatggttgtcgccaccgttatacagaagccggcgacgttgagaataatttgtggggcagatagagaatgcttttcatgtgaagcatcagccaatgtccgaatcaaaattccagtatagattgcaacaaatatttccggcaccattcctaccaaggacccaactatataaggc

SEQ ID NO: 22059 - DNA, 682 bp, Glycine max
ctgaaagtaacgatcctcatcagcggttttagaggggcgtggttcacaacgtatccacactgctgaggttttgaattttaaaactcagtgtcactttgtcgtccacgtggcagtcaccgacgcgcattcttcctttcccctttgtttctctcttactcctttgagtggccgtccaatttctccagaaccttcccatgctctgctcggcccagaccggaaaatccggtctgaaactggctcgaccgcctccggtccaacaagggcatccccaccggcgacgaacccaacctcgattccttcctcctcacggcccatccgcaatcccctcaggcccgccccaatgacccgccccggaaccctccttccgaggcccgcgacgagcccatgcccatgagcaccatcctcgctgagctcttctgcatgggcgccaccctctccaaaaccaacaaaaaatgcccccggaaacagacaaaccctaaaatcttcctcgcttcctccgccaccaccaccaccacaaactccaaaccctccgtccccgccgccttgcctgccgctcccagcggcgacccggcggtgccggaagtggaagaggaggccgccgcggaccgcggtgaggacgaggaagaggggaacgaattgaaggggttcacgaagagcgaagtgacggtgatcgacacgagta

SEQ ID NO: 22060 - DNA, 392 bp, Glycine max
tttttccttttttttaaacccggaaaaaattggatatttacataaacattaaaaaaaacacaaattttttattttactgtgacttgagcatcctaactttcttccaacaaagaagaagacacacagatattgaaacagcttttaagaaaatctacacaatcacccaaagcaaagactccttcaaagcacctcttcaattagatgactcctgcagccttctttcacctgctgcaccttggttagcttgttccacttctgcccttcctgacctcataattcatagatgaatcttgtgaagattgattctctgctgggttggtaaaccatgtcccaaccacacctttaaccttatcaaccacacctttacctggactattcacatacatctcttg

SEQ ID NO: 22061 - DNA, 527 bp, Glycine max
taatatataaaaatatttatatagcattgctcagaaattaaattatttgcaatggaaggaatgagctttctctggatacatcagctagaaaaggaaagcaacaaacagcaaagaaaacaaacagaacagaagaagaaaaagaaactaagaactctatgtaagagatgcaacccatacataatctggcataaaaaggaataagggttgtttgttctatttagtctggcaattaaaaatttatttattacaaccaaaccattcatttagtcttacacttgtctctcactcactcactgacagagagcacatgatgttttttaagggccagtgatgcctcatccggtgctgatgatccaaatttctgaaactgaacccttaatatattctcctcagacaccaccaaacgcctgtttccatcatcatcgaaatgaatcccaatatgcccacatttgctttcttcgccagctggacagaacaaaagggtatagtcgttatggaaaaggttaactttctcaattttaaactca

SEQ ID NO: 22062 - DNA, 527 bp, Glycine max
gacctcattctgcttggattgggtccagacggccacattgcctctttgtttcctaaccactcagcactcaatgaaagggaagaatgggtaactttcattagcgacttcctcaaacccccacctgagagaatcacattcaccttgcctgtcatcaattctgcatccaatgttgcagtagttgtcacaggcgaaagcaaagcggaatccgtacacttggcaatagacgatgttggacctgatggccccttaataccagtgagaatggtccaaccagcgatggggaagttggtgtggtttttggataagctggctgcctcaaaacttgaagattccaatttgaacaagtaggacatgttgagtttgtatgtagtgttaggggatttcacaagtgttgatcatccttagaatcctgcctatttcttatgtcttggatagaaagcttggttttttttttttttttttttttttctttttccttttcttgctttctcctaagaggatgtttggagaaagtgtggtatagtttt

SEQ ID NO: 22063 - DNA, 759 bp, Glycine max
tttgaaatatcaaaattataatttaatattttattttaaatctcatatttatttcttatctgttgtactcttcatccaaagaaaccacaatgataagtgaaaaatagaaaaaccctaacaaataaagctagaccacaaacaaacaaaacggagataagaaaacagaatataagaaatgaaacaacatgtggaatgcccttgctaaatgtagacctcttttttggtccaccaacctctctaaattgtttttgtccaaaatctagagctttatgtaaccgttttcgatcatcgacttgaggctccattccatatacctacacttgtaggaccaataggcccatccaaaagttgcacgagaatacacatccaattgggcttgggcataccttttgaggtcttccttagacgcaccttttatgctccacgcaccagtccactcccctacaaaactcagagcatttgaggaagagacgccactaagatctgaggctcgttcatttcttatgtagtcaatattttgttgagcagtcatgttgttgaatttgctggaataaagattgtagtaatgcacatcaatgactactctgtcaaagcctttcacaaatgagagaagcactttagaatctgcatctaatgggtttgacatgatcacataagcacttgggttgtgcttcctcacggcatcataagcttccttgtaatacttcttaaggctctcaagattcacaccttgtggctcattcatcagctctattcctc

SEQ ID NO: 22064 - DNA, 569 bp, Glycine max
ttaatcagcagaaacgtgattttcttgtatataaaacgaacaaggggattgaaaatgcgaccagaccgatgtaggatttatgactacacgcacaagtgcaaactagtggtccttcatgcatggctttggtcatataagggaccgaggacaaactgcaagtagtccaaaacttcaaatggcaacatccattgcacttatcaacagaattgaatagttttatcatgaaccacggatcacaagaccagagctagaaagaatacccgctaatttttttatatgacaatcatttcaggaattgatatttgaattttcacaatacaatgtttcagacttgaccttttacagtataatctttggaccaatttcatttcctatataaattataaattatgacatacaagaaaaagtacaagatgatcacagtttcttattattcttttttttcccctatccaaatacataccacaaacagttttattaaaacttgaccacatggaactgtatataaaaaccttaaggggaaacaaaacccctttttttttaaaaaatggtttctttttttttttaag

SEQ ID NO: 22065 - DNA, 621 bp, Glycine max
aatgtttacaaatgatagaacctaatggttcttgtaagatgccatatatacattttaaataccacaacttgaacctaggaaatactacttaacacgagagcgtcctgtgaaaagctacataggtacaaagttttgttttgtttttttaactttcttattttttttgaagaattggcaaatcttaaatgcaagttgatgcctttgaagtcctctgattcatccctagcatgattacaattacggtcacgtcgtcatggtacttccttctccttccagctggaatattcatcaactcttccatgctcagacctgcatgagtgttacttagccaaccaataatcatgtaatataacaaataaacatttacattgatgcaaataaaattaaatttagcattagatcttgaaaatgaccggcagaatcagctgctctagctacaagctgttctatgagaaactttgctggatcaccaaaaggattgttcaagatataagactccacaagctttactgcctcatcattgctgaagaagtcaaataaaccatcactccctactataacaaattgatcggaatttgagattctatggacattcaatgatgggttagcggatatgtatgg

SEQ ID NO: 22066 - DNA, 462 bp, Glycine max
aacaaagcaagagcagacataattttacctttgatatgttccggcttttcattattttatgttcagaaaaaaatgtggtgcaaggctcgtatgtgtgtaaagtaaaaactcgtagtacaagttgaaatacattaggggagctacggcactcagtatattaactcacctattgggaacggcaaatgatcatccaccgggataagaaacagtgggctcttggtcaaaagccgaagaacaatatatatattagcacttaacatatatttctaaatacttgttagagtctccaccgaaggggaatcatcacttgctgtcatatccaatttgagagcctgccttgtgacgcggtttgtctgttttctcaatctaacattatcgatgaacaaatctgctatgatctttctcacttcatcatcacagattacaccatcttttatgtcattggtggttctatctacattg

SEQ ID NO: 22067 - DNA, 361 bp, Glycine max
ttttggatctgggacagggtttaatttttctattgaaaacaaattccaatgaacaatgagaaaatacaattagagcgactatattaacaaccagcctgtcacctagtttaatcccacaatataatttatgctatggaacaactgtttgcccaagcacaagactaacagggataacgcaattcacgcaactacgctggatagcattggctaaagtaacaactactatgaaataataaattagttggggaaaattaactatatacaaaaataacatctttgggtctattgaagtgtccctactgaattttggtaccaggctggaggccagcttgcactttgctttgaaagtgggcttctaacc

SEQ ID NO: 22068 - DNA, 664 bp, Glycine max
  unsure (1)..(664): unsure at all n locations
acgaggttttttttttttttttttttttttcaaaggcattttcattcattgtagaaaaccttgagatgtttataacaggcttaagaaagatgaaatagttcttacgaattgaaactagctaattttacagactttgttcatttaatcagggatcctcatcctcaccctctaaataaaacggctggatagccaaactatccaaaagacaaaatctgcgccaacaatattatccatccctgcttgtttgcatcactaaaaatatgtacagcagcatctcaagccaatcacatagaggatttgacgaattgaatgatgggcttgatctggttaagctctccacatagtttcatgcatttgcagattgtgttggtaacttggggtggttatgttcaccttcataggtgacaattagcatggtaggctcttccaagcacctctcaacatgcttccttgcaggacaccctctcatgctgctgcacttgtaatatcccctagggtgaggagagcccttgattgtcttctgtccatacttcctccaccgataatcatcangaggaatatctgctagtttgttgctgatagcaggcaccttaattgccctctacactctatgnttcctcttcttagagcaatgacatctagcactgcttccactattcaagct

SEQ ID NO: 22069 - DNA, 571 bp, Glycine max
  unsure (1)..(571): unsure at all n locations
gcgnacgtaagctcggaattcggctcgaggtcttctagggtaaccacggcgccactcgaacaagtgcggcaattcccaacgcttctcttctcagggggagttcgaatcctgtgagctttcaatatgacgtcgttcttgaagcctgagaatgctctgaaaagggcggaagaattaatcaatgttgggcagaagcaggatgctttgcagactcttcatgacctcatcacctcaaaacgatacagagcatggcagaagacacttgaaaggattatgttcaagtatgtggagctttgcgtcgacatgcgaaaaggccgttttgcaaaagatggtcttattcagtatagaattatatgtcaacaagtgaacgttagttcactggaggaggtcataaagcattttatgcagctttctaccgagaaagctgaacaagcccgtagccaggcgcaggcactagaagaagcccttgatgttgatgatttagatgccgataaaatgccagatgacctgatgttgagctatgtcagaggcgagaaatgaaaagacagatctgatcgggagactgtgaccccat

SEQ ID NO: 22070 - DNA, 545 bp, Glycine max
agaaagaaactttagagccagaagccgagaaatcacttggcattcactattcaccaagagaaactcacttgaaggagctacaaaatctcggaaattaaagctataattaccacaaaaatccaatacattgtttggctacatcagctaacataatactttatggggggagcagtaaaatccaataaaattgcagaattgacaatgtacagtttcctaagtatgtctctatagcaagtgggtaaaactcttcgcttttcaagatgttcgccatgtcactttgcttggtcatatcttcgaaggagtagaaatcaaaaaggaaaaagaaacaattggcaagactagtttttcatcttgcattagatcttttcggcttcagccatcttcaaggatgcgaatcccagtgtagggatattcctcatatccgccaaaacacacccaaaagggatcccacaaggtcttattcgcatgggtggaagaaaaaaattccacagaatgtacaattgctgaagctgtataaatgcagagtgaaagccaacagccaacac

SEQ ID NO: 22071 - DNA, 565 bp, Glycine max
  unsure (1)..(565): unsure at all n locations
gcgcncgttatgctaagaattccgctagagctcgagccgtgcgagccgagataacaagttacaattggttgcgtagtttgtggtttgaagtttgaagcttgaaccttgaacgaaccccaaaatcgatcgaggcagatcagaattgagggcttagaaatcaggattcagaatgggtcagactgaaagcgcagaagctgtgacggaaactcaaaccacaaccaacgacacttccaatcccatttccctggaatccgtcctcgcagaagctgcagaatatggaagccaacacactgagtctgtggaggaaatggctcagaaagcccttgaatgcccttgcattgctgacttgcgaaccggttcctgtggctctcagctctcggaggcattcctgtgtttcctcaagagtacctccgaagaaaagggctcggactgcgtacatccatttgttgctctgcagagctgcatcaaggctaatccagatgcattctctaaggacattctgggcggagccgaagatgaaagcaaggagttggagccagttcaagaatatacaatacttcctccc

SEQ ID NO: 22072 - DNA, 540 bp, Glycine max
attaggagctttgccacatttcgctttactttttgtaagtggactcctaccaatgaggcgagcacggggaaataggccacataataaaacggtatataggtaccatgccacatgatcacagtccctaactccctaccatagtagcacaacaatttaaaattttaaattgctgagtggtatagcatgcggtttcctttcaacccacaaagatagcttcttcgcccgtttgcttgctttacaatctttggtgatgatgcaactgttgtaaatctctcaatcccatagttacaagtctcaatttgttgtgatgaagcatgagtggcattgctggtgtgcttgtctagccacattataatgtctgcaaagactttttcgatgttctcatcagtctcccccgatgttaagccatgccacattccagggtacaattttatggtcttatctttgctactggctcgctcatataatgccctgcttacttctggatctgtcactgtatcagcttctccatgcaatacaaaaaaacgcagggtcacctgc

SEQ ID NO: 22073 - DNA, 323 bp, Glycine max
tattgaagagtaagagtgggtcgtgaatatatttttcatggagtacaagtgagagcgactacactttatcctatagtaatggagcaacagagtgggttaccacatgtgaggaatttggtcgcaagtgacaaccctgatatcatgataaattattgaggattttttaactctatatacaacaaaaaagaataacgatgaacgaattgcacaaagtaaaaagaatgaggggcgtctatgcggaaccgatacaacactcatcttccctccggggctgtgctatgaaaatgatttgtgtagggggaatgccaaaaccaaaatgatca

SEQ ID NO: 22074 - DNA, 906 bp, Glycine max
attacaagactcaaactagtcacaattgatggaaacaaacttgtgatgatgatatacatttgcacaaatatagtaacattcactaatacaattgatataggaaagcgccacactttgttacatatctcatatctgtcgaatatgggacaagggaaaggactttacaagttacaaccatgacaagcaaaattaaagaacaaactagaatggaaatgtagcaacaaataagcctcctataaagtccttctaaggcatatgactgcaatcttctacgtttaattattaggtttggtcctgctgttttgaatctggattaagtggacttcttcccagatgtgataatctcacttctcctgcctttggactgaggggacctcttgcaccagatcgtggactctgctcagttttgaactcacccacgcgagcactaaatgagaggcgtgggcttaaatggcttttaggatcagttcttggtgttggggtggagcttgtgatcttgggactgctagtgtgcctaaactcgccacggcttctagtaataacttcatctaggatttcaccttctccaacttgagaagcaccagctccaaactcggagtgtgttgcgaggttgaatggtagagctgtttgctcttcatatgctgctgcatccaagtcttgaaggtgtatccctttgaaaaacttggggagaaagtactgtctaaccggaactaagagcatgatcatcataggaaacatgaccccggcaataggaacccatgttagtccaaaacatataagaagataaatggtttggaaaatggtgaatgttgctattgtcttgaaaggaactgtttctacaaaagtagcatggtagtcctcaagcaccttgtatcttctgcttggtgcagtgaagagtaataggat

SEQ ID NO: 22075 - DNA, 780 bp, Glycine max
gtctgatatgtttgtggataattggggtgattttttagtattctggtgttttacttgtttggtttagttctgccccttgtttggggaccttcccttttttttattaattttttttagaggctaacatggaggaggttgagcaagctaatagagtagctgttgaaagctgtcatagggttctgagtttgttgtctcaaccaagggatcaggttcagcataggaatttaatggtggaaactggggaagctgtggtgaggttcaagaaagttgtttccttgcttcacagtggtatgggtcatgcaagagtgaggaaggttaaaaaccctcaaatccccttttcccaccaaagcatcttcttagacaaccccaattgcaaaaccatcaacaaccatcacttcaaaaatctgcagtttccccaaaccagcttccctgacaattcaattcaggaacttggttcaaccattaagaattcactctctcttggacaaccctctttggaattgagctccaatgggaaaagtcctcttcacctcacacagcaggcttcatcaaatcactatcacttctttcagcagcagcaacaacagcaacagcaaaggctgttgctgcagcagcagcagcaacaacaacaaatgaagcatcaagctgaaatgttgttccgaaggaacaatagtggcataaacctgaattttgacagcactagctgcacaccaacaatgtcatccactaagtcttttatttcttccttgagcatagatggcagtgtggctaacttggatg

SEQ ID NO: 22076 - DNA, 434 bp, Glycine max
tgacacatacaaccatttttttttcattgggcaaatctatggaagtcaatttcgggcaaagcttcctctccaattttttgttggaagctgcatcatactgtataatactgtaatagtaattacaataagagtcatgctacatagaaaaatagtagctgaattttgacagatttcggttaagttcgggcgtggaatgtagtagtgaattgtgaatatatccaaactctacatcatacctatacatgttactatggggcaataacatataatttttttgggagggaggtggggtgtaatgacaaaaatgtggctctaaagccaattggctattgtagagcacaatttttttattaactgaaacaggtgaatggagaaagcccccatcatttgctaattgaaatttttatacttgctgaagtcttccgaaatgttgg

SEQ ID NO: 22077 - DNA, 352 bp, Glycine max
atccaaattatctattattatttattacttattaccacacataaactaacattacaataaaatacaaaaaaaatgactgtccgaggcaaacttgcaaatctctctcttagacacaacttgcaaatttctctcttctctcacacgcacacaaacccacattctatcgtcaccttttttttaattttttacactttacattcatctcacacgagtgtcttgcaggtggaggtgagtgggtcccacatcgccggcagaaggaacttccggccgcgcatccccaccgcgttgtagctcacccccgtcgcgttctccgccagaacgtccccggcgtagcctggatacgcccccttcc

SEQ ID NO: 22078 - DNA, 881 bp, Glycine max
gtttagtatggatatagatgagattcttgaaagagcagagaaggttgaagagaaggaaactgacggggaacaaggaaatgagttattaggtgcttttaaggttgccaatttttgcaatgatgaagatgatggaagtttctggagccgttggataaagcctgatgctgtattccaagcagaggaagctcttgctcctcgatcggctagaaatattaaaagctatgcagaggttgatccatctgaaagaagtaataaaagaaaaaagaaggaacctgaaccacttgaccgagtttcgaaacgtcggaaagcagagtattccgctcctgcagtaccaatgattgagggagcatctgtccaagtgagaaattggtcatatgggaatttatctaaaagagacgcacttcgtttttctcgttcagttatgaaatatggcaatgagagccatgttgacttaattgttgccgacgttggtggtgctgttggggctgctccacctggagtacagattgaacttttcaatgctcttattgatggctgtacagaagcagtagaacttggaaatcttgatgcaaaggggcctttgctggatttttttggtgtaccagtgaaggcaaatgatctacttacccgtgtccaacaacttcaacttttggcaaagcgcattggtcgatatgaagatcctattgcacaatttcgtgtgctgtcatatctcaaaccatcaaactggtccaaaggttgtggatggaatcaaattgatgatgctagattacttcttggaatacattaccatgggtttggtaattgggaaaagattagattggatgaaagacttggccttatgaaaaaaattgctcctgtagaacttcaacaccatgaaactt

SEQ ID NO: 22079 - DNA, 719 bp, Glycine max
acgaataaaaaaatctatttaatgttttttttttcatttgaaattttgacatatctttctgaagagattttctagaagaatgttacaaaccattcaaaagtaggtcaaaaaaatgcgtgtagagtgtaatacatgttacaagagtgtgattaaaagacatgtaaaaatatgattagcagttgatatctttctatgaggccggtagtattaaaaatcacaaggtggaatcaaactgcacagcagcattgggcaaccactcagggccttggataaaggactgcacagtgaacttccctgcctccccgtccgtgagagtgggcttatacccagcccatttgaccctctgtgacacgtcagctccaggcccagtattctggtattcagcatagaagatggtacttacaggttccacattggggacccaactcatccaccccacaggcttcaagaatgacccaatatcagattgcatgatcacagtggtggagaaatctttccatggcctaccaaggtatgtgggagctgtgagattgtttcccaggggagtgaattttgatttctggattatgattccggtgttctggttgcggtccttcttgccctgagctgtgatggtgttgaactggtttggtagaggctgtctaggcattattttgcagttttggaacacagcagctgcattgccgaatatgaagtctatggtgcctgtaatgtcacag

SEQ ID NO: 22080 - DNA, 373 bp, Glycine max
gaactggggtaaaataattttttccatgaattctaaaagttggtagggacccatagcaattcttgtacgtgaaacctcgattccgttgccgcttgactgcatagacaaagagccaatttttataagcagcaactgaattcagcatggcttaaatgacgaattctttaaatgcatttgcatttaatttacaatacattcatcagcaatcacaaacaactatctaattggcatatatacattagatgcttgggaaacctatactactcataaactcaacaattgtaatgccaaatcaattgagaaagagaactatcaagccagaaccatcacaatattgcaggagaaaaaaacaatgttcgtgaaggtcattttt

SEQ ID NO: 22081 - DNA, 469 bp, Glycine max
aaacatgagttagaacttgagaggaaaaatatatatatgtatcccaaaaaaaaaaaaaatagagcagaattacaccacggccgtcactaagctatggacacaacacagttacacagcttcattaaatttaaagaaacacataacagaacaactttcaagtccacttatgaaacaaacatcctaatggtagatgaatcgacagccgctcataatatacctaatggaataacatctgaagcaatatacctgaaattcacagcgagactaataaacttgacctactaaacaaattagttgtcataaaattgccaagattatagtcaccaaccattctagccatgatgttgtcaaggtccagcttttttgttgctgcaagaaggacatttgtactgcttgatatgctcggcccttgcaggggtaattttcacgcactttccatggaaccatttctcacagatgtcacaataaa

SEQ ID NO: 22082 - DNA, 449 bp, Glycine max
atcggaaaacttctgaaactattactattatttaatacattaattaatgagtacaaatacaatcactctgtcttctttcttattgttcaactttgaaggagacgaacccttgagcttctttctcactctccacaacaacgacattatctgacacattggtcacagaaagtgctacaaatttagcctcatcttgagcataaaatgaatattgaaaatggctaatcctattaggaaacaccaaaactgatgaaaaatcagccacccacttcgtgccatttccgctcgcagttaacttcccaaccgttgatctcaagctcatgccattcacattgttgcgatcaatcaccacttgttcaatgctactaaatgccccatctagttttacaataggaaccttcttattggggtcaccattaaacatattatcaactatattcaagcctaaaatt

SEQ ID NO: 22083 - DNA, 631 bp, Glycine max
gcatcgcacgcgtacgtaagctcggaattcggctcgagagaaaacaaagcaaatgtggtctgaaatgctcaaatggaggaaggaatttggtgctgacaccatcacggaggacttcgaattcaaagaacttgatgaagtcttgcaatattatccccaaggccatcatggagtggacaaagatggaagacctgtgtacatagagagattaggccaagtcgatgccacgaagatgatgcaagtcacaaccatggatcgctacatcaaataccacgtaaaggagtttgagaggacatttgatgttaagtttgcagcttgttcaattgctgcaaagaagcacatagatcaaagttcaactatcctggacgtgcagggagtggggcttaaaagcttcagcaaacatgctagggaacttgttactcgccttcagaagattgacggtgacaactatccagagaccttgaatcgcatgttcatcatcaatgcaggttctggatttaggatactgtggaacaccgtaaaatcattccttgatcctaagaccacggcaaaaatcaatgttcttggcaacaagtatgacaccaaattgctagaaataattgatgcaagtgagttgcctgaatttttaggaggc

SEQ ID NO: 22084 - DNA, 647 bp, Glycine max
gaggatgaagatgagattattgatgataaaagaaggagatgaagatgcacaaaacaagaaagaggactcgtaagggtgcgtagatcgcattcaaatccttaaaacaaaaactaaccggatgacaaacgaataacaaacgaagaacaatgtagaagtcgattaggatcgcaattcggtagcacctcggcctcgtttttctcttctttcttcttcttctctctgatttctctcaatgttggaccttggaaccctttactcagcctccctcacacctatttatagcaaaagatggcattaggagtcatggcagctcacccaggcgagttatagcttcaacctgaagtaactttgcttgcccaggcgagctagttatttcacccctaagctattttggggcctaagcgagccaggggctagcctgggttcagaaaaaggcttaaaatgaccctgttgccctctttttttgggtattttctggattccttatggaaacatcaaatgatctttcatcttgcacggtaactggtgtcatacagcttaattcggctagcgaggatcaaaagatcaacaaatgatagtcttagaacgaaattagggtatgacacaaagttattaaactaacactcgtagtctttattgtctaacct

SEQ ID NO: 22085 - DNA, 418 bp, Glycine max
ttcatgacttggacagttttgcacaaagcagcagactcaacaaacatatagttcaacttaattacacaatctcactcgttttctttcataataatgctctccggcacaggcaagttggtcgatttagcctctgaaactgttgaatctgtaaagacaacaccatccatgttacaaagggaatctttgaccgcaaagggtctccttgttgaagctaccacatcaaagctggttggggagacataaaggtatgtagtagataaaccattaaataattcgtctttcttaggacaatcaataagctctttgtgactagagaaatccagaccattggatttatcttggaagctgatatcattctgcaataaataaagggaatcactattaaacgattcccctatctcaaaatttatgtccatat

SEQ ID NO: 22086 - DNA, 693 bp, Glycine max
gtcactaataacttttacattataatataattatatttatatttatttatataaaatgaaatacaagtgcaacagcctcatataagagtctcccatatgagttggcagtagaaacgaaaaaaacatctgcataatcacacaaattaagtgaagctacacaataagttcattgcttcactctcacatcataacccccaaatttatttattaggtaataacacactcaacagtaaagataaataacagaacataaaaaccagaagtacttatatctccctcacttcatcttcgttctcatcctcactccagcagcatttcagaatagacctgggagatgtactgccatcacagccttgaacaaatgattggtacacaactgcaccacctactccaagctcttcatagctcctctcaccacagtagtatcctttgatgtctaagggaaatttattaagtttctcaccatgcatgtcaatgtgcaaagcaacagaaaactctgctggacaaaagcaagctaaaatcctttccacaagttcacctagagccatgtcattaaagtcataaccaacagcttcaaaacttgcgtaactgaaaccatcttcaggagtgacatggatggtggatatagcactcccttctattccattcattgaatatccgcaagggtcaaattcaaaatcagatatatcagac

SEQ ID NO: 22087 - DNA, 1032 bp, Glycine max
ttttgtttaaacatttacaggaaaaacttcttctcactgagtcaaagctaaaggagtcacaatatcaattgacaccttggcgttcagatatgaaccatgctaatgttgccacacaatcacaacctcactcgattggtgcacctttgacaacttcaaataaaaatggccttgaactggtacctcagcatatgtactctcaagtaaagcctcaggtctctgttgatgctcaggcaggcactgaaccggatctattgggtcgccaccagaatggcttgagtggtggtgtggcaacaagtgttgatgctgatgatttggggagattttcacctcttgcaagcaggtgagcctggtcaaatggagactgctactgtgaactgaatgtattggtattcatcagcccctgatgcatccacccacctggtagttactcaaggtgataaccatcctgctcattatggagatgaaatgaccaacaaacaggtcacatttcgtgtccccgtgagcaacaatgaagttgatgatcctgatggagatggaacacatagtatgagagaaacatctgctaactggagttctggcaaccctccttatacaaccactgttgatgatcccagttcttcatattctccttatttaccagcagttcttgaagaaccttcttcttcattttctgaggctgcagatgaagatccattgccggctatagagggtctccaaatttcaggagaagcctttcctggaagggaacttaaggcaggcggatactccatcaatggcactactagttgtaattttgaggggcaaagcaaccaatctatcttgtcaatgctgatgatgttggtacattacttgccattgaagtccaacctctggataacaggaagcgcaagggagaacctgtgaaggtttttgccaatgataataaaaagattgcttgtgatcccgaaatgcagaaccacatagagaaggcttttaatagtggacatgcttcatatagagtttctctttcgactggatatcttgatatatggg

SEQ ID NO: 22088 - DNA, 439 bp, Glycine max
gttgaattgactaacaaacaggtcacatttcgtgtccccgtgagcaacaatgaagttgatgaccctgatggagatggagcccatagtacgagagaaacatctgctaactggagttctggcaaccctccttatacaaccactgttgatgatcccagttcttcatattctccttatttaccaccagttcttgaagaaccttcttcttcattttctgaggctgcagatgaagatccattgccggctatagagggtctccaaatttcaggagaagcctttcctggaagggaacttcaggcaggcggatactccatcaatggcactactagttgtaattttgagtggattcggcatttggaagacggttcctttaattatattgatggggcaaagcaaccaacctaccttgtcaacgccgatgatgttggtacattacttgcca

SEQ ID NO: 22089 - DNA, 381 bp, Glycine max
aaaaataataagaaagttgttttagtgatctatgtcgccatagctaaagggatcatagtgacaactgtgggtgagacgaaggtatgggagacgtattctacggcaacgatgaccaccgagaaatgaacgatgattgtatgtataaggaggatgtagtgatggagagcatcagaagccaacgggaaatcaaagacctcaagcgcagacaaaacaacaacaactgctgctacttctacttccttcgatgctttcactttctcacgcttctccctgctttcgtcaacttctgatgtaacctactatttgtgttatgttatcaattaactcttgaaagtttttattcccaatctagatcaaatactgtgttgcagtattcatttt

SEQ ID NO: 22090 - DNA, 498 bp, Glycine max
cccagggaaaagctttggccctggtttccccaaagtcttaaacggcccccctttggggaaagggggaccccctcaagtgcccggccgggaataattccccgggcgggggggtcactagttggggggcccccctttttttttttttttttttttttttttggataactctgatttattttcttttacttgctaaatttaagccccagttgaaccaaaccaggcagtttttcaatccccggggtagttgtggtgcaactgcaacggcaagcttacattatacaaagcaaaagttttcgcccataatctcattttatttgacttcaaaactcaagctatacataactgtaaaacatgcatgttttacatacagcattttttttttactaattcagaacagacattcagtaaacagaaaccgaataagcaaaaggcctccaaataaaattttaattttttttttcaaaaaaattaattaaaccccccggttccccaaggttt

SEQ ID NO: 22091 - DNA, 611 bp, Glycine max
  unsure (1)..(611): unsure at all n locations
gtagatgccatggtaaagatgagattctttgattacaatacacggagctggtggaccccagtgggtggaggtgctaatgttcctgcacttaatgatcttttggccccatttgggattgcttttggagataagattctgaatggtgatttttcacttttgggtgagcagaatcgttatgcttctggaacagatatagtgaggtttccaaggggtggctatgtacatagctttcctttcttagatagttcagaaagtggagccacacagaatgtgctgcaagcttctggctcaaccaaggcagattctccaattcttggtctcacagtgatgggtgaaggtcgcatagctgtgtatggggactccaattgtttggacagcagtcatatggttacgaattgttttgcccttctgaggaaattgctagattttactaatgaagacgttagagatccagaacttttctctgactcaaataaacaagattctcctttgtatgaacctgacaatcagttgccatcccgcagaactgatgtaaatttctctgcattttcagctattgtggggaaggaattgatctgcaggactgacancaggtttgaaatctggggaac

SEQ ID NO: 22092 - DNA, 433 bp, Glycine max
gtactagatattgatttattctgtacggacataataataggacaggctttgcataatgtgcagagcgccatagccctatatatactatacatagagagtaagtcctatcctaatagagaccaaaattctgatcagcataatttatatattttgagcagtatgcttctcttctggtcgttttgaatatttactagttcgcatgttgaacattgttgtaaggggggcatttgggaagtctcctgaaaggcagaaactaaaagctaattccccgttaatgtctggacctcttgtttgggcatccacggatttgctctttaaaagaagaaaaatctcttcttcttcttcgtcttctttttgtcaagataagccgaaagctcttcttgcttaacaagtgaatcctccagagccttcttggtagccaaaagttgtttct

SEQ ID NO: 22093 - DNA, 419 bp, Glycine max
aatcgaaggtataccaaaaatttcaaaacacgctgcaattctagtaaaaagacagctatcatgataaacaaaataatatctatatatttcagtacaagtattaaactaatttgatccttcaaataaaaattatattcctaggaaatatcaccattaatgtcaattcaaacttttacatgcctttgactaatgaggtctggagcaaacacctaggatcaagaatcctaaaatctgcttctacttttcactgtcctcaatgtactgttctgaactgacaaatgatatccaattttaagaggatttatttaaagatcattttaaaagagcagcatagtttttcaaaccaccaaagttgcagataacaaaaattgacctgacaaagactggctaatattctcttttcaatataggaggccatt

SEQ ID NO: 22094 - DNA, 362 bp, Glycine max
tttgatttctgtgctacattacaagcaaaattattgagattgcacagacaaaccttgctcaaaatgctcaagccattcaaagggatcatcacctcccacacaaaacctgggatctaccctcgctcatgcaatatcatcaaacaaaaggagcctgttacatccgacgagaacgggctacctactacagaatgcggcctactgcccaaactagccccaaacctaatgtgcagtagagtgactttcagaccccaccctgtccgtgctgagaaacacagactcccggaaccagccgtgaactctggaccagtaccggcccgcgtaccatcaatccatggagggagacatatacgggcttgacatac

SEQ ID NO: 22095 - DNA, 523 bp, Glycine max
tttttcaagtcgaaatattaaatatttattcgcactataagagatcccgaatacacaatctcgatcggttcattgcattttataaagttacacaaccacaatttgagtgtcacctagaaggaggccaacataaatcataactcaaaatagctagaaacaaaaaattatgtttaagttacaagtcgacgaatccatttaccttaacatatcaaaatcaaacaaaaaaatgatccctttgagagtgttcagtgctcactcggctgcagcttttgcagtccgaaaccctttcttcaattcggcgaatcttttcatgcaagcagccttggatctcccgggaaccgcagcagcaaccttttcccacctcatggaaacttccttaggaaacgctttcaaagcattcagcaacgcgatatcctcagcagaactccaaccattatcaacaactttctcaccctcatccgcattctcctccacaaccctgttatccaacgctttcctcttcttcaaaaacaacgcatacgac

SEQ ID NO: 22096 - DNA, 530 bp, Glycine max
tgcccacgcgtccggttcgcgtttccgtttcaagtgtttgcgagagaatggagttcctggacgaggacgcaaggccaaggttcgtgttccagtccggtgcagctgcgaggagcagcgagccaccgcacccgatccacaaacctaccaagccattcctcttcgccaccgtttccctctcctcactcttcctcactctctccctcttcttcctcgaagcggagcccttcaaatcgctcctcttctggctcgcactctctctcctcgttggccccttcgcccctccctccatcactggcggcgacgtccgcgtcggccgcggcgaggtcgtcaacttccccgatccggagcccgagcccgacgaggacgccagtaggaagtcctcacaacggcgatccagtcagcggagggccgaggaagcctccgccgccgtaggccggtggtttccgtcagcgcggcggcgaagagaaaagaatcttctggaatcgagaagcgtgcgacggtggtggaggaggagaaggggtggagcgagg

SEQ ID NO: 22097 - DNA, 381 bp, Glycine max
  unsure (1)..(381): unsure at all n locations
gctactgtcggggcgcctttttttttttttatcctanaagaaaagttatgaatctgttcaccgagtgtcacattatgtcctgataacaacaaataaattatttccacatcctcattgcacaattgaatggggaaacttgtgagaaaaacaagaatacggagtgctcagcaatgagcaaataaaaatagagaacgaaaacctattgagatagtcctacaaccaaacctctgcagaaaataaatagcttttgtaaagatctactaaaacaaatgaacatgttgagaaaaatgttgtcaatagagaaagatcagagtcatgtagtaatcttggtcttgggcctattgaacccctacaaaacgagcataatccacccacaataat

SEQ ID NO: 22098 - DNA, 326 bp, Glycine max
cattcaatgaaagggttgatgctccaccatatgagcttgatccagctggctcaactgttccacaagcagactacatttggaggataattgtgatggttggagcactcccagctgcattgacttactactggaggatgaagatgcccgaaactgctcgttataccgctctagtcgccaagaacacgaagcatgcagcagcagacatgtctaaggttctgcaggttgagattcaagctgaaccacagaaagaggagcagaaggcttactcatatggcttgttttcaaaggacttcctccgtcgtcatggactgcatctattggtacag

SEQ ID NO: 22099 - DNA, 280 bp, Glycine max
ctaatttccatcctttcgatcttcccttcttctccttctccttcatcttttttggtcgatgctccatctcaaccacaccgcacagagagtatatatttatgtgtgtgtgtgtgcattgaaactctgatcttcgaccccacccaattttactgccccaaattcagtctcataaatccccaaattaaggaggaaaaagaaagcacgaaaagctctcgctcacccccagacagacgcaaagtgaccgaaaagttatgtaaaagactcggcaattcattggggc

SEQ ID NO: 22100 - DNA, 457 bp, Glycine max
atggcaaactaacaagggggtatatttttatttgcaactatatacaattatgggcaggcaattgttctatatgttcatgaaaataagagagcagatatcaagagtcaactattgaaaaacaaaacataaatatggcagtaagaaaaacataaatgtgtcatttggtgtatcaagcctcaaaatttggtttatccaaaagaaatgttaggttcgggtttgtagcctcaggcaatacttacacctgatggtttgatcgctactggagttgttgctggaggcagcaatttatcaatgtcctttgctccaactttagcaaattctttgacaagcatgttcatatatccggataaagaatccttgaactgctgtgagcagcttctgtctccctcatcaacgtcctgaacccctcctttgaccaaacacccaacttgagcacctttcatgtatgccttacatg

SEQ ID NO: 22101 - DNA, 322 bp, Glycine max
ctcgagccgattaagtactacatattagctttccctgaattcaaatcttcttctcatctcacaccccactgtcacctgtattcacaaagctcaacaaaaattataacaatacacaaagaagggaaaagacgaatcagaagacagagatatctatcaggactgaaaaagcaatttagaaagagaaatccgaagatggaagacttagaagcaaagatatcagattcaaaaccagatgactcaagtcctctaaaactctacttgctcccttttcttgctccgggacacatgatcccacaaattaaccttgctcaagtttttgcct

SEQ ID NO: 22102 - DNA, 526 bp, Glycine max
gtaagctcggaattcggctcgggggctcgtactttgctacacgccaaggaaaataacaaacatggtgttattgtgaacacatttccagagctcgaagatgggtacactcagtactacgagaaactcacccgtgttaaagtctggcaccttggcatgctctcacttatggtggattatttcgacaaaagaggcaagccacaagaggatcaggtcgacgacgagtgcctcaaatggcttaacaccaaggagtccaactcagtggtgtacatatgctttgggagcttggcccgtctcaacaaggagcaaaattttgagatagcacgtggaatcgaggcctctgggcacaaattcctttgggtgttgcccaagaacacgaaagatgacgacgtgaaagaagaagaattgttgctgccacatggttttgaagaaaggatgagggaaaagaagagaggaatggtagtgagagggtgggtcccgcaaggtctaatattgaagcatgatgccattggagggttcttaacgcatt

SEQ ID NO: 22103 - DNA, 527 bp, Glycine max
gtccaataacaaaatctattaaattaaaccatgaaaatcttgaagctagtttgtttataaaccgaataaacttatagaaaggtagggaaagaaaaaactgaaagttgtaacggagttgaagaaccctaattttgaagcctaatttgcttgcgctattagtaaactgcagaaacttcacatatgcttccctaatgctgcacttaaaaatgccttaattagatgagctggacagtcaagtttcaatggaacaagttgaaatccctttgtaccttgttggcatgatggaggatatgaattttctcatcactgaaaattccctccaccacctccaaaagcttgccctgatgacggcgcagcattattgctattattattattattatttctttcagcttccaaagaactcaagttgaagccatgttgctgttgttgttctctctgtgcaacccctccactcccactcattcccctcactatctgaccaacacccagaaaatcgcgggtgagtctatcagaccctccaacgg

SEQ ID NO: 22104 - DNA, 671 bp, Glycine max
aaaataaattaatgttacataaaagaataaaatgtaaatgaataatcactggtggttacaagtaaaattcttggaatccttgcacctttcgttctaggtgcctggtagaaaactcaatcaggtgttagtagagaactcaaactgttaaaaagcatatagtataatccgcttattgattcttttctaggtgacctgtgtgataatgtaatgtacaagttttcggcaaaatttaacttttttaccttgcagctttttgtgaaactgtaatctatacacaaagcaatgggtggtagctgttggcagaggttcatatggggttatgccactcccctttcaattcagagatgtacaagggcaatgccatgctgataactgaaaccacacttttacaagaaagcaagaatgccaacagcttttacaagggtaattggggattgtgagcacataaaaatggtccaggagaaaggttgtgcagtgtaacttatctaggctcaatctgactttcacttatggtgttccctgaagactgagtgttggatccaggctgaaaattatatccaggtaaaccagatttgctgaattctgaactactggaattgatgaaaggcggttgtgctggctgaagaatttcgtgattggtattaaccattttaactactactgacattgat

SEQ ID NO: 22105 - DNA, 544 bp, Glycine max
  unsure (1)..(544): unsure at all n locations
ggagtcccgaggtgggtgtctctagaacagtgagaaattgacagtaatggtggacagagaaatacagatactactattcttattctactactagtctccaaggaaaggagatcactatccaaaccattctcactttctcccttcaatgccactcttcttcctttctctttgagagactgcacacaaatttctactgtttccagagcgacaatggatccggcggccatgatgaacgccgccgccaacacggcgtcatatcacctgtcagagatctggcacttcccgcctcccaacgcgccagacgcgctgggcctcaggagggcccacttcgccccgggtccgacccgacatgccgtcccgggtcgcgacctggctagcatcgcccccaagaagcgccgccaagccgaggaggaggaggtggaatccactaggggcgcttccaccaccaatgccgtggatgagggttgtggtgatggaaaacgggttaagacgagtgagagtgggaaaggtgaaggagaaagctgttcangaaagcctgcgaagc

SEQ ID NO: 22106 - DNA, 943 bp, Glycine max
aaccaaaaataaatatttaactcaattatcaaagacccctcgaatgcacgactttaggggtaataacacaagctgacatataacaacgaatacaaccaaatggtaaaggagctctgagggaaaaaaaactggtatacttgttccatctattggtttcatacattttcttgcacatccctattgtaaattaacccggtaaataatttttttttattaattccctatttattataaatgaaaaggataggggaaaaaatgagttagcttacaactgaacatccaaaattacagaatgccacatcatgctgtaaatatttccttccagatctgaagcattatcacgcaaatttttagctgagactcaaatagtacaccattggcatgctgaattcagacaagcctatagtaatgtatattcaagcattgtattcgctgacacgcatccatttggtacttgaccatttattacccttgatcactggacaaccaccatgtaagcttgatggatctaaacttgcatctggcttcatactccaaaaaagtagagcatcacccctctttggtttaatcgaaagtcctttttttccacactcagaagctcattccaccatggcacagaactaaaattccctttggcagctggaaacactgtctcacccccttcttcaacatcagtaaggtacatcagcactgttgctatacgctgacccccattcttagtgttaaaatcatcaagaaagtagtcatagtgaggctcatacttttgtccaacttcatagtgcagaacttgaagtccttcaccatgctcaacaggaatgaaagtaaagtcagaaatttttttctcaatattcctgacaatcttatcacgacctctggccagaaaagttccagagcttgtacgcactctgctgtctttactctttcaagtttcactatcgacaac

SEQ ID NO: 22107 - DNA, 545 bp, Glycine max
aaatcatccttcactcttttaatcaacgttgcagagacattctttgtcttttacactaaaaccaaaactacggaggatggacactatacagacacatctcgccttcggattttaagtgtcgtgtcttatgcatgagcatgactattcaatacttgtctgacaaagatagttcaaaaaatataaacccttttttttttaagtgttagtgatttcatcctagattaaacattgacctttagccatgaaattatttacatcccacttctatttcttatttcagtggaggatatatccatgcggaactgttcagctggaatggagacgaacatgtcttttagttcttttggaacatcaatatcgtcaagaacctgccatcgaaccacaaaatggcctcactaacactgaacttggaaacgaatatcacaattagaaacgctctttgcttatgcagtaataccttgaaagcaccatcaacattccgaccacccacaaggaaagtgcatcctgtttctttacaaccaacaagtatcttcagcatcttgttg

SEQ ID NO: 22108 - DNA, 338 bp, Glycine max
cggaaaaactttgttgccaatctatagttctgttttgcactgcctgctctggtatatgtcacataggggaaaataatagaaactctttacattgctcagttccctccaaatttgaaaaaggccaatgtatcagaagacaatgaattggaagggaaatcctgcttacctatctatcatctctttcaaaatggggaaccatcagagtcccaagaggcattagcacttaaattaaacataactcccagtaccatgtggggaaacaatctaactaaaaatataatgacttaagatcatgatgcagaatctactacattgtgattcatatcatgacttaagat

SEQ ID NO: 22109 - DNA, 420 bp, Glycine max
gatcctatgtgagtgattatagtattattattgctgtagattactttatataaacaataaacaaaagataatttgtaagctcaagtcatacactggtatcattacaaaactgtggccagcccagcggcaatcccctaatttcatcatttcaataaaatcacctacagtatctctgccctttcaattcctctctatctttctacactgctacctcagagagggttgtgataagcagaaatagaaaaaccaggtggtacagtgatccagaatttccaaggactatttttgtgtcctagaaaaataaaaatgaaggtggtgttattagaaattctaagccctttgaagtttgaatcaagatcgaatggctttgggtggtgtggggattaaaggaatggaactaaggcccataaatatcactgg

SEQ ID NO: 22110 - DNA, 479 bp, Glycine max
tttttaaagaaaatgtagagataatttattcaccctgaatatggcaaaataaaataaaaccagcaacagctcctcaaggatcataatttaaaatccaaccaaggaatacaagcactgatccattcaccataattcgtgttagactgtacaattcaacataaaatgtaaaaagtgaggtagagacaaaaaatctattattcatcatcttcctcatcttcaccatcttcagcagccccagcatcatcaccaatgccttcaagcagtatgtcaacatcctctcccaactccaacaatctagcactaagtctttctaccttgctttgttcttgcccaaggcaaacaagcagatcattcagctcaccctcactctccttctgtgcttcttcccttgcttcagcttttattgcatccacatctgggaatgttgagtgcccttctctcttcagtgctttcaccttattctccagtagcaagttaga

SEQ ID NO: 22111 - DNA, 896 bp, Glycine max
caggaaaaatacagaagtttgaataaacaaattttgagtctacatttccaatttttgcatcaacaccttgaccttgtctacataataatccataataaattaattttagcttcccatatctatccactccatacaaatgcaaccacgttcatggagttggtcagttgggtagggagagaaccataagagacgtgagattgaatcatgtttaacttgggtgtataggctgtcctttatctaactcagcccattactaaagcttggtacagcaattcaaaatttatatcacccttgttaaacaagattaatttatttcgattatgggaagctagaagagaatattctatgaaaagacacatcacaaacaagggaggcctcagggggaaccaatcccctttttaatgagcatatcatacaccctgtcaattttcatggcatccatcttgaacaattgatgagcatcagattttgcagtgacagtgccggcaagtatttgcagagacagttgttcttgcatctttagatacatggctggaggcaaccttactcacagcataaacgtttctccggttcagaaagtaaatctgccccatagtatcccgtcacatccatttcattgacagaactagaagtagcaggccctgcaggtcttccactcaaatccttgccagcagagtctggagacatcaatgcattaggaaccccttgattgcttgggccgccctgagcactttcttttgtcctacaaccactttcttcagctttcccttcttctcttttgcgccagatatctatcagcttcagctgaattgcggcaaccagcagcccgggcttccttaagctcttgaagtcttttacgggttctatgttcagagataacggttctaagcaactcc

SEQ ID NO: 22112 - DNA, 626 bp, Glycine max
  unsure (1)..(626): unsure at all n locations
cccttaaaacttagccagtaataattagaaggtaaaattacatgatgcagggcacataaactcattcaaactaaggaaataatttaacacactcaaacataacggatattattagaactccaaagccaaagacctcacattaagcttagaccaacagttcataaagctcaagacttcacatcacagtaatagtctaaacacactggaaggaaggtataatacgtcaacccgttatttagtaggtaattatgggatgactttgattcacacagcacgcactggcattttgattactcatcatcataactcttgtattggtgatgcttgtggtgatgcttctttctcccatcatcatcatctgagtcatctccatatttcttacgaccatagccctcatcatcatcatcatcagccttcctctcataggagggcttgcggtacccctcctcctcctcctcctcctgccgaggtggacgcccctcataaccatactcaacccctcctcctcctccctggctttcatagttgctcctcccatagctcggtttctcctcatactcactcctccctccatacccggatccatattcagattcttgcttncttccaccatacccggatccata

SEQ ID NO: 22113 - DNA, 728 bp, Glycine max
aaaccctgttttatttataatttgtccctataaacatttgacaaagaccgatgccactgcaacccttgactactttggaaaatagactagtgaattttgtcacattatcaaattagaggacagatggaatactcctataatatgtacaacgataattttatgtgcagtcaaaaccacttctattcagattgcaggtgtgttcattcaccaagtaccaaaactgcagccaatgtgttcttgagtgatgacttcaagacgatctttcatgacagccatagatgaataagctgggaaacacagccggaaaaagcatgtgtgagatgaaggcaggcgatcaccaggttcaagggatctgtatatgtagagtcgggaagccaaaccacggaaaccttcaactggtaaatattttacagatgtccaaaagaataaaagaaccttcctttgatctgctgtcattcttccaacaatctcccaaaaccaagatatctgaatatctgtctctttatagccattatactcagtgtgcgctttccaatcttcaacagaaacggtatcttcactcccatgcagcatccaatccagatcttcgaggtctaaactttggaagaagtactgctggagctttgagtttgaaagaacatctgcaaaacctttgcgcaaaatgtgatacctgctcagatatggatgttacgaagcgatcctgtataagaagatcaacatacttgtcc

SEQ ID NO: 22114 - DNA, 509 bp, Glycine max
  unsure (1)..(509): unsure at all n locations
tgaagctatttttttgaaccatgtaaattaaaaaaataggggggttgttcaggattctagtaatcaccaacttcttacgcgactaattgtctcacaggacacttttatcttttctgagttacaaaataaagatccctctgaattccagacagaaatttcaggaagcttcccctgacttatcatgtcctccaaccacataactgcttcatattgcctacctatggagcaaagacccctaatgactgaattgtaactgctggtacaaggccagtttgatttaattgacattttctccagaagttggcttgcctcaagataccttctctcaccacaaagcatttccagcaaaacgctgtgaagtatctctgtcgcctgtgcaaccgaccttgctagacatcttggtcaagctctcgagtatggctgtggaattcccaacattgcctaggtttttcaagacaatattgtacactttagcagtttgtagacagttgactttnaccatgtcctcc

SEQ ID NO: 22115 - DNA, 365 bp, Glycine max
aattctaagcaaatctgtttagataaaattacgagccgaagttgcaaacattcccatcaatggtggccactgactaatatttcacttgccttctattttatttttttaaaatctaaattatgtccccacaaagaacgatgcatatccataatcttcgatcggatatcggatctagaagtaacagaaaaagctaatccgttcaaaatctcaaaccgtttttaccgaatcgccgccgtctactggggtttcttctcggcgcgattaagcttccggtgattcacaaaattattcacaagttttcttaatcttttgctgcgaacatgataaaaagtttgctcggccgcggacaaaaatcggcgcggcgg

SEQ ID NO: 22116 - DNA, 497 bp, Glycine max
agcatcacaaataacaaacgtattcacacgtcccacaactttgttttcgacgaatacacacatcaactaattagaatattataaccgtaagatattatttgcagaagcctattgtctagttacaacaacctttttacacttcaatcatttgaaactgctgtaagagatacttccccttttgctccttcttccaccttattccactgcttgtcaacatccacagaacttttcttgctctcgaacacttttgccgtgtcataagaagcatgtaaccccaatagcacatagtataccaagagaaaccctgtccagaccccaaacctgataaatgaatctttatcaatagagccaagaaggaatatgttaatagcaatagataaagaaggtagccatggaaccaaaggcaccccccaaagtttcggttgctttgcctgtggaacaaaaagccaaagacccccagtccctaaaatccacaacggcacagaaacttgataccc

SEQ ID NO: 22117 - DNA, 391 bp, Glycine max
cccacgcgtccgcccacgcgtccgcccaattacaatctgagaggttttattatgacttatgctcttctggatctgcagataatacagccaattcagttaatactaaaaagtaccacagtttgccagacatttcaggatactccatcccccacagggctggttatgtgtctgataaaaatgctccaagggatggttctgttggatatggatcttttgctagtaggacgtgctatgaccaatcattatatttaaattctggatcaagaacaggaggtcatttggccttcaatgaacttcctttgtctgaagtttacaacaaggcactctcttcacagttgagttctggttttgatactggatccctccggtctagattgccttatgagcagtt

SEQ ID NO: 22118 - DNA, 475 bp, Glycine max
ggggagaatgccgcacaacatcttcggcagaggcgacggcgactgcttcggcggtgtctgtgtctttcaaacgacgcgacggttcgctgatgcagccacaggatgggattcaaggcggccattttacactgcaggagatccttcaatccatccagacctgagtgggagtcttctcagctgccgcgttctgtgagccatccatgggacgagataggcatcaatgaagccaaagacaagcgcctttcagcatagaaagcttccttccggcggtgtcagtgtgtaaaaaggaaaatgtatgttattactattagactatattttacactccaatgaagtgaaaaagaagatgataaaaatagtaaaaagtagagtcgtgggccagcatgatttgttcagttcagatgagtgaatgaagctcgtcatccattcagcttagtgactcttttttttcttccttggtagtgtaaactgtaat

SEQ ID NO: 22119 - DNA, 465 bp, Glycine max
ggaatcacaacatgacatagttgcgtctggtattatctctctcttgagagttgagagcatggagattggtcctctcttccccaacttagcgtggtggcagcaagtcaacgcctctacttgctgccaggacgctgttttctacttcctatgcgctgcttatgctcttgtctcttccaccgctttgattcaattggttagaattcaagttagagtacctgagtatggttggactactcagaagatttttcatctcatgaacttcattgtcaacggagtgcgtgcagtggtgtttggattgcacaagctagtttttcttttgcatcctacggtgcggatttcggtgctattagatctgccaggactacttttttgctcaacatatacacttcttgtccttttctgggcagaaatttatcacaggcaaggggtttacaactgataagcccaagatagtctatatttcag

SEQ ID NO: 22120 - DNA, 714 bp, Glycine max
aatagaaaaaatgtgaatgcataaagattataaatcaataccaaaagaaaaaagaaattagggaccaaaatctaataagaaaaacatggattaaaatgttatctaaaacctatatctcctaacggaaaataatggtacaaacagtttggatatacagacgactatttatttttctatcctgtgctaaaacgaacaaattctttttttttaacaagcgtcacaagtctccgtattcaaatttctcatagtatgttcacaatatgtggagaccatggtttttcctacttgtaacaaaaggtctgtgtccctttttaaccggttatgggcaaggagggatgcgatctaaaggcattgatttgtaaccatgagcttcaatcctctgataggtagtctttttccaattccatgtatttggcacatcattagttcacttcaacaatgataataccttggaagttgaaagtatccatctctaactaatccagatcgagaggatcaaaattagttcttgacagcgtctctgatgtgggggtaccgatgagcccatcgagagaagccagaagagacaatctcagaaagatccatatacgctttagtatcctgttctgatgatgccagacatcttgcaatgagaagataaagactgctaagagttctatagtcgaaatctggacagtttaaaagagcctcttctgatgtataatcaaatatcag

SEQ ID NO: 22121 - DNA, 661 bp, Glycine max
ctgccaatcgttttgcttcttttttatttatgggacttaattcagactagccttgtctcacacacaacataaagaaaccaacaaatgctcttaactcttgaccgaaaatcctagttcctaattttccagtcccatgacaacattttcaatccattgataagaacaaaaaatcatcgttgggaacacaatattttcccaaacatttttttttcgctgtcacaggacgagcttcctctcacctcatctatttccgcaatgcctcacaaacaaacattatttatcgttagcctcgtattaacaacatacatatgggtttttaacacaagctgttgtgcaaaaaccagaaagtatggccttacccaaccttcagaggacctgtatttgctggtttctgaaagaatcttgcaactggcatcccatcagcatcctcgtttcctgcttttcctgctctccaagaacgatcttttttcctctgtggctttttatggtggtgcttatgagatgccttaggcttcttaacagtagtagtattttttggagcaagtccattagccatgtcaaatgaattgaggtcaaccaatacatgttcaagatttggtgcaagttcgctctcaacatctgaagaatcttcaatagcagatgaatctgatgcatccaagtc

SEQ ID NO: 22122 - DNA, 833 bp, Glycine max
gaacaaaaagctcccttggtatcatctaaaatcccaacttgttccatgaaagaatgcaacatagctaattgttgggcagaaaaacattacaatatgtgcaagcaagcacctagcaagcatcaaatcaaaaccatgaacaggttctcatagcactttgtaattgtaaactatactaagtccaactaaaaaatttgctttagcatttctcctggttgatcagactcagtgagatccttgtctttacattctttaataatatatttagtgaataaacctattttgataaaatagacttccacttctaaacatatgatacatatattcacgcttgaaaaggaaggaaacatccatgaatactgctctacatcctctaacctagagttagtcttctgcaaggatatgtgactgccctccaaggcctaaacaccaaaaccttactcggtagtacatcatctaaaacatatttcgcagggaattgagaccatggccttcaagtttggcaactcatgtgtaaaactctaagcttggttatttccattctgcggagaatgaaagccaaaatactcgatgtggcaaagattaatgtatgaagactaaagatcaaagttcaactttcatctgacttgctggcccagtaccatcaaaatcttggctagtaaggggagcagttgttgcaaagctcatctgtacaacattgtgaagttcatcctcccatacatcaggcagctgatttggttcctttaatccaccattcaagggagctaactgtggatggatggttctatgaaggatatcagatgagtttgcttgaattcttggcctcgagggccaaa

SEQ ID NO: 22123 - DNA, 535 bp, Glycine max
gctcagcaaattatatatatattaaatattaagaagtaccagaggtactgtagatacaaaaaatgtttaaaacaaagctggtacagagaaataaaccccagctaaaccccaactcaaaaaacatacatgcttcacctctgggaagaggtggcagacaaaaccctccctttctaattaaacaaatacatctgacaaattggacgaccaactggttgaagtgagtatccgagtctttttccataaccttgagccaggacccaagtaaaaagagcggcgtcttccatcagcttacttgcgttaaaagcttggttatcaagccctagcttgcacatttctatgatgccatatggtcctagtgagggctatccaccaacaactccatctcatatcctttgttcgagaagcattcaacctgcaatgatgcaagaagtgatctttcggatctttagggaaagcacccactgatttgacccatgcgagtgtctcccaccacaagggaagaaccttgctgcagttgaaaaaaaggtgcgctaca

SEQ ID NO: 22124 - DNA, 620 bp, Glycine max
aaaaacttgagaactgaattgatgattaagcttttttttcatgatcttgggtggttgaatcaaatcacatcataccttctttattattgatttttgttgtcattatacaacattacaaaatttattaccaatatgcattttttcaatattcattctcacattagagcatatttcgcaaccccaattgtggaactgcacgacataaagaagaaaatacatgatactttagagccacatgcactacaaggtcacgaactatattgaggacatgaatttgcaggcatttgtgtatgattatacacacacattgcatattttaatccggatgcacatcttggcccacatgaagccagaaatcacctttttgctgctctccgtcaatagaaacatgtttcagcaggtataccaaacaaaatttttccctgctttaccctcctgtaggatgctaaagttgccaaaggttcatttgacttttgcacttgtcccgcatttattgtaaggttgattatctggcatcgattacatcccccaagcgaactgaaatacttggttccaatcctaatgtatctccatccatcttcagcataaggcctacctccagataccacaagattgggacg

SEQ ID NO: 22125 - DNA, 683 bp, Glycine max
ttgaatcaaatcacatcataccttctttattattgatttttgttgtcattatacaacattacaaaatttattaccaatatgcattttttcaatattcattctcacattagagcatatttcgcaaccccaattgtggaactgcacgacataaagaagaaaatacatgatactttagagccacatgcactacaaggtcacgaactatattgaggacatgaatttgcaggcatttgtgtatgattatacacacacattgcatattttaatccggatgcacatcttggcccacatgaagccagaaatcacctttttgctgctctccgtcaatagaaacatgtttcagcagtataccaaacaaaatttttccctgctgtaatatatttatattagaatattgatgcattaaaataaatcaaatatataactgaaatctagttaaaaacaacttggccaacctttaccctcctgtaggatgctaaagttgccaaaggttcatttgacttttgcacttgtcccgcatttattgtaaggttgattatctggcatcgattacatcccccaagcgaactgaaatacttgtttccaatcctaatgtatctccatccatcttcagcataaggcctacctccagataccacaagattgggacgaaacctacttgcactgacttgcatcacttttcc

SEQ ID NO: 22126 - DNA, 713 bp, Glycine max
cagcttagttttaacatagccaaaaacacaaaaaatgtttcttaatatttttatccttttaaaaaataaatcaaaccacaaaacagctcatactttcctttgctataaataacaaagggaaagtatatacttaacctaaaaaacaacaatcaaatacaccttgcagcatctgagcaggcctttaccaaccaaaattgtttttcagataaattcctccctttactcgtttcaagttgccacaaaactccacacatcaaaaaatttaatatcatttcctaaaaaatccctagtgaaatgaactacatactcagcaccaacaaatgtgtggagagcagtgatggtctgagtcattggcaagaggttcaagagtaaaccttatgcagtccaatgttgagatcagatgatatggaaataacaagaggaatagactgaagccacatggctctgaagactcgtttctgatgcactcttatagattgggaaggcttgtgagcagtataccttatatcaaatatgtgaatcacaggatcagcagacccagatgttatataaagtccatcaggagaccaagcctgatttatcagagctgattgagaatcactgctttcttgcttccatccaaaagcatgaagttctgtattcctcaatctgatatcaaacaaccgaagctgcctctcgtgggtcccagtttgaaccatgaataaattgaagtc

SEQ ID NO: 22127 - DNA, 648 bp, Glycine max
tagtttcaaaattttttgtttcatcattcattactcaagaaagtaactaataatgccggcaaaatccctttcatggcaattgcattagtcgtatacatgtatacatgaaacgcacactaagaaataaagtcatctatcaaaagaaatgaaaacctaaactaaaaggggttcctttttaatccttttcttttcgaggcagattttgagcttgctttaaattttgattttttaatctttcctcgaatcctgttctttggtggtttcaacttgtaaatccgaaccatccaatggtgagttgtgaacacctcttcaaaatgcgtaagtttgaaatgtttcttcccaatttctgtctgcctcactctgtcaaaagccttaccatctgtctccacaaatctgtaatatgaaagtttatacatgagggagtttagcattgttggtgtggccatggaatcaatccgatattgaccgtcccttaaataatctggttcctttatgtgagggaatacaccccctccaatacgaaccatccacaggaacttattgatatcatcactgggatagccaaccagtcctccaaagacaacaagaacatatttgacacggacgcgtgggcggacgcgtgggcggacgcgtgggcgaaaacaaggg

SEQ ID NO: 22128 - DNA, 422 bp, Glycine max
gccatggaatcaatccgatattgaccgtcccttaaataatctggttcctttatgtgagggaatacaccccctccaatacgaaccatccacaggaacttattgatatcatcactgggatagccaaccagtctccaaagacaacaagaacatatttgacatccaatgagtggaaaatttcccaagctgccttctctggggaagacatggcagtaccaacagtagcaatatgtgtgttattccaggtattattatcaacaatgacagttcggttagccatggcagttgtctggtacccatagtcccaccaagaagccactttatcatctatttctgtattatgactcagccaagcataagcctctctaaaatcgtcaaaaacatgaagtccatcatgtgaatgtgatgttagaacaatagaaggg

SEQ ID NO: 22129 - DNA, 845 bp, Glycine max
ggagccgaaatcaagtctcgacattagcttaaaaaatccggttcaataattcaataattagctctcagcgaaagtctaatctaccacgtgtcttaaggaggcaccaaacaatataaagctacagatggcgtccttggtttttaattttaagttgggggactccagataagccgttttcgataatcattcttcagtatattcctggaatgattctgtaaggtaccttgtcgcaatatagtttccagtacttgccatacttggatctgcaacgatcatcatctcgttttgctcgatcaaagagaaggatggtaagaaatatcacgtagaagtaaggcaaaaaatgttcgaaaagagctgggactgtccagaagaaagctgccagtatttcagggacataatgaaagtgacgagataatccccaccatccagaggttaaaagaaggcttcttttagtttccccagaagtagtagtatatgtggcctctatctttgaaggagcttttccccagactgtgccttttccatttgtcctacgaaattcttgcctttgcctgtcacaatcatagttgatgtatatgcaaagaatgccagctactaaaattgagagcgctagcttgatgccaagatttacaggatggttgacaaggtacattccaggagacgtataaacagatggaacccacaccaagcaaccccagcaaatataaaatccagctcgatcatgtgcaatatccattgtgctccaatatccagcttcccagtcagaaaaacttggtaacaggtaccagcattaatgcgttatttacaagcattgagtccgctctcgagccgaatcggctcgagtg

SEQ ID NO: 22130 - DNA, 781 bp, Glycine max
atatagggatttgcgggcaatctattattttaaagaataaagtaaataatcaggtcctgttcatcttttccacatgatactgggtcctagaatcctaacaacaaaataacagaaggatggcacgattcctttcagaaacacaagtgccgtcctcctagcacgatactgatacatacaactgtcaaacacagcaattatggtgaattcatgatgtgttttaacctccaatgaaatgaaataacagaaatattttaagttcatagactgccaaaatttctctatcaaaaaatgatatcattcatgtagtgattaagaactgaaaactaactagagcctcacctaaacatttttgtttaattgctctttcactacggtaacattttgtctcatatattaccttgcagtctagcactgcgaggtaaaataactatctaagacataagcttggctttgtgctaactgctaagcatataaagtaggcatcaagcaacaaaatgtccaatcatgatctatactgtatgaacctgagatgtctctccttccatctggcctttacttctatttctctgataaaataacacatatgcagctgaagatttaatttcggcttcagtaacaggagagacatgactatcatcgaaatggcaccatttattgtcatcgatcaacttacaatacgcagtataatgcccggggcctagaccaccataatggttaatgatcgcataaaggttataaacataagactctcaatcaatcttttcacatatttggttaaatc

SEQ ID NO: 22131 - DNA, 908 bp, Glycine max
gatgaataaatttcattatgaattttattgaaataagtttaaaaaaacgttaaaaaatcataagccaattccatgaagtctaatatgctacttgtaatctcttccaaatgcccctaaatgctaaagtagcttggttattctatagcaaaaatcagttcctggatgacaagactctataaatggctcaatcgtcaaaggagattcttaaaccgcaaccggtggtaatctgaaaccatcttaaatctaccaaaacttgtaaatggggaaaacttcataatataaggtaacaagaaagcatgaagcacttacataggtgttggaagattattatcatatgtgatacatgatagaatagtaaaacttgagcatctaacagacttttatcagttcaaacgtctccgccttggagcacgagaatctccactatccacatcagacactcttgaagcatcgttcctcctcctagaagaggatgttgacaaggataccatggaatcaatctctacagcagtgtccagttgactctctgaatttataacagcaccaatgcttgaaaaggaatctctgtcttcaactggaggaggaggttgttcttggttcctacctaatggattgctacggaaatatgcctcaactaacctttcagcggaagttagtgctgatgaaagagtagaaagtgttgctctgtgtgattgtgttcttcgaagcaaatgggactgcaccctagtccggggatcccctgcctcagaagtattaacattgttctgtgccaatcccattacatcctcggggggtgccactagattctgatgctctctacgcatccctcgcgcagtcaagaacctactatgcaaggtagtagttctctcagcctttcacgggcagcatccggttcaggcggctgaacc

SEQ ID NO: 22132 - DNA, 746 bp, Glycine max
ctggaaatgctgataatcacattgcatacaaaacaattacatttgtaagaggaaaaagaatgttgggcaggcacaaaatcatctcacccaacaatgcccccacatacccagtaagggaataaaattggacgcagactgcgtatgacctgaagatgaatgcgatagcaatactttccttatctacaaaactataacattccgactaaagtctaaaaggaggtgggacagtctcgatataagtagaaaaaactgaaagcgtccatccgacgagaatgcataattttgattaaaaccatatgtggcctcatccaatatcttgaaccagaatgcgggggagcagggggcaaccgagtcggcgtccgacgactgttggaatttgagcctgagctcacatcaccattttgggatgggtcactgtagcgtctactatgaccaccagaaccatacctagacggcaggttgcttggaccattggcagcagaatcaaatgcagacctccaatcatcacctgatgagggtccagagcttcttgggctgctttctgctgcactccctctatcagaccaactggatgctgcagccgctctattgtcatggacaccaagctgcctagtgagttttgaaagaagggcagactgtttctgaactcgctcccttttgttcttgacattgtggtcttcctggagcagctcctcaatttttgcagagctttgagcgctgacggaactgtatagctggttcagcat

SEQ ID NO: 22133 - DNA, 837 bp, Glycine max
atggacttcaaaagtaccgatctccaaggaccaattttcacattattcctgtaatcactagtcagatatcctaataacagccgttttataattacagcaggcagccggagagaactctctctcccatcctctcagtgccatcaatggcatgctcatccgtaaataactgaatatacaatagaccagttggttcatctttacttgaatcactatgttaaaactaggaaaccaactggataagagataaacaaaccatataaaaaaaatttcttaaaattccctttagattaagatttagtcattgcttgtagctagaattgctgctgatcttgcttgaaagtgaaggtttctccttgaggctggtagctaacaagttttcagagttgcttgattggctctcagcaacccctggcctcatccagattttaatgtgcccctcccggcaggcagtgagcacagattcctgggtaaatatcaagccagagagtggttcagtatgcacacggtgagcaaccaacggtgagatttttggaacatccagcatactcggagcaggttgcaaggtacctaatggtacaacattgtcccagtgcgatgactgacttccagtactgtaagtcggggatccaccaggtggccgcctcaagggcactacaatctcgtccatttccaggtcccacagaagcaattgtgtatcctgaccaacagaaccaaaacgatacgtaacagtctctccattgtcatttgaatttggtgatgtccaatatgaatcgatagcaactccactgacttgatcatggcatttctcgagccgctcgagccgattcggctcgagta

SEQ ID NO: 22134 - DNA, 252 bp, Glycine max
tctcgtccatttccaggtcccacagaagcaattgtgtatcctgaccaacagaaccaaaacgatatgtaacagtctctccattgtcatttgaatttggtgatgtccaatatgaatcgaaagcaactccactgacccatgagttatgtccctcgccccatgccacaaccttgcgatcttccatgctccaaacttgaactaaatcatcttcccctcccgtcaaaatatattttccatccatgctccatgcacaac

SEQ ID NO: 22135 - DNA, 696 bp, Glycine max
aagttcgactcatttgttgtttttgcattcacgtctatgttgctgttagctatcacctgatgattctcggataccgtagattgtgatggcatgcatgtgctgtcttcatccgtcttcatatgcttagcttggtgtagaaaacttttattggcactggtgattttcttcctatcacttatcaactgttttctgtgatcatttttctttttgggcaaagaatcctctgtagacatatcaaccttctggcttaacttaactagcttctgttgctcctctttattttccttgtattcaaatttctcagataattcttggttcccggagctcattttcttctttgcaatgcatctattcttaaccaatttccgtttcttgctttttccttgcctacattctgaatttggtattgataaaaggtgtccttcaccattcattgccgccacttcatggtttactacatctggaagttgcgattgagcagtttctttggtgccctcagtcttaaggtgacattgtccagcttcagaatcctccccatccccaacagttccactactcatagtttcaagaacaattttgcccaaaacaaatgcagaaatgtgtcccttcccaagcatgtcataatttatttttgaattttttctttttttcagtcttgtaaaattcaacatcactggccagcattttgaaaatcgc

SEQ ID NO: 22136 - DNA, 769 bp, Glycine max
  unsure (1)..(769): unsure at all n locations
nnnnnnnnnnnnnnnnnnnnnnnnnngagaaggtgaagaatgtggtgactcgagaggtatctgaattgaaggtttctgggttgtttttcgcaattgggcacgagcccgcaaccaagttcttggacgggcagcttgaattggattctgatggatatatagtgacgaagccggggacgacgaagaccagtgttgagggagtgtttgctgctggggatgttcaggacaagaagtataggcaagctattactgctgctggcactggatgcatggcagctttggatgcagaacattacctacaaaatgttggtttacaacaagataagagtgattgactagcttgggtgtgtccaaagatcagaagatgcttaatcagaagcaatgtttaattcctatagaagaatggatgcatcctaccagaatcttcatttgtgggttgcgacattcatatttttattgcagagcgagacttgcattattttttaagcagtgatgctcacgtgcacaagtacatgtattatgattattgggcttatgttacgtgcattattgtgacgatgcagagatatttgcttgcccggtgcaactcatgcattcatagacaggtattgctaccgttcatagactgctatgtgctatcctatccagtccttttttttttaagggaaaaaaaaacggtttgctcttcaggaaggggtaactcaaactatgttcagtttttagattggaaaattttaaaagtccatcaactcaatttgaccggacgcgtggg

SEQ ID NO: 22137 - DNA, 611 bp, Glycine max
aaaaataaaataatctaaatacatatttattgggcatagaaaagtagttttcgatacattagttggttttttttttcaatctatctaaaagagaaattcccaacttcttcatcagattccacttgaaagggagcataaggtcctagtgttctgagtccagggaatcaacatacgccaatatagcaaaataggtcatttcttaagctagaaaacttcttgtttttcagagagtagtacatctccagtgaagatgcttacaacttacaagggtgggataaaaggataactatgatcagattcagcactatatgtcaaaggtgcagctgtgacaatataccaaaattaggctataacatggattgtcaaataaccaactgaatcccactagaggtataatccttcattcaagatccttaaccatggatctcattttgattattcttctgaaagcaccttacagcttccattattcacctaacaaagttgaaagaaacagttcctgcacaaaaccagatctcccagcagcttgtctcatccgtttctcgcgctcttcagtactcaaggagggaccaaaacttgatttccaaatatgttcaggcgtcgcatttttg

SEQ ID NO: 22138 - DNA, 775 bp, Glycine max
aaaagctggggtgacaaccgagcctgattcagcactgcaagaatatttgatacatcattaatttcatacaaggggtattcttccaaaatataatttagccatctttaacttcacagttcacaagtttcaattcattattttcccgtcttctctccattggttgaaagttgtcgatgcatgtcatttggctttttgccgtttgctttattctccagtcttcattttccagttcataagtttcaatgcattattttagtcagagcctcattgaagtaaagttgtaaaaggtaactataaaaatcatgtccccaaggcaaagccagaatcaggaagtggaatctcttgaatctcctcacctcagtccatcttctattttagaacaagatctattcttacaataaacagtttggcatggggtcttccaacatccaacagttgtggggtatctcaagtctaaggtgccgattttaagtacatgctataatcatttggctgaaatttggttatgacaaagttacagatgttacaaagtcttctaagatttgctataagtctcctgtaaactaacacctaggatgctattcctgctggggattactggtttgttgattgattctcttgcatgtgagggcaaggtatttttggttcccctcttgtccataaaaccttgagttcacctctcttctttcccaatgacaaaaaggttccaagtgtaaatgggactatataaagcaaagctggttgaccatgtccatccattaagttcaaagccacg

SEQ ID NO: 22139 - DNA, 509 bp, Glycine max
gatcaaaattttgttgaagaatgtagtagttacaacctaaagagctctagatcatatgaacaattgactacatttttctttttctttacccctttctttgggtttctatctttggtatggtagataataagtatacaaaaagaatgggcataattaccaagttccagtcatcagaggcatgaattgtatatgcagctttccaccgacacagcactgttcataaataccaaatcctgcatgggattgagagcatatatatattgcattcgtcttcataaaagcatattcaacccagacagatcatccattggtatgtctaggccaaacgcatcatcttgcaaaccatcttcctcaatgttcagcaaccaagaatccaggtcttgaggtccatcaagttcattacctacacctagttctatggagtctaatgtgatgtctatgggttcctcagttccaatggacaaatcattagcattatagttatgagatacagacccaactttactttt

SEQ ID NO: 22140 - DNA, 407 bp, Glycine max
gagactaaaacaattttattactgagccaatataatgtaccatcgaaggtttgtccagtagctaataccataaaatattgtaatcaacttacattagcatgatttggaaaatatagtcagctgaatcacagcaattttttagcctaaacgataggtcaattagagtgatgctaatgagattctagcattcaccaaattgctcatcatatatactatacaccaaattttgcagttagaattcagcatccagcggcttctaatgctgcactccagtgagaatgagctattcacaaaatatcttgacaacgcaaaaaatgaccttgatttcttgtaactttaaaaaaggaggacaaaaaaaacaagcatttaggcgggccaaataaaaaaccagcacaaaatagtgtata

SEQ ID NO: 22141 - DNA, 495 bp, Glycine max
ctatgaacaagaacgttaataagcactgcacaagtacgtgacttacactttgcatactcttaaggagcataaaaagttttaaaaaaaaaacaaacaaaaacactagatataattcacagttgaaacttgaaagtcaaaaaaatacaaaaggcaagttcacggatttgaacagctggagaatgtgcagtgtaatgcaacagaaatgtcaaaattttcagctccctattttatgccaactcacatccagcagctaaaacaaccattacagctcatcatctcaaagggaacccttttgaagaaatatccagtggggtaagctacaaggaaagatggatgcattgctcttctctattatcagctgtcacaacagatatgcatcttttatatggcacaaaccctttaccacatgcttcaggtcccactctcacctttagcttggatattgctgatgtttcacttgctgctcgagccgaatcggctcgagctcgagccgaa

SEQ ID NO: 22142 - DNA, 353 bp, Glycine max
aaaattcgaagcaataatcttctaaccatatcactacaaataaatgcatgtatatacatatctaagctctcatagggaagtaggctacacattacagaacaaaattaacatacttcagaagcaccagaacgaaactatgagggggttattgctctgccttgcctcttgcttctgagttcttcccttgggcacgattttgcttctacttaaataattacaaggaagaaagtccccttattgactatagtaactattgagcagctcctactacatgaatttcttcattttccattgggctaaaactcactcgtttcccacgtggtttgtgattgtacaccgtctttgcgccacct

SEQ ID NO: 22143 - DNA, 598 bp, Glycine max
gagagtgaaatgtatcataaggatacatatacttcaacagcttagggcagatgtccatcatatacaagaaaagaaatatagcttcgtatatatatgagagtgaaatgtgtcaaatgagtacttatacttcaacagcttataccagatacccatcgcatacactcaagaaaaaatgtcctccgcctatatatatatatatatatatatgactatctgacagtggagtggcgctttaacaaaaaatttataaaacaaaaactgaaagggcccccctgtgttcatcccttgtcaagagagtataaactctctaatgtctaaacaattatggataattataattgctacaaaaggatattatgccaacatactgtaattagcagtctttagaaacaagtttatatcccgaggccattcagctgtgaaacattgttgtcgaacaataactttaatttcgtaagatattgtggaggatcgtccatggaagtagtacctaggattacttccctttttaattttggtgtcaacttgtgacaaactcgcagctctgatcgagtagccccaccaatgataaacacaaagattcgctttcccatccttt

SEQ ID NO: 22144 - DNA, 508 bp, Glycine max
acaagatcaaattggtaatttggtatatatattttcagattatagttaccaagatgcaattcaagaactctgcaagtcaatgaaaaccgaaaagagctactcactctacacggtgcgcttgattgtagtgaaacaaacttataccatctatgatctatctatccacccaccacaaaatgccacaaactaagattgaaatccacttgcacatcaaaataaaaaataaaaaatccaattgaggaaccttaagttagagttaaacttccgcaggcattgcataatgttgcctagccatctttgttgacaacacttcttgcatcgcacccaaaaacatgccatgtccctcctcaaattgcccgtagccattctttagatcttgtcctaagaagtttgtttgcaaagcactggcaactcctcgagatgctgtcaagtttgcagtattctcagttactccagtactacaattctcaaggccactcttgatccaagctatattgttcaagtctgt

SEQ ID NO: 22145 - DNA, 552 bp, Glycine max
aatagtcggcggccccccttttattttttttttttttttaaaggaaaaaatatatatatatatatatttctctatgatacaatatatataccaaacatcggtattccctgactaagttatccatccccatgttgagggggagaagccactagcatctcttccactttatccatgtcccgtgcctagtaaaaccaatctccacaagccattcgctaattggctaacataaaataatgcactctctcaagctatttgcatgctaatgagagtttgcttttctgcaactaaagaagaatctagtacaaaatatgtattctgccaacaatgacaggtttagaaacagaacttttggttggcaggatatcaagcgatgatgaaaaatcccgaatatgcagtatttattcaagtcgtgaatcaaatcatatatatgctagtgagccacgatcaaggtccggctgaggtcgaccccgagtaggagttggtggcctctgaatattaagctcctgcatccagctatcgtccaccaaaaaatgagaattaccattcaacaaa

SEQ ID NO: 22146 - DNA, 562 bp, Glycine max
aaatcagacaaaaaccatagtccataaaagtataataatgtaagaatggaaatatatattttcacaactatactgacatgttgttacattatttacaaactcattatcaaaatagtgctactaagaatccaaaaaatgcgtagtaataacgcttctctggtgtgtgctaaagaaaatactaatattagtaatataacactgaatagcctataagatatgctcaaaatatggccaaaagcacaaaaagggccatcataaacgcagaagtaggttttatcttaaatgagagattaggtgacagcacaggattattagactggcttgatcttgcttcaggattcacagctatggcaggagaaatagcaggtgtatttgatcggttaataggtaaagtagagagttcatcatcataacagttagattccctccaaccaagaatcatgttctcacggtcaaagactatacggcaaccagtcatgaaattttgtcctatgatattcacgttgttgcttttcaggactgccaaacaaagtaagttaataccctcaccactgaccgttac

SEQ ID NO: 22147 - DNA, 306 bp, Glycine max
cccacgcgtccgattttcacgtagaagctgaaggttcttgtagctctacggaaattgctttggaggaatctggaatttgtccaactggaggctttgccttaaataattcttctgatccaactcaaagtagcacttttagttctgataactgctcatcatgcctaagtgagggtgataataatacaacctcgtcaaaccatgaaaatacagaatcctcaatcacatcggattcagaagatgttagccagcaatctgaagtaagaaataattcggattgtgtggaaactgtcttgtctcattgtcatg

SEQ ID NO: 22148 - DNA, 351 bp, Glycine max
gccgaacatggagtggacaagaaaaaaacatgatggttctgctgctgctgcacggaatgggtctgatcatttctatcatggaatcccacgggttactgattctttttcccacaagtctaggtccataaactcaaagcatgctgttgcgaatggctcaaaggtgagtttacgcctgggcacagctgggattgacgttttcgacactcttggcagcctcatcacaaatttaagcgctggagggtttgcatctggagctgcgaccaaggggaatgacaatggtgttttagcactcgaggctgcaaacactatagtcgacggttctagtcttatggaatctgtatcgacaaaaag

SEQ ID NO: 22149 - DNA, 344 bp, Glycine max
  unsure (1)..(344): unsure at all n locations
tcaatccagaagcggcatggtctacatctttcagctggccttccggagagtggaactacagaaaagggaaaagaaaaattagaaagctcatttggattgaaaccaaagaggaagtagagaaggatagcttgtaaatatatgtaatgacttatgtttttgtcagagaatggtcaagtagtgcaaacaactgctgctgctatgctccagtatgccacaccagcaaattggtgattagttactagttagacaaaacatgtacatggaaaaaccaattgttatgtaagtccaagatttagataattacaattatatttttgtctgaaaaaaanaaaannnnnnaaaaa

SEQ ID NO: 22150 - DNA, 429 bp, Glycine max
ggctcctccttctctttctctctctttgtctctcaaattcccaaaccaaagacaccacaattcactttccctttttaacattaaaatgatgaaaactcaggccttactagttctcatgttattggtgaactttgtttttttcatgggctcagaagcccgtccattgagtatcattgagacggaaaaatcagtcactggaggggaagtggtggatttctttgattggttatctcttggagcaatgaaggattctgggccaagtccaggtgtgggtcacaagttcaccaatagtgaaacccttggtgggattaaggactctggtcctagttccggggggccaggtcaccaatttactaacagccagacccttggtggaatcaagaattcgggtcctagccccggaggagagggtcacaaatttaccaacag

SEQ ID NO: 22151 - DNA, 415 bp, Glycine max
cccacgcgtccgcccacgcgtccgcccacgcgtccgcccacgcgtccgcccacgcgtccgcccacgcgtccgaaatatttcattgttatatatcgtgggaaagactttgttccaacaagtgtcgctgcagttttagctgaaagagaggaattaacaaaacaggtacaggacgttgaagacaaggtgcgttgcagagcagttgatgcaattccatcagggcaaggtgaagcaacggcacaggctgggactttagcagagttctatgaggcccaagctcgatggggaagggaaatatctcctgatgaacgtgagaagatgatggaagaagctgccaaagccaagactgctaagcttgtcagacaaattgaacataaaatatttatagcccagactaaaaagcttagagcagaaaagc

SEQ ID NO: 22152 - DNA, 402 bp, Glycine max
ccgaagcttattctataatatactcgatcaaatacttgtctatacaattacaataccccaggcccacacccttatgttcatgcccatgctcaaggccctactaacagtcacttgaacacattcttgagtacaccttacagcctaccttcccctatacaaacacctttgctccctcattcgattctgagttgaccttacctagctccaatcctggctacaatactgctctcgggcatccgcactatcttcattactatcttcaccctttctttgcagcggatttggcagggtataaagaaagttaatgcgatattatgtgctaaagagcgtgctaatgatcgaagtcatcttacacatactcctacacactaccttttatactacagattatattctagaatt

SEQ ID NO: 22153 - DNA, 342 bp, Glycine max
aaaacaaataataacatactctcgtagctaccttcaacaactctggctcatggcgtgtcaccgtgggctctgtactatcacctgccgctgctcgctgctgctgaattcagcttcgcacagctgccacgctcttcattcgcttgggttcaacattcaccaccgcttctacgaccccgagaaagagactctcggcgttcatgatttacccgaccagggaactctgacaatgctatggagctatggcccacacagaccaaatatggcggcgccggagactcgccgccggttacacactcgcctatgactgctatgccctccaacgagactgatcagattgaagcc

SEQ ID NO: 22154 - DNA, 483 bp, Glycine max
aaactgtgaagtacaatctactttaaaagaaaaacagttgaataccgagctatagtcataaagaaccgcctcacttgactgacattccaatccgaatatatttacctcaagcaaaattgggactcattctggcaataacaattaacttttgtcacagaaaacctgaagaaaggttggtacaatacatgcttcccacgtctaaaaattgccattgcctccaagtacaaaagaatcattatcattctgcagaaatcacatgtcggattactcttacgtaagtaattattgtaactagaaactcattaatcgtctgagtgtgtataggtcaccagcaccaacgaatagcattttgcagccattatataggatatctcgtgcaacaattatgtatctactggaatagcttcctcaacctttcagcagctgaagctgcccttttgttggttggctcaagtacaagggcatgtttaaaatcatcaattg

SEQ ID NO: 22155 - DNA, 887 bp, Glycine max
ccatcattttggtctcttttctttgctttcgttgttgtcgctttttttttttttttttgcttcaatgcttggtatgatgaatcaagtgaaagagtgccagaagcaaggagagcatgtgattatttcacactgagtttttcattgaacagaaaaatttatatgagaagggagaagggagaaggggtgaaatggaaatagaggaagaaaaaagaatatacatgcctatcaccttctctacaacagtccaacaacacagctcagatgcaatctattttccaaccctcttaagtgatgacccaataacatgcaccagaaaagcaactttgctaggtaatcacgagaagtggctactgtattactaagctcatcactgtctgtgcgattgtctacgtttccttccactgattgttccataaaactagagctagcatcatccacaaagaatcttctcaatatgttctgaacaagttggtgaattatatcctccacttctaatgatgaaggccgggacagttcagtcaccatatcaggatccagagaccgaagatattccaacaaattgttccattttcccttgtcatattctaattgcatcatttcctgcttctgggcattcagttcctgaaaacaaaaggcaaaagtttggagctttcattctttgagcttgccttttaaatgatcacaaatgagtaataaaaccacttcttttagggaacagaccccagagggtgaaagtaaagtaaatctttagactacacaacgggagtgatgcactagtgctttccctgttaattagattatgccattgtaaggcacgttaattactctgaattaagcattaagaagctgaaacgggctttacatttcattcttgccggacgcgtggg

SEQ ID NO: 22156 - DNA, 428 bp, Glycine max
  unsure (1)..(428): unsure at all n locations
ggaaatgaatgcatgctaagtttgctcgttgagggcacaaacccaacaaacatactgggcattaatctggttctcccaaggcagcaatacaaagagaataagtgaagaaagttcaatcgaatacagaaaatacaaagggcttgatacccgaatacgtaaagcttagaatagcagggaataaaccacaatacaaaaataacccagaactactgaaaagggtgtccctgcgggtgatcacttcccttccgcattctcgccatcagccacaggatctgggctggcattacctgcttccgtcttagttgtatcatcaatcctcctaccagaatcatcatctaattcatcatccatcatgtcatcctctcccacatttatatcttccacatcatcatcatcttcattattgtttccgnctgggatctttcttt

SEQ ID NO: 22157 - DNA, 472 bp, Glycine max
acaaggtcaaaagaatagcccagaaaagtccaagctttatattcatcattccttcaccacctcaagtctcccaaccttctatgatatgatttacaattttacaaatcaatacctgatcccattcaaagttcacatacattgggatcagtgagtgcacaataagatttgactcgatatgggcaataagaaacattctagctaccctgggctcttttagatgatcttgatggaataacattaacctcactcgactgagggcgctttggttcttcctgtctctgtgcctcctttgataatgtggaggaatttttccgtgactgtgcctgtgttttcaagtgcacacgatgcaggtgctgcattttctgaaactgttgtagcctcgcagcaaaatttatcccattgtgtgagttcccaccatccatagctatgtcaccatcctcactgatttgagatccaccaaacatgtgatgat

SEQ ID NO: 22158 - DNA, 654 bp, Glycine max
ccccgaggcccggggccgggaaaaattcccgggttgagggggcgataaacgggggggccccccttttttttttgttttttatttttttttttttgacacagaatacataatcaaatgcacatttggccatcattctaatcacagaaatgttgaactttacaactatcttgtgccggtttactcccatcagcatccccaatttcccctccctcaaagaataactgtacaaataaataatttgttgtgtggaatgggagataaataatcattcctaaaacttttccttaaggatacctcgactgtcatcacatttcagtagtgtcattcgctgggaccttgaataaccttgcctgttattaagaatatcaatgtaattccgaagcctgtaacggtctgagtttgtcagtgaaaatggaggattaagaatcagggatggtccctcaactaaaaggaaaactaacagacggacagcttttgaatacaatgcagctgcactttccatttctcccatgagctcttctacacccccatgtcttccaaaagcaagggcggattgaaatattgtctccattgcatctggcatctctgtgtttcctgcaatcaggacagaaagggtctctattggtatatatttcatatgttatggaatgaaac

SEQ ID NO: 22159 - DNA, 787 bp, Glycine max
aaaaaaataaaataataataataataataataatacaagctttgcaattgcttgttcaatctaacatggaagcttagtttcactcagccaggggcccaggatgaacaattaacagggttctgactataaaaatggggggaagaaggaaaaaacagttccttatcacagcatcgttactttagcggcctactaaaccactgaaaagagactaccagtgtacatgcatactcaaatagggacaaaaaattacaacatacaaatctactctcgcgaagcatatgagaatgagcaattacaacctttaaaatgctactaaaccaactatttcactccaaaaatcatgctaagggcttcccattccaccccggggaagaagagtatgtaaccagcaagaactagttccaacccaaaaaataaatatttacatatctacgtccaatatgcactttgtagctcataaagcccagaaaggcttttgaaccccagttgctcgggtgtcatgaggaagtgattcctcactagaatcgtctatatcatcatcatcctcctctccatattccattaggttgaccaatgtatcaggaactgcatcagattttgtcttaagcaaagtcttgttcttgttgtgtactttaacttcaaatggatcagaaaatttaggcggaggtggtgggggcatggttctcagtagaggaggtggcattccattggatgatggcgggaccaacttcttaggggcaggcattgttaatatattcctcacaaccagaccgtcagattgttcata

SEQ ID NO: 22160 - DNA, 530 bp, Glycine max
attaagacattctcactcgtaatgcggggatttcttagaaattaatattgaacaattataaaagaaaatgtgttaaaaagtatatttctaacgaataaaaaaatctatcatacaaaagttatatggaaatggaatttcttctttatcagggcacgtagaaattaaattatcaagacctgtgggctttgacctcagccacaacaggggtaagcctatagtcaaaatggcctattgagacatggaaattaggtttctaggtggtgaatgttgataggtcccacccaatatgaaaaacttgacttggtttctttctttctttctcattctcctttgccctgctttatacatacgaatcggtgtgtaaagaacaattttgaacttcaattatgggttccccaactctcaaatttcgttccactgtccatggaaaagtaaaagagcttggccattaaaaaactcgaaaattttgtacccatttatccttgggggttgcactttaaaaagaaaagggtcccctaaatttgtccttg

SEQ ID NO: 22161 - DNA, 607 bp, Glycine max
cccggggggcggggggtttttattggggggcccccccttttttttttttttttttttttttttttttttttttttttttttttttttttccctcaattctcctttattttttatttatccaaaataaaatctccacaacaaacaagcccatgtgaaattgatctcatatgattgtcacattgtttgccatgtggcctacatgcaagcctttacaccaacagcagaaagtagtactagaaagcagtatgaaagcatgaactccattcttaaaacctaaatggcctcatcttgatcaaatttcgaagccatcgagagagtattcaattcaattgcatacgatcccacacaatccaaggtccaagggcaaaagcaaaaccttctcaaacttaattgagtgggtcccattaggcttttaataatagaaacctaccgctatatatcaccataaattattaataacaacaacagggttaaatatgtaaattacaagatctatctaatctagcacttgttgggcgagaatcccaccaaagagtttgctagatcgaagctgacacgtgtcccctgctgctgcacgttcccaataatcgacatagacgacgtcgtc

SEQ ID NO: 22162 - DNA, 497 bp, Glycine max
tgtggcattctaggatttcgaccttcacatggtgctgtttcgcatatgggaatcatacctatttcaacaagtctggacactgttggttggtttgcaaaggatcccaatatattgcgtcgtgttggccatatacttttacaagcaccatttgtaatgcaacgcagtcctcggcaaatagttatagctgatgattgttttcagcatataaatgttcctcttgacaggagttctcaagtggtggtcaaagccactgagaagctttttggaaggcaagtattgaagcatataaatcttggggactatttaagttctagagttccaagcttgaaggggtgctctggacagaaaacaaatggtgaagtgaaagcttccgcattaaaattacttgccaacattatgcaatccctacaaaggcatgaattcagacttaaacatgatgagtggatgaacacagtaaaacctgaacttcatcctggtgtttcggcacaattgcatga

SEQ ID NO: 22163 - DNA, 538 bp, Glycine max
  unsure (1)..(538): unsure at all n locations
cccacgcgtccgcccacgcgtccgcccacgcgtccgcggacgcgtgggtcctcaggggccaatggcttcacaatctcctcagaaacaagcgaccactaatgcaaaacctaattctgctccaaattataatgtgcctggtagacaaagatcaatgaagcgggtaggtggcagcagcagcactgtgtctgatccttcacagggcaacttctctaaccctcccccaccaccgccgcccccgccttttcctgtataccagctcccaccagttagctattgtaatatggtaccaggggtccctgaccctgctccaagagatcattaccggaacaataactgggatgcaggaccaatggtagggggttttgtgcctgccatgaatggatatcggggttcctctcgcaggggttattttgggcctcatccccgaggagatggttcctatcataatagttatggtagccggcgtgatcatcaagatcgtggaaattatgtgaatactagagatgcatttgttcctcaaccatggatgcctccnaca

SEQ ID NO: 22164 - DNA, 544 bp, Glycine max
gcagtatataaatgataactgtattataaatccctctttgcagtaattaattaaactggggatgcacccctagttctaatttgccaggagctaatggctttacaatgattagtatccataccatctccactaaaaccaagtgtatgtttggattaccgttccaatccttccaaagttattaactcaaaagtaacaaaagcatgcttctccctacgtactttcaatatagattcaccacctgcaaacggtaatccaaacattatgagagcttcattttagaactgatgcagaattcccgttgacaatgtggtttgagagcttcccatcagatccccaaaatgctgcacacttcaaatcatcctgaaccattaatctggagaactcctcatggttataactcattatgctttttccacctagttctttgggcagattttcctcatcaaaataggacttcatgacctgcacactatctttattattcgggtagacaaacttcaccttctgaaatgtcttgttgtccaagaagtacttgactatctac

SEQ ID NO: 22165 - DNA, 590 bp, Glycine max
tccagtagctactttaggatcaattgatttcacaaacttaataaatcggataatataataaataattaatgttattgataaaagctgtatttcaaaaaataacaatacaattttacaaatctgaccaatcattttcctctcacaaaaaatcctcaggaagttaccatggaggccaaatccaattcttcatcggagtctatcacctctttgtaatcataatagggattcaccttcggccttggagtaactgctgaaaatccatgaaatataggattttcaaaattcggtggttgaaggacaacataggcgcctttgttgttatacctctcctgtgttgcctgaaattgtgggtaatctggagcactaaaaacagtgaccagctttccagaatctacaacatgatcaatagtgtaaccttcatccattccctcaagaccatcccttttttccctagcatcaggaccttcatgtgacctgatgatcaactttagttggtatttcttcaaaaattcttcagtacaatcaggaccccacatcaagccaatgcctctttctttgtttggagcaagaccaggattttttgatggatc

SEQ ID NO: 22166 - DNA, 619 bp, Glycine max
cggtaaattggattttgaccgtcagcttttgaagaaactagaaacccatgtccacatgatgacaattcaagcagacaaccaattgctttgaatgtaaaaaacatagcaaaagtggcctatacactttccgaaggagcagtccaatgtatcatcaattttacttgtttaagcaaaagtaagtttcaaatgcataaccaaactccacctatacatattatctaatgactgggcaaaataagaacagacttccctccaagagacgttcacttgaatctgagaacaattatatggatctgctgctctgggcaaaatccacacttccaaatatggcaatgaattcatatacagaagacaccagccagtttcaaaccaatcccttgtttaaacaaattgctttcttatcactacatctctatcttcagtagtctctaatcccatttctgcttaaagaaaagtttctctctcaatcaaacttcacagttttacccccttcttgttgctgctttgttggttcagcagggaagtattttatgccaacaagatcacccactctgctaataacctgcaaggctttgataaggtcttcccttgaatgagctgcagatatgcatatgcgtgc

SEQ ID NO: 22167 - DNA, 531 bp, Glycine max
  unsure (1)..(531): unsure at all n locations
acgtaaagtgttgagttaaaatttactttaaaatgcaagtttacacaaatgactgcaccgaagatatggattacaatttgctcacaggcatgcatgctgaaacagcaggacaataggaaaatgggaatgggaagaagcatgacataatttacattaagatcccaacagaccgaatcgcatttcaagacacatgcttacagtgttcaaaatgggaccgataggaaattcagttcagcattcatggcactgacaaaaatggatgatgataatagccactaaaacctccttgtttcaatgcaagaagtacctttagctagctcataaatgttgaagaaggctgaggacccggacagtaattcctcattgtattccagcattcaatctcaaactattgaaagattgtaagtgttgcaaagctgaagcaatgctgcttgatttgcaagatcaacattttcactgatgaccttaggatacctnccaggcgaaagtgcaaaaagtcgggacaatgatgccacaaaaaactccttggga

SEQ ID NO: 22168 - DNA, 567 bp, Glycine max
gcagtacaacaatggacttacatggcaaggaaacgagctacaaaaaatggctaaacattgaaaaagaaaaaaaaaaatatgattgcataaattcacaattacagctcaagctaactctgccctattatagaatatgaaaaggaacaaaatttagatagcacacaaaacactactcccaatccccatctcggtggtctgcacatcccacgcacaccagagattttcagccaagcagtccggacattccctcacctgttaaaggattaacccctcctcctttaccctcctttcctccccaggcctcctcaggatgaataatctcaaagtgagcacaatagtgtctctagcaccactgaaatctgtctttaaaaggtgttcatcaccactggaaccaattataataaactctgaagtatgtccatatggaatcataacagtggtggacggtgaaaatttttctgtgattacaactccactttgtccactgcatttgatactgtaaccttccctcgtaatggccaatgtggctggctcccatatatcaagatatctagtcgaatgagaaac

SEQ ID NO: 22169 - DNA, 600 bp, Glycine max
attaaacaaaaaaatcttgttatattgaatattaaattcaaacccgtgtgtattaataaccatttatacaaaatagttcacaactttagaaagcaaatccagactggtcgactcaggtctcaaaccgttttcaccccaagcaagcagcatcagtccataagatttttcaatcaacaggagcagatttaataaacaaaagaaaatgttctactcacactaagtcattcaaatggccacccagaataccctgcatgatgatgatggctgttctcagggatagttggtgtcggtgagctgcttcctgttgcttcatcattactgctagaatgagaagaacgaaaaggccacaaaaaggaaaatggatttctccttccatggctctccctaccactactacttaaacttgcacttctacttctaccatttgtgctgcggttactactactcaatccttgtggcggcagttcctggcggcaaaccgggcaggagttatgctgcaccaaccatggaacaatacaatccgagtgatataaatggttgcatggcatttgtcttgctttggatcccagttcaaatttatctttgcacaccggacaatgc

SEQ ID NO: 22170 - DNA, 546 bp, Glycine max
tttagttcataaggagttctctgacgtttgccaattcaataggggtggctactatagtgttattgcaccaaaaagatttgtattataacctaaagcaagggctgccaaaataccaggaaccccacctgccctatgcatggcaagaactgcggagtataaagcccccacgtgtccagtctgacttgcaaaaaggtagtggatgaagaaataagctgcctgaagaacagccactgaggccggccagctcaaagagaatgaccgaaggttgtcggccacacaatcagacatccagctcacataaccaaggtttgtcaactggcttgccatacctaccaaaatggcaaaccaagctaaaggtatgccatgctgatttttcattccaacagttattccagtcaaggactcctaataggaggagtattgataaaccaatcattgcagctacagcacttgctatgctgatagtgtccaaagatccataaagacactgcaaggagcattgtgccgaccataatccattcgtttttaatgacaaggcccatactt

SEQ ID NO: 22171 - DNA, 774 bp, Glycine max
ggggggaaatgatttgtagtttaaacagaaatatttgtagaagtgaaatgtggcaagggcaaaataagcaaaataaaaacaccacgagcatggaatttttaatcgaagcattttcaggcaataagttcatttgggaacaaagaagacataagtgaagcaacaaaatcagactcactagtaagccagcggaaggagttttcaaaagattccttttcctttggccactgaccgagtcattttttgtatccaaatagaaacaaaaaaaaattgccatccatatgaaatgagctaggcaatagatggcatattttgagcttcatttgagctctttttggacttgtgctttgatttcttctcccgcttcttgccctcgtcatgagagtgatgaccccaacaagacttcagttttcggttgatatgcttcaattccttctcagaaggacttttgtattttctaacccaagaatcaattgcatccagtgattcagaaagctcggacattgtatgcatggaattctcacgggaaaaaatacccctaagataactatcaaagtcaatgactctgtggaatgcatttgagttgcgtaaagcagccaaggccaatacctgcccaggaggaaataaaagtggtgcatctgtaagcatcattttatcaacttcaaatcttgctgtctcttgcaaagtcttgagcatttcaagctggttatcaccagcattaaagaattcctccatatcatttataaaaccttcaactgagcgatatggtgcatacac

SEQ ID NO: 22172 - DNA, 470 bp, Glycine max
agacgattcaatataaattaataacatttattccagtcaagccaaatttacaatgtaaccaataccatttgaatatacatagataatggcatttattacactcagatcaaatttacaaatatatgtatagataaagtggtgatgattatcccaattcataagaccggcctctagtaccttgtaacccaactccatgccatgctccattctggaaacgacaagatttcagatttttcctcttccgcttttgttccccttgacctgtagctgaactacactccccatgcagatgcagttatcttttgttttgtatatatgcgtatgcgtcttctagtattttctcttttacgtttttatacaacagcttctgcaatcaaaacttcgcctcaagaagaatggaggagtatggagttgggttacaagctactagaggccggtcttatgtatagataaagtggtgatgattatcc

SEQ ID NO: 22173 - DNA, 547 bp, Glycine max
ctaaaaattggggaggacccttattaacaacaaaacctttttccatatttttaattacaaaatgtcacccccccatccatatcggtgcagatcaacgatctatatacatcaaaaaaatctgttcaaccccaaaattgcaccactccaatatgcaaacatatccacaaggagccatagcaaaaggattaaagtactcttccgcctaataccacaaaatgaccttgagaagaaacaatatgaaaagttcagtttcaacacctcaccaattatgcaactgagaagtaatgcttttttcaacaggatgatattgtgtgtgcatgtatctcccagctttcacagaaccaggctgttcaagccacttgtcatataagcctttaacgatgggattgtcaaacggtgatgctaccaaaacatcttccatgtaaactgattctaacaactgacttagttctttaggagattgccctgaatttggtttaatttgacctcccccatttaagcaacctgaagggcatgccataatttctgggaaatgtgattatcattt

SEQ ID NO: 22174 - DNA, 672 bp, Glycine max
cccacgcgtccgagggcattgaggtttcttcaaaagggaagtgaaacttatgttgataaatggaaggcagtttctatacctcgtggtacacttcagatgacatttctccataaagggtctgatgagactcgtcgacttggcctcagaagtgagacagagcagatagtccgtcatgcttctccagctggtgaaactggaatgcttgttgtggactctgtggtgccaggtggtccgggttataaacacttggaaccgggtgatgttcttgttcgtgtcaatggagaagtcattactcaattcctgaaactggagactctacttgatgacagtgtaaataagaatattgaattacaaattgaaaggggtggcacatctaagagtttaactttgtcggtgcaagatttgcactcaataacgcctgattatttcttagaagttagtggggcagtaatacatcctctttcttatcagcaggctagaaacttccgtttccattgtgggcttgtttatgtggccgaaccaggatatatgctcttcagagcaggagttcctcgccatgcaataattaagaaatttgctggtgaagaaatatcatgtcttgacgaactgatatcagttctttctaagctatccaggggtgctcgagtaccattggaatatataagctacatg

SEQ ID NO: 22175 - DNA, 1023 bp, Glycine max
gccccgacaagaccgtctccaccgacgatgttcccgaaaccacacccttagacggtcatttcctgcgctacaaatggtgagtatcgtgtacagaatgataaaaaagttgctgtctgtagcatacatccatcagagcaagccaccctgcaatgcctaggctgtgttaaggccaaaatacctgtttccaagagttaccattgcaccacaaagtgtttttcggatgcatggcagcatcatcgtgtcttacatgatcgtgccgcaagtgctcttaatgaaaatggaaacgaggaggaggaggtatttgggcgctttaatagtactgggtctggggcaaccaattccagcttatctgcctctgcatcaagtgctagcttgacaaatgggtctgcaacacctttgtatccagcagctatcacacaaagaagtggtgaaacttggtttgaagttggacgatccaagacttacacccctactgctgatgacgttggtcatgtccttaagtttgagtgtgttgtagttgatgcagagacaaaactgcctgtggggcatgtcaacactatactaacttcacgtgtcattcctgctccctcgcctattccacgccgaataataccgggtgatggtgatggcacatttacatgtggatgggagaatgacatctgcaggaacttttactgttctatcatacaatgtattgtctgaagcatatgcctcaaatgatctatacaattactgcccttcatgggctctttcttggccatatcgcaggcaaaatttgttacgggaaattgttggttaccgtccagacattatttgtcttcaggaggttcaaagcgatcattatgacgaatttttttctcctgaactagacaaacatggatattatggtctttacaagagaaaaacaaatgaggtgtacagtggcaacactaatacaattgatgggtgtgcaacatttttccgtagagacagattttcacatgttaagaaatacgaggttgaatttaacaaggctgcacagtc

SEQ ID NO: 22176 - DNA, 619 bp, Glycine max
tttcttttccattttgctatttgaccttgcattcatcaaatctactatgttaatgttatgacatgctatgcgccaacgttttatttttctatattttattattaaagaaatcctatgagagtgggtcttgctttattttacccaatgcccatccttttgtttgggaacgacacttactaatgaatacttctttttctgcacaagcatcaaatatccgttacatgtaataaaataagaatttaacttgtctaaagttaaattacttcccaatagtttctccatttttacttttttaatttccataatttatattttaattgttttttaatttttataattttaaaagtagtttttttagtctatgtattttatttttttttaattcctatagtttgaaattgatatttttagtttctatcctttatattttaattttatttaagtcttttggcatcaaaatatgagtaatattatcaattataattaactatgaaaatattaacaaataattcataacgtaatttttcttaaatttccctgttttaaaaaagtaattgataatttataactaatttgtagctaatattttttatagtaagaattaaaaggtaattaaaat

SEQ ID NO: 22177 - DNA, 554 bp, Glycine max
ctcaatcaaatgacatttaatttaaatttaaaaaatcccgacttacaagtagaaatctttcctttttctaaatcattggaggagaaggaaaaacccagtaattagaaatttgcatcatcctctacaaaattcaacaaaaacttcaaaaccgaagacttaagatccccactcactcctttatttttggtttcaaacacgcccttcataactctcgtgtaaagcctttcaagttgtggaatgctgtaattttcactacgcttcacaaaaagctgcttgacagactctacttctcctgaaaattcaccgtctagcactgtgacatcatcaggactgttgccatcagcaaggttatttgtacaagttccatgcaaatctccttcaattgacacattttccagcctttcagaatttgtgtcattggcttgatgctcctgggaagactttgggggtaccgaatcttcttgtgacttgtcttctgcatgcacttcagcgatcttcttagttcgcttcaatacttcggaactctgattcatattaacttctggttggacatg

SEQ ID NO: 22178 - DNA, 563 bp, Glycine max
ttttcaaattgcaaattcccttgatgcatcaatacaaagtgttactacaacacaacatggaagttgcacaagtacaaagaatgaattaaatatcaattggatggggaagacaaaaaaaataacatgaactgagtacaaacatgagagagggacatggccaaaatttcaacagggtggttgtattgccctgttggctcttgcagtagtgacttgtgaacaaagattagaggaatgttaaaagggaaagaaaggaaaaaggcaaaacgtggtgtatgtacatacccaccagtctacctacgataatcttcgtggatgaaactctcgtatggtgttcctgttagtgccttgcttatatcattccagttttcaacttggctagataaggaccctttatgtatcttcacctgacgactctttaaatccatttgaggaacctttagaaaatcctgaacgtcccttaatttagtgcggtttttgacgatgtcttcatagtacaggataatgtgcctggtgctcttgaaatatttttttcccccaaaaaaaaagccctttttttggggggg

SEQ ID NO: 22179 - DNA, 429 bp, Glycine max
accagggcaaacagcacctcaaattgccagcatggtgcatttcatttttttctcaagtaacacaccaccatgatctaataaataaatcattcaaaatttcacacaaaaaagtggtactatcacaagttagcaacagattcatttctctgcatctaaactaactcaaattcaacacataataagtaataaccaattatccactaaatttccaaactcaagaaaaagaacaccaattttctcagtaaagcccaagatccatttgcacgtagttcattgagcacatattagattagcacgtaggaaccaaccaacctaacgctgaatgttgagcatgtccttggcctcagtctgctcctccacgagcccctcaactgcgtacctactcaacagatccttcttcttcttctccagcaccctcctctcaatctc

SEQ ID NO: 22180 - DNA, 451 bp, Glycine max
gcctgttagaaaaatgaacagtaactctgacactacccattactttaatcagtcaaattcgaccaacatgctagcatatagccagtccagaacaaacacaggagaataaacacatggagaaataaaacctcagacttcacaggaagtgcacccaatagtctaaaattcaaatacatgttgaaaattttcaagagcttcactatgggtacaacttaatagagtctctgcctaatgctccactatgagacaaggtcatcattgatcatacgcaattgctcctccccactttttcacgcggctctctgcttctacagcctaacgctgaatgttgagcatgtccttggcctcagtctgctcctccacgagcccctcactcgcgtacctactcaacagatccttcttcttcttctccagcaccctcctctcaatctccttctcatccggcagcggc

SEQ ID NO: 22181 - DNA, 510 bp, Glycine max
cctactctaaaacttttaacacaatactttcttcaatttagaaatttggcatctctgtaccgtagcatacagatttggatttcacagttcttacacttagcacgaagtatgtgaccttattttaacataaattcctacacgctaaaagaaatgactatgcttcatttccaataccttttttttcattctaccaaaagtgacaaggttttccttgaaattgaattgaataactacaccgcaacaatattgacaggtcaccatcaacaccttactaaaattaccaacggaaagtgcaagttctcaagaaaggtctactacgcactgtcttttaagctggaatagatatattctaccatcacacgaccaacattttacttgaaatgtcattttattttctttcaagttataaacagaatataaacataccttagtcgatgcctattgcaggctgtgaagaaggcaacaaacccatagagtatgctcttgagagcacggaaaatctgggaaaaa

SEQ ID NO: 22182 - DNA, 549 bp, Glycine max
tttatttttatttttcttttttttggctaaagaatcaaggtatgctgcataaatttgtgaaatacaacaatattcaacatatcctgtaatagttcagaggctatgtcaatgtctgctaattaaattacagaacagagagaataaaacaatggaaaggaaaagaagaaaagacatatgtttaccatgtacaaccattagatacaagaatcacccgatattcatggcatcctgtcctttaactacacaaacctcccaaaatctcaattctgttaaatcatgaagcggattgaaccttgatgctttccaaatgccattgctgcgtggccccgtaagtaacgaatgcccatcggtcatgcatgctcaatgaccgttttttcctttagatgaaaagaatctactgaaacctcgggtgtgtttctccggtgtaggagtggaagacgctgacgaagaggttgacttagtaggcctgtggtttggattctgtacagaagatatggctggaaaggttgattcattatctgatggactgtataaactgttagaaaaatg

SEQ ID NO: 22183 - DNA, 1261 bp, Glycine max
ggggttggttctggtggtgttggtggtggtggtggtggtgattgggctatgaggttaagagggtataagcttgtgcaggttagtctctttcagaagcctattgtgaagttgaagttgggggatttgatggctgctactagtaatttcagcgaggagaatgttcttttcacaaccaggacgggagcaacgtataaagctgatcttccggatgggtctgcactcgcggtgaagcgggtgagtgtgtgcaggatcggggagaagcagtttgggatggagatgaatcggttggggcaggttaggcacccgaatttggcgccactgttggggtactgtgttgtggaggaggagaagctgttggtctacaagcacatgtcgaatgggacgctgtattcgttgttgcataggaacggtggtgatgcgttggattggttgatgaggtttaggattgggttgggtgcggcgagggggcttgcgtggctgcaccatggctgccaccctccgatcatacagcagaacatttgctccagtgtgattcttgtcgacgaggagttcgatgcccggttgatggactttgggcttgcgaggctcatggcttcagactcaaatggtagttttgtgaatggtgatttgggggagctcgggtacattgcgccggagtatcctagtacacttgttgcttcgctgaaaggggatgtgtatgggtttggtattttgcttttggagttggtgactgggcgaaaacctcttgatgtaagcaatggggaggtagagttcaagggtagcttggtggattgggtgaatatgcattctagttctggccgaatcaaggattgcattgataaagctatatctggaaggggacatgatgaggagattctgcagtttctgaaaactgcgatgaattgtgtggtttctcgccccaaggatagatggtctatgtaccaggtttataattccttaaagagcatatccaaagaccagagtttctttgaacatgatgatgaatttcccttgatctttggtaagccagaaaacgaggttgtggcgtagttcttgaggaagcattgcagcatgagaagatgatgagagattgttctcactgaattgctattttatagtggagagttctcacaatggtgttaatgtttatggtttgagcatgtcaatgggtgaccctaatcaggtatagttgtattgtattgtatgatatataataaactttctggcaggttaggttttttgagatcttatctgtttcact

SEQ ID NO: 22184 - DNA, 473 bp, Glycine max
ggcttttgaacactcatccaagttcttccaaacctaatcagtcaaattctccacgctcccccagttagggtttctttttctcattcaaattcttctccagtcacagccagttggggtttctttctcggaagatggctcgtaacgaggagaaggcccagtcgatgctcaaccgcttcatcaccatgaaggcggaggagaagaagaagccgaaggagcgccgccccttcctcgcctcagagtgccgcgacctctcggaggccgacaagtggcggcagcagatcatgcgggagatcggccggaaagttgccgagatccagaacgagggtctcggcgaacaccgcctccgccgatctcaacgatcgtgatcaacaagctcatccgcgaaaaatcccactgggaacgccgcattgtggagctcggcgggccgaattactcgaagcactccgcgaagatgacggacctcgatggaaaca

SEQ ID NO: 22185 - DNA, 370 bp, Glycine max
gcacaaacaagagcaagagccgcgcgccagtgggttaaatgctcaatttcttctaattaagaaccacgatggtttaggaatccattgttctccatttagggtttctttttctcattcaaattcttctccagtcacatccagttggggtttctttctcggaagatggctcgtaacgaggagaaggcccagtcgatgctcaaccgcttcatcacgatgaaggcggaggagaagaagaagccgaaggagcgccgccccttcctcgcctcagagtgccgcgacctgtcggaggccgacaagtggcggcagcagatcatgcgggagatcgggcggaaagttgccgagatccagaacgagggtctcggcgagcacc

SEQ ID NO: 22186 - DNA, 435 bp, Glycine max
cccacgcgtccgaaaatcaatgggagactggatgaacaaacaattgcgcattcctgaccctcattcagccaagaaagttgaagcaacagataatagccctgaaagtggaggttttaccatggtaaatgggaatggagaagaccctgttgatggttctgactcccaatcggaagtctccaatgatgtatctgatgtttcaactattgagcaacgacgggcttataaactggaactccaggaaggtatatcactttttaataggaagcctaagaaaggaattgagtttctgatcaatgccaacaaagtgggtgattcgccagaggaaatagctgcttttcttaaagatgcatctgggttgaacaagactatgattggtgattatctatgaaaaagggtagagtgatgcttgaatgtaatgcatgcctatgaagattc

SEQ ID NO: 22187 - DNA, 776 bp, Glycine max
gttgcgctgaggagcgcggcgaagcccttaaggctggtgtttgaatgcattgggaggtttttccttcaggggagcaaagcttacacgaagaactcgccgatggttcccgcaaggcaggtttcggtgctggttcttggagcactacttgctctctggctgcgttgggaatgagaaggacgtggaggcttcattgaagagggagggacgcgtgggcgcggttgcgtggaggaagaggatgtttgttgaagggggtttgctgaaggcagctgaggttgatgccaggggtttgattctcttcgtcgccggcttcgggattcccagtgttttcaaggatgaggatatatacaacttggtttgtgtcagcaatggcagagaattctccgatgccctgctccagtctcagcccctgcttaagagggtttcagatgttgcagatgggatgatgaaaaagggcatggccgctaaagctgctgatttggcttatacctttgggtttgaagagaaatattctcctcagacaagcttgacttcatttctgcagaagtctgaagaaacttggaagaaagccaaacaagacgcacgtgattttcctagtgcactgaaggtagcacatgaaaaatatttggctgctttgcaatctgtagttaaatgtttggaaggtcacaagattgaccctgtaaaatttctgcctgggtggcaacttaagaataagattactcaacttggagaaagatattagtgataccaataaaaaaattgatgaagagtcaatgctc

SEQ ID NO: 22188 - DNA, 930 bp, Glycine max
ctccggtttatcattctttttcaatcaggtcaagtttgaacctgttaaaatttcgcttaaggattgtttggcatgcagtggatgcgtcacatcagcagagacagttatgctggagaagcaaagtttggatgagtttctgaacaatattaattcaggaaaggccgtgattgtgtctctttctccccagtcaagggcttctattgcttttcattttggcatttctccaattcaggctttcaaaaagctgacaagattttttaaatccttgggagtgaaggcaatttttgatacaagttgtagtagagatttgacccttgtcgaatcttgtgtggagttcatcacaaggtatagacaaaatcaagtggttgaagatgagaggagtaaatcaagtctacctatgattgcatcagcttgcccaggttggatatgctatgctgaaaagcaacttggatcctttgttctaccttatatttcatcagtaaagagtccacagcaaacaattggagttatcataaagaactatttgtgccaagaattaggactcacgccagaagaagtttaccatgtcaccgtgatgccttgttatgacaaaaagcttgaggctgctagggatgactttgttttccaatttgagtcccatgctgaggggcgtgagagtgaaattaacatgatttcagaggtagattcagtattgacaactggagaagttttggaattgattcagtcaaaagaagttgattttaaaagcctagatgagactactctggacaaaatactaacaaatattaatgaagatggatacctttatggggtcagaggaagctcaggtggttatgcggaaacaattttccaatatgctgctaaaacactttttggaagacagattgatggccctttgaccttcaaaaacatcaggaattcagattttca

SEQ ID NO: 22189 - DNA, 458 bp, Glycine max
  unsure (1)..(458): unsure at all n locations
nnnnnnnnnnnnnnnnnnnnnnnnnnagaaataaaggggttaaattgaagggaaatgagaagtggatcacacactactactagtattagtaccatactctccagactacccttaatgccggtctcatttgggaagaggatgcttcctttcaacaagtgagtgatgataattacagggaaagggaaagacaattaaaaacaacaactagataatgaacttaaatttttaaggaaggttgttaagggtttcttctaatagtataagggaaggtgttggagctactgctctcttcatgttcatctgattcatgtgtaattccactggcgaccgatgaggaggaatcggtcttgttctgcgctaggaagtcataggaaaactcaccttaggagtggctctcctcccccattttttggcaccaattctcctcctcaaaaatatgcgacacagaacncaattat

SEQ ID NO: 22190 - DNA, 981 bp, Glycine max
acccggaacttgttattggtcattaaaagaatcctcttccattttctttaggtagacgtgtcaaacattcacaaatttccacatatcagcggttcagcacaagtgtacaactctagccaaagtgaattgagtgcctattacacaattatcaataaactgcaggtcttcatgaaaaggaccagcttaccaaaacatggggagggccaatgtatatctacattttagtggcattcacgtcatcaagtagatgactgatgactcttccaaactcatggactcatagtaggcccaatgttttcaacttgctgaccatgttcgggtgggaagagccgggggagaccaatccgatccagtcagctctccatcagcgtcttcaaccacatactcctttgttaacatcctttttgcaagtatgtgataatgacgttgccatatccgttgacctaccatggtagcaaccaatacactgtagaatatcccaattacagtaaaaagtcccagaacaatcaaagccataatgaataataatggtagccctgcttccccagcaccccccaaacaaccaccgaattcagttgccatggttccacaactctcaaagcatgtggtgcaatcagtccacatacaaagagtgcctggcaaatgacagtctgcacaaactccaggttgacagcaacaaagacatagttctctacaaggctgagctaaatcattgcgtactcttcgatcatagcaggtaatgaagcacccagaaaggccaagcaaggcgaaaaacaatagagctccacatatatagtaaaagctcatttcactatcaaaaccccagagaagacgaagccaatattgctggtaaccatctattagataaaccaaatatgccagtgaagcaatgacaagctggacagacagaaaaataaacaaaatatctctggtgacaaaaaaccgaaatttcagggtacgccatttcctatcagcggcaac

SEQ ID NO: 22191 - DNA, 146 bp, Glycine max
aggttactactgtctcaataaccatctggccctggtagctttttggggacgtaaaaaccattgtatacaggaaactcctatgaaccaatcgttttcatagggatatatgatcactaccctttgtcttctctcccccacctttttta

SEQ ID NO: 22192 - DNA, 444 bp, Glycine max
agacaacaattacgacaaaatatgcacatttaatactctgagctataaagagggaatcctaccataaaggctaactccaagataaaaattgttatcaatggtggcattcattacataataaagaagggtgtcgaaaggaaataaaaaatacataacatcgacaaccgagtctagctaagcaatgcgggagggatggagcaaaaagtgaggaagatgctgttccaaaacgaccactagctctctaccatgggtcacttcatccaaaaccctatttccaaccctcctagcggcttcaaccagttgtcccctaagccgttgtgaaaacaagcagccacctgtcttgacacactctctataaagtgggaggtaagcaattgccaccgtcagtggggccggaagatctcttaagcaaataggagactcaccccatttaatgattctcac

SEQ ID NO: 22193 - DNA, 497 bp, Glycine max
caattacgggagggcaaggcaatggccaccattctaccgccaagcaacgctcagtttgtttccttcaacgctcgccaccgctcttcctctcccactctcccaaggtggggatggagaaaagagcaagacgcaagcatagttgccaatagaacccgaggtcaagcatttcaagtcctggtagcttcaggaaaggaaggttcaaaagatgatgtggtcatggttgatcctgtggaagccaagagattggctgccaaacaaatggaaaaaattaaagcaaaagagaaactcaaggtgaaagcagtcttatgtttgaatttgaatcacatatttggggttattgtcttttattatagaagtatacaagaagtttgaaagtcattgtccttccccgaatccctgtaattgtcagtcaggacagaagcaaactgagcatactctaatgaaaccctgttcctcaattaactaaaaatttggccaacttaatgttgtgactgcag

SEQ ID NO: 22194 - DNA, 683 bp, Glycine max
tctacgcgtccggggtttatctatctattattctatctactattgggtcgttccatctcacaaaaacaagagagaaaaaaaaaagaaaaaagaaaatgaaaacgaaaacttcacgttcctgaaagagagagagagagaaagttaaggacttaaatggtttgtttcagttcgtgaattccattagatctcttgcatttgtaaacagttttgcggggtttttgctttgtacgcaacaagttgtacttttttttcctgtgtcggaaaatgagtttcatcggaaacttcgttacttgatcgaagtttggttcatcggatcgagttcgaatgctgttttttcaggagtgacaaaagaatctggtgtatttatgcttctggttattggatgagctgtatatgttttaactatggtgttgaagaagagagtagatcatggatttgatggcttacgagttcctgttatacctaaagctcctagatctgccagaaggagggttgctttcaacaaagcagttgaggatggtcaagtttgcgctattgaactatggcatctttagctggccaattgttgcaggagagtgaaagttctgcttccagcaatgcgtctgaaggaaatcatcagcctgccttcagccaaggtgtaattgagcaagatatacaagatgaagttaaaccattaaaaatgg

SEQ ID NO: 22195 - DNA, 652 bp, Glycine max
catgaaattgaaactgtgatcaaatattctccaacatatacgtcaaaaacattattcattactcagccacttgacttgaatgctgggggatgtgttggagctccatgagttatgtttagaattaagaattatgatattgcaggatttggaatatgaaagtgatgagacaaaaaatgtgctttaaatatatctctttaggggcatgagtgttaaaattaggcgaaggtggctgttagataaggagattttccttttggttaattggaaagctctatcagaaaaaagctactaatatacaggcaaagcatagactctttactaagaactagtgaaataatcatgctggatataatttctgagcatgaggagaaaatgaagataccaaagatgaacttcctgttgtttaataggaccctgctagtagaatagtatacagtgaaacaaaaaagaagaaatagagtatgagagttcttttttctcttactctctgatcttttactttgttttccttttattattactgattattgatatttgttttaagatatacactgtgctacagtttcaagtaggaccatagaaatgactcccatacttcattatcattagaaaaggaaaaaggtcaataaattcggtggttttgttctttcct

SEQ ID NO: 22196 - DNA, 1146 bp, Glycine max
ctagaagcgtttttgtcagagtgggcacttatgacacttctaaacccaacttttagtgtggagaatctgatatacattggttatcctggtgatccatcatctgctattcgtgtgactaggagccgtcgcgtgcttcgcaagaagcagcattcagacagacatgttttgcagtgctttgtttttgggcctaggaaggctggaaaatctgcattattgaattcttttattggaaggccatattctgaaagttacaatccaaccactgaagatcgttatgctgtaaatgtagttgatatttctatggaaaacagaaaatatctagtactgagagagattcctgaagatggagttaggaagctcctatccaataaggagtctttggcctcatgtgacattgcagtttttgttcatgacaggtctgatgaatcctcatggagaacatcgtccgaactcttggttgaaattgctagccatggagaagataccggctttgaggtgccttgcctgatagttgcagctaaagatgatctggattcatttccaatggctatacaagagtcaactagggttagtcaagatatgggagttgaggctcctatacctatcagtgtgaaattaggagatttcaacagtctgttccgtaaaattgtaacggctgctgagcatcctcatttaagcattccagaaactgaagctggaagaagccgcaagcagtaccacaggcttattaatcgatctcttatggctgtttcagttggagctgcggtggtcgtagttgggctggcagcttatagggtatatgctgcaaggaagaatgcgtctggttaaaagacagattttgtgaatggatcaatgtccattagtttgatctgaatgcagcctgctcctggctagatatgtcaagttcaacattcagttggtttttttatgccatctgttgtagagtttgctatttcatttttataaaatcactatttcatttttctttgtcgaggttgaattgaattagcataatttttttcttcttcaaattaccgtagtgttgactcttggcaaacataccaattcgtacaagtaatgttaagtttttactgttttaacacaaaagaaataataaaaaaaattaaataattattacataatttt

SEQ ID NO: 22197 - DNA, 427 bp, Glycine max
tagttgggctggcagcttatagggtatatgctgcaaggaagaatgcgtctggttaaaagacaggttttgtcaatggatcaatgtccattagtttgatatgaatgcagcttgctcctggctagatatgtcaagttcaacattcagttggtttttttatgccatctgttgtagagtttgattttttttttttaatagattcacagtatttaatttttctttgtcaaggttgaattgaattagcataatttttcccctcgaattaccgtttgtttcatctcgtttgtcaggggcttcgtggtataatatgcccaataatgagatattctatcaggtccagttaattactggaatctttgaaagaatgatagcatgctctctgtattgaagattgcaataaaatgagaaaaagggatatatattgatgtag

SEQ ID NO: 22198 - DNA, 966 bp, Glycine max
ttatcgcataaagtatcggtcctgccgttcatttatactagctagcaaaatatcttaacatccaaacatattagaacaaagcttaaaaataaattacagggtaataataaaacaaaaagtaaggagtcccctccacatccagccctacaaatgtacaattctgaactttgccaaccaagtaaacaacgaaacatcttcaaagggttaacttatcttaaggcgccagcaaagataataaaaattggaatctacagccttgaaaataaaccgagattttaaacctacagaattcagccccaccaaaacattcagctaactcttttcttgaatgcaagaagataggtaccaggaacttgagcttcaacatttctgccgatccaaagtaaactagtgcaacagctctataccaaacatgataacatttccacaaggtacccaaacatagtatatttatccccttttcaagaaacatgcttctaatcaacgtgatgtgctttaaaagctactttcaaataagatcgaaaaacaatgaagcaaaaaacactaacaaacaacctaaaggagactaggattgaggaaaagcaatttcaaacacaagccatcagccaatttgacagacaacctaaagaacactacccccaaaacaccattgtaaaaccaaaagaagaaaaaaaatgattcaagattatggatgatgaaatgttaactcttaactctaacaccctcttcccctcaatgcccaaaagatgtatagcattaaccagaaacaagttaatcctacgtacatgctatattctatttgagagcctatttcctcatttaatcatcactcctccaagacatatcaaacaacaaaacctaccctaacattacctcattctggatcagcatgatgttggattaaaaaaaacctacctcgtactaccttttagcacagtgataatgataatgcacatttcaaaagca

SEQ ID NO: 22199 - DNA, 727 bp, Glycine max
acaggcaaagaaaagtttaattaattctttctccaaattgtacactttgatttgatacagacaatagattgtaataaaggctgaaaaaatgaagggtgaaaaaagaacccaggaatttcttttagaacaaaaaatagaattggagcttctattagtatcaatcacctatggaatctggttaacaaatacacttgaatacatggagaattgttccatgtttttgagtgcaacctaagtacccctcttgctttttccttcaaataggaagcacaatctgcttgcaacaccatgcaaagctttgacacagcaccaaccctcagcatctcttgcacgacctcattggaggccgagaacttcgaaaccaaggaaaatatatgaagagctcgatcatcagtggttggtgaaaccctaaggatcctctttgaaaccacagcaatgcctgcagcatgttgcagaaactgttctctcccatcagcacaagaacaaagatgagccaagagaataaatatgagttctgtcatattcttttctggtttttcaagtgcaagttcaatgagttccaccactgcacctgcttcaactatcttcattctgtttctccccaaaggacaggtttctataagcacgtgcaatgcagatttaacagcttgctgagtgagttctctatttttcatcacactcacaacaactttaaagaattcaagcttcaagttccctaaaggggttg

SEQ ID NO: 22200 - DNA, 508 bp, Glycine max
ggcatgacatcgtgtcaattcatcaaacgcatgcaagtacaagcagtaagtacacgatcagccaatcctataaaaggatttgcaaattcaaaactgaacaaatctttcttagcgtcgcagtgggattaacagcggctaaacaaaaaagcactgaacattgcgctacagaatctttctgctatatggaaaggtagattctttagttcagtatgttctttttctttcattacaaattatagaaaaccgaacaattcaatcccaattgccatctgggataattcatattaatctttgagcgcacaacttggtactgaaaaacaaagataagggattcgggtcgtggaagaaatatcagttcttatgttttttttcgatgtcataaagcacacatgcatctgatgctgtcttcatctggataacatttataatttgcttggctgcccatccaaataaactagtacccattaggagagaaagtaatgatatcttttgtaaattacttgatata

SEQ ID NO: 22201 - DNA, 464 bp, Glycine max
ccacaccacgaaaaccctcagttttaagcgggagcgggggggaagttttacatacctgagaaaatagatggaactgtagcttttatgagcgctgctactaatactcttcacagagcatatggctctgtcatagtagtattattaatcaccagatgcaccaacagcaggctgccaacgaggaggcagcccctcagacaagcacctgagctgcagctagcctagcgatcgggaccctgaaaggggagcaagaaacgtattccaccccagtcttggcgaaaaaagcaaccgatgaaggctctccaccatgttctccacaaatgcccaccttcaagttaggcctagctttgcggcccctctctgtagcaagcttaaccagctcgcccactcctctctggtcgagaacctcgaaggggtcatgctggaggatgccctgagccacataaatggggatgaacttccccaca

SEQ ID NO: 22202 - DNA, 452 bp, Glycine max
gaaacaaaaaggaattcattagatttgaataaaagttataattttacatggcgaaattattgaaaattgaggggattgagtgacagcagcaaagttacattccaagaaggtcggttgggaagagagagcaatgtaataaagaccatcatagcatcgtctctctgagcaaagtaagcacagcagcaccgcttagcagttacagtgtccgttcccttcgtcgttggcaaaatggctgccggcacaactctatcaaaattgcaagtcacctatgcttccgctccctcgttcctctcgaatgcctcccttcctcctcccactcccgccggctgcggcgggggcgacggctcgtacctcgacggcctccgtttgaagtgccgctcgtcgtcgctagattcgtagtccgcgacggcgctgctgctcttcctcccttcgtagtacccgttcgacctggt

SEQ ID NO: 22203 - DNA, 571 bp, Glycine max
gcgcagatggaaacatgaatttaaaagaaaagaaaagaaaagcacacccatcgatctgctagttgttcccatttccacaatacatttttcttgtcaaaacaggatcgaaatagcaagcctaagtaaaggaaatgaacatggaaatccacaaaaaccgttacagtttcgagatcaaaggagcacaatctgccttcaattagtgaaagcatttattgccggccacccactgtgatccaccgttgttttatttaagtgagacttcactggtggatcaaacatcacataagatttctcactttaaatgtttatgaaaccaacctatcatgatttgatgagccttatctgcagcctctacagcttttggatctttagggtcgtacctcactgtccaaccgtgtgagacgttaggaaatatttttacataactatcaatctgaggtttagcctttagggcttgtctaaattgttctgcaagctttggaggaaaagcaactctgtcattctcagctccaagtatagcaattggaatctcaacaccaccggacgcgtggggttccgggaaacccccccc

SEQ ID NO: 22204 - DNA, 310 bp, Glycine max
tttgtttttggcttttttttttttttttaaaaaaaaagacaagcatttgggtcaatttaatttatcttcgatatacagcacagggtagtttcaaaattggcataatgcgaatgccttatgattatcaaatatccttgcaaatcagggaaaatcaacctacgctcgagctgtttttttattttccttgctgcctttcttgggagccctttttagtttcaagctgtttatggacaacacaccagaggcactttttccttcaagttttttggtcatctttacaacactagccataccttttcttgcagcaacc

SEQ ID NO: 22205 - DNA, 843 bp, Glycine max
cagcaagggatggcatagtccttctaaagaacacaaactcactcctcccactcccaaaaacaaaccccactattgccttaataggccccaatgccaatgcctcatcaaaagttttcctaggaaactattatgggcgtccttgcaatttggtgacactcttgcaaggctttgagggctatgctaaggacacggtttaccacccggggtgtgatgatggcccacaatgtgcttatgctcaaatagaaggggcagtggaagttgcaaaaaaaggtggattatgtggtgttggtcatggggttggatcagagtcaagagagggagtcacatgatagagagtacttagggctgccagggaagcaagaagagctcattaagagtgtggctagggctgctaagagacctgttgttgtggtgcttttgtgtggaggcccggttgatattacttcggctaagtttgatgataaggttggagggatcttgtgggctgggtacccgggtgaacttggaggagtggcactggcccaggttgtctttggtgatcataacccaggtggaaaactaccaattacttggtacccaaaagatttcatcaaagtaccaatgacagacatgaggatgagagcagatccagcatcaggctaccctgggagaacctacagattctacactggtccaaaggtctatgaatttggctacggcctaagctacacaaaatattcctacaagctcctctcactctcacacagcaccctccacatcaaccaatcatccacacatttaatgactcaaaattccgaaaccatacgctacaagctggtttcggagttggcggaagaaacatgc

SEQ ID NO: 22206 - DNA, 549 bp, Glycine max
ccgccgacgactcccaccacgcgtccccccacgcctccgcccacgcgtccgcccacgcgttcgcgacgtttgatcagcagcaaggctatggcccacctactggctatggcagtgggagtaacccggcacaggagggccacactgcaaactatgcagcacggggagattcagcccaagctccttctgcccaaccgactactgttgtgcaccaagggtatcctaccaatcaacagcccagttcaaacactgtcaattactcacttcaaggaactcctcagccaggttatggggttccccctacatcccaagcagcttatggcaatcaaccacagcctggttatggaacccctcaatctcaaaagccgactggcaatccacctgtttatggagagtcacaatttcctagtgctggaggaggctatgatcagtcagcatatcctgtgcagccccctccttctgggtatgctcaaccagagtcaggttctcagagagcaccagcatcttgttatggtggtgcagtgcaaccagggtacggtcatcaaatatatg

SEQ ID NO: 22207 - DNA, 495 bp, Glycine max
caaggacacaaatatgacaatgccggtctctataatgttgtgcacctgtctccaaaaagccctgcgtatgacctcctgtcaaagatgctcgaatatgatcctcgcaagcgtttaacagcagcacaagctctggagcatgagtgtttcaaaattgaaccattacctggtcgaaatgctcttgttccctgccaacttggagagataattgttaattatcccactcgtccagtggacactacaactgatcttgaagggacaaccaatctgccaccttcacaaacggtaaatgcagtttctggtagcatgcctggtcctcatgggtcaaatagatctgtgcctcgaccaaagaatgttgttagaatgcatagactgacccctcaagcaacggcagcttataatctctcatctgaagcagccatgggagatggaatgaatcctgcggatatctcatagcatcgaggtgttgcacaagcccatcagtcacatcagttgaga

SEQ ID NO: 22208 - DNA, 565 bp, Glycine max
ggatggggaaagtgttgtgtgtctggttgctctgacatccttgtaaatgatgctgacaaggtgcttgtagttggagataaggtgataggagaaggagaatggatctcactgaatggatctacaagtgaggtgatactgggaaagcagccactttctgctccggctctaagtgatgattaggaaattttcatgtcttggactgatgaaataaggcatgtgaaggttatggcgaatgctgacacacctgaagatgcagtaacagctagacaaaatggtgcccaaggaattggactttgcaggacagaacatatgttttttgcttcagacgagaggataaaggccgtgagaatgatgataatggcagttacaccggagcagaggatggctgcactggacctgttgctaccttatcaaagatcagattttgaggggatcttccgtgcaatggatggtctcccagtaacaatccgattgttagaccctccacttcatgaatttcttccagagggtgaccttgaacacattgtcagggaactaacttctgacacaggaatgaaagaagaag

SEQ ID NO: 22209 - DNA, 596 bp, Glycine max
gtgaagacccagatccagaagatgcaacctgatgctgatgggaaatatccatacactggctccgttgattgtgctgtcaaaaccttcaaagcaggtggaccgttcaaattttacaccggattccctgtctattgtgttaggattgctcctcatgtcatgatgacatggattttcctcaaccaggttcagaaattgcagaaatcctacgggttgtagtttgtagttctccgtggtaacttggatattttctgttgaattcaagctttttgagcatattgaataatttgttggctgggttgtagccctttttggcaactaaacaccaatggagctgatcatttttaagtttaattaatcatgcgactgaagcgagaatttgcatacaaacattgtattagtgatataatatagaattggatgcggctggagcagtttagtataattccattttagcatggatgtcattgagaaactagaataagtaaactcccgacatcaagttttgtaatttctttccatatttatttgttgcaagcttttcctttaaaaaaaaaaaaaaaggggcggcccccgcctagtgaccccgtcgacccggg

SEQ ID NO: 22210 - DNA, 589 bp, Glycine max
gtggatattgtggcatctttccaaaccagctatttcatttcaggacttgctccctttggtgatgctttggttgttctagcatatattcctggagaagaagatggagataaggattttagtagcaccgctcctttacggcagggcaatgcacaaagaccagaagtaagaatagtaacatggaataatgatgagctttctacagatgctcttccagtacatgggtttgagcattacagggcgaaggactattctcttgctcatgctcccttctcaggtagcagttatgctgggggtcagtgggctgcaggtgatgaaccactttactatattgtatctctgaaggatgtagttattgccaaaccaagggatactgaagatcatattgcatggcttcttcagcacgggtggcatgaaaaagctttggctgtggttgaatctggccagggacggagtgaactacttgatgaggtgggatctaggtaccttgatcatttgattgtggaaagaaaatacagggaagcagcatctttgtgtcccaagttgcttcgaggatcagcttcagcatgggagagatgggttttccactttg

SEQ ID NO: 22211 - DNA, 1027 bp, Glycine max
aaacctcgggaagcccttttttgaaacaataaaggggtaagttaattcgttaaataaaatcaagtcggggaaagaaaattttagaattacatgtagaaagctaactacatcctccacctcaaaaacacagactcctcgggaaaaactcggcctggcaagcaagtagaaagggaaacctacaacggaatactatcaaatccttttagcgtcttacaggcagtaactcactccagctttataccgtccatctcattgatcaccccttcaagcttgacaatctgacgcaaaaagtaatccccataacgtttggcaggcttagactccataacatgaattgtgtcatcatcaatatagaaatctaaatcggcattggatgtaattttcccatcactatcaacagcatgtgtcttgtgcttgtatgtcatcaagatagtccttaaggtgggttcatccacttccatgtaacttgcaagttttgtgagggagattgttgaatacactttcaagaaggtccggacacctgatagcaactgttgttgctttgcttcataaaggaacagtttcaactgaagtctataggcatcctgattgtaatttactagaggctcctcgaaactaggtgctgaaggggtaatgaacttggggcatgcatatgagaagagctcatcatagatagcaaatgcctcatcatcatacctctgcattctaaccatcttttcaccatacttctcacgtaactgagagttcacagtttcatcaacaagcctgctttgggggcagagtgaaaggctaattgccagtaaggcatacatttgttcatttttcttcagtatctgctcatattggggtgatttctgatgatactgctttgtcttaaagatgtacaagagaattttgttaaattcacgaattgcttccacatatctgcggagcatgagattggcgataccatagtgataaatggtggtgatgtgactcccaataacactggtataaaccccttgcctcgagccgaatcggctcgaga

SEQ ID NO: 22212 - DNA, 479 bp, Glycine max
aaacaattctatttatgatagcattttatatctgcggtaagaaataaatggaagggtcatataccagtttccagaccagagagagttcaagatacaaagtccatgaattcaaatggaaaattgaatcgatacagaattgagaaaaggaaaaaagaaaaaaataaactcagaaaattatttctttccttcaagctaggaaatttatgtcatgagaatcaagtatccagtcgtgtgttcttagaagcacttaaacaaacaacaccagtaacctaagtttatatggaacttcaattatttaatctattcctttgctagatgataccaaagtttgaaaatctcaggtcaatgtaaatgggggaagatgccaatttaaatgtaacaaaatactggttgaaattttaaacatggggggggggaggactgaagagcacctccacataaaacttttctcagctaatcttgagtaatatctgaatctt

SEQ ID NO: 22213 - DNA, 636 bp, Glycine max
  unsure (1)..(636): unsure at all n locations
aaacaaattcttttaatgataacaatctgctgtaagtaataaggggaatggttatatataccagcttccagaccacagagagcttaatatacaaagtccatgaatctaaattggaaattgtatcattaccagacttcaaaaaaaggaagaaaaaaatctcaaaaattatttcattccttcgagctcggtaatttgtcatgaaaagcaagtatccagttgtgttcttagaagcacttaaacaaacaacaccagtaacctaagtttgtatggaacttcaattatttaatctatttctttgctacgtgataccaaagtttgaaaaatctcaggtcaatggaaatgggggaagatgccaatttaaatgtaacaaaatagtggttgaaattttaaacataaaaggaagaaaaaaaaacaaaaaaaaggacaaaagagctcctccccagaaaacttttcagctaatcttgaataatatatctgaatcttgtccccatcatccccaacctttgaaagaaaaatatcagaaagaaataaggggggcaaagtaccaattagcaagaatgctgtgtcaatggatcaatcaatgttgtgcaanctccttggactcgaagcataaaaatgtgtttttgaaaattaaat

SEQ ID NO: 22214 - DNA, 370 bp, Glycine max
ttttttttcaattgaataacaaagtcattcaatttattattgttgcatccggtacgcgatcaaagacaacatgaattatgaatattgtcttacatgatatcaatacaagtttcacattagatagatcatttttttataaagcaatgaatgaccaacttcttatttcctagggtgcattcttactatagaattagaaactgtgagtagctgaaattcaagttgtagcaacttgaaaagctctcaagaaaacttcaggggcttgtccaccgctcaacttgtgagtcccattaatcacgttatatggaacccctgaaatgtttcctgaattattttttagttcctcctcaacctccttcaaaccattgttggg

SEQ ID NO: 22215 - DNA, 616 bp, Glycine max
caacagaaatatctgttgcaggaactggaatgggcaacacattcagatatgaacgtgaatcatcaattgtaaaactagtaaagcgtaatgctggtggcaggtcttcaagcttcccctcagtagaatcaacaagatcagtcaacgcattgtcatcaatatcaatgttaaactgacccagatcctcagctgtgttgccatatataaccaaacttagactgcgatagctgccccttacaactagatgactagtaacaacagcctctacttctagtacatttgacgaagagtgtgaatagagaaagggctgacaaagtcttctaaacctcgtctctccctcacagtgagcaaacacctctatcgcaaatgatggaggtgaagttgccccaacaagtgtcactgcttgagcaactgatgacgcactctgttccagaaactcacacgcggtgataacaatgggctccgaaaacataacctcgtcgacgtactcgtcgagatgcgggtgaacgaagttttgggcgaagaggacgcatggctcgggtcgacccatgaggacattgggatcgagagaaagaggaacatgcaaatttgaaattctagggtttatgttggcgcctct

SEQ ID NO: 22216 - DNA, 522 bp, Glycine max
tatatctaatcttgattattccatgtgttagctagcttctactacttaagtaacattttaatattttctctaatgtatttggtaggttaacatgggattaccctccacacaaaccagtactggctcaaagagacagccagagacatccatggccaagcccaatccacacaccgaagcccccgctgcacctgagccacccaaagctgtaaagcgagagggcaatcgcaagggaacaacatcaagctctgagcaggaagcacccaaaacaccagatcctaagacactgagaagacttgctcagaatagagaagcagcaaggaaaagcaggctcaggaaaaaggcgtacgttcagcaactagagtcgagtaggattaagcttaatcagatagaacaagagttacaacgtgctagagctcaaggcatattaatgggtggtggaaatgcacttctgggaggggagcaaggctttcatatggcaatgagtggcattagctcaaaggcttgaatatttgacgtggaata

SEQ ID NO: 22217 - DNA, 602 bp, Glycine max
  unsure (1)..(602): unsure at all n locations
tttttgnngacgggtctgncgntgttgaagttggaggaattgaagtgggtcaaggtctttggacaaaggtgaaacagatggctgcatatgctctgggtgctattcaatgtgatggaactgaaggtcttttggacaaagtacgggttgtgcaatctgatacggtgagcttgactcaaggaggcttcactgcagggagcactacatcagagtcaagctgcgaagcagttaggctttgctgtaatatcttggtagagaggctaaagcctcttaaggaaaagctgcaggaggaaatggactctatcaaatgggaggcccttattctccaggcatacacacaaccggtgaatttatcagcgtcttcattttatgtacccggtaacaattccattaggtacattaattatggtgctgcagtaagtgaggtggaaatagatcttctgactggagaaaccagatgtttgcagacagatattatctatgattgtggacagagtctcaacccagctgtggatttaggacagattgaaggatcttttatccaagggttgggtttttttcatgcttgaagaatatgaaacaaatcttgacggtttgatcttggt

SEQ ID NO: 22218 - DNA, 771 bp, Glycine max
cagtaactcatgttgattatcatgaagtcttgaaattatgtttgtaaattttttttttaacaaaatcaaagtaataacattagtagatcccaagaattgttttcttctacataaaatggttctataaaaactatcaacctttttccattccaaatagctcaggaaagatttgagaaacctacacagatctactagcaacatcaccaaaatcaacaaattgatcacatgagagtgcgacaatagaaatcttaaccctgtgaatctggcctactcattctggtactcagatgcacttagatattcaccatgctcctcaaaatactcaatcaatcgctttagaaatccgtcaccactgactgtctctgtgtcacagacaagacagcattgccttctggaccgtgtcacagccacattcattcgccggcgatcactcagaaagccaacctctttttttgaatttgatcgaaccattgatataataatggcttccttctcccttccctggaatccatcaactgttgagatttcaacatccttcagctggtcctccttgtttttcaacatcttgagtaaaacaacctgtgcagcatacggagtaataattccaatatcagaaggaagcaccccactttgcactagtctctttgcgtgagtcacggtaacctcagcttcaccttcattaaaggtgctatcttcttcatctttcttttcttccatgtcacatctgaatctcatcaatataagcagtttgatcacattctgtttggaaac

SEQ ID NO: 22219 - DNA, 523 bp, Glycine max
ggtaaaagaatgggtaacgtgtatagtatacaacaatccccaactgcagttggataaatgcatatagtaagacgataagcatcatatatagatacaatccaaaactgctaggcacaagataaaattacatacaaatttttgtgatcttcaactggacagtgaagcatctaaaacaacaatactagaaagttgattcatttcatcccatgtttggaaagattcccgagaagtttggtatcttatcaacatgcttgagggcacgctcagctgtctgccgagttcgatagtcaccatgctggaaagcatccacaagtgcagtactcacattttggtccccagaaacttcataggctatatcatctgttctcaataatctctccactgcccaaactgccctcctcctcaatgtttctgttcttttctcaagtagcacatccagtataggcttcactccctctgcttcacacaaaatcgccactccttgctcaatatctaccccatcttctattaaagtagataaagc

SEQ ID NO: 22220 - DNA, 512 bp, Glycine max
ttggggatggatataccaagttactaacattagatgaacgttatagatacaaaattttccattctaatacgtggtacttttaacaaaactgttaattcaacatgctgcacaactttataaacatgaaaattaactaatgtacaactcatcctaaaaggcaaaggtgccctcagaatagtgaaaatgtttatatttcagtgtctatgatgagctcagctgcagcatccattgtacctactccaccaacacccaacaaagcaagagcaagctcctcttcgttcaactgcctcaacccattgctcagtctcttcaacacgtgcacatcaacttccagcacccagttaggtgtgcaacctaccatcaagctcacaaaacctgacacataggcacgccaagtagctgaatcacatcctagtgatatcttaccatcaagtgcacttgccagaaactccatgtgggtacctaaaaccttcggacgtcgctttgaagctgatgatgatgaatcaaccccc

SEQ ID NO: 22221 - DNA, 998 bp, Glycine max
cggcggccgccctttttttttttttttttttttttttttttttttttttttttttggtgtgataaaaacaggaaaggattattatttaatgggatgctcaagcttggcccccatcaaagattagacaaagtttaaaaacacgttcaatcccttttgctcggctgctagctatcatgtccacagaaatccatatactagtatgtcaatagagattgtaaagtaatcatcacaatatcacatgctatttgctacggcctacgggaaagctcgggcgagcaaacttgcttggtgagtaatgctgactcgcataagtagtccattacttcacttgacaaggagtttcggatcaatgtcttttgttttgcgtgataacacgaatgcagatcaacttgcacactacttcaaaacgtgaatgataataacccaataaatcagtggatgaacttactttaacttcctgagccatgagggcttaaatatacagtaatacagggtattgccagttgcatgaagcctgcaagtatgtacttagaagtttattgtttttcttcaatcaatgcttgaacacttggtattggcatgagcatctactttgttgggcatatcatgctattctatgaagagtgaagatccatttcctaactttcttctcccccctcttgatatacctcttccaattttgatcttagaacaggcttgcaacttgcaagacaaaatttagtttgtacagcttcatctcgaccaaagaatataaaaaagaaaactacaaggaatcacttttgtcacaaaccaaagctatctaaacagtcgcaatgatgcatgtgaaaaagaaaacagaatcaggtgtaagaggagaaatcaagcaatgctgaattcccaattttacacattcaaaccagtcttaaacatgtgaaataagttcatttgtgattgcttgtcactagtcagtaaaattgtaaatgaagttcaaaacaaagcttagaccaatcttgtctgag

SEQ ID NO: 22222 - DNA, 244 bp, Glycine max
aataaaattggaagaaggaaaaaagaatctaattacaaatttttatagtttaaggacataattattttttaaatgaaagatcatcaaggagctactaatgtattattatcctataaaataataatataatttgttggtgtgataaaaacaggaaaggataattatttaatgggatgctcaagcttgtcccccatcaaagataagacaaagtttaaaaacaagttcaatcccttctgctaggctg

SEQ ID NO: 22223 - DNA, 607 bp, Glycine max
gggtaaaggacatgtgaattgcatatatttaccgggacgtattacatttgaacatcatctatgcacgggacagttgattggaaaatttcaatcaacaatcattccaagcaacatcagtacatatactgatgtatagttccaatggaggggaaaaaattgaacagaagaaaatccatgtatagttcctaatcccgagtgagataacatatcaggaatttgaacacactaattaactagtcaaacctttaaaccaagctcctcgttgctcaccatttgaacttggcacaagcacacgactcatcaaagaaggaaaaaaaacattaatcatgccaagtgcctatgcaaacaaattgccgtccggatctcagatgcctcaatgctacagattctcttagagaccaaaacaagaggctatggatgctccatgttttctgttgcaaaaggtaaaaacagtttctcttctgatgtggcaatggctctcagaactcttgggcattgaagtctggtgtcgttggatactcaaggccctgaagtaccggcatccttcgtatatcttcttctgaataagcagggatgaaccagtatcccttgtccatcccaaaaacct

SEQ ID NO: 22224 - DNA, 505 bp, Glycine max
agcagaaagttttatgttatttcatgtacacctcaaatacaaaatcgtgcatagctccgatttcttaacatcaaattcagatacaagcacatacgattgtgatttgtgagggatttctattgcacaaagaaataattccctcgccaaaagacttggggtaatcaaaagtgaaaaactatagaactaacctcaaaaacttcataacagtgtctccgaagaactgtcagcggcaggaaagactattatagtattattaacaggtaattttaatgaaaaccaacttcaagtgtaaaagaacctgtacggctgtactgaaaggtgtatcgtgacttcagcttaaaaaaatgggtaaggttaatgaaaactgacttaaagacctgtactaaatggtgtatcaagacttcagttaataaaaatctgaatcaaatgcttaatccaattggctactcttccatcacgctggcaccaagtataaaagtcacagaagaacaattgcagcatgtgg

SEQ ID NO: 22225 - DNA, 482 bp, Glycine max
aaatcaccagtgtagtgtctatgtttgagtatttccgtgttaataagcgaatgctacttttatcccgtagtgcattctcctagctatttgcttctcgttaatcaaacactacaatctgaaacgacggtgcacataaaaggagtatcaaccttttctacatcaatagttacacatgtaaatgttgcaagcaatcttaactgcccatatttagcctaaatggtagcaagcaatcttatcaattttaggcttcgtgggagagggcagagacaaggctgttttgaaccggcataaataacagattttcctttgtaaataaaaagcgtacataattgcagagcatctttattccacatgcagaacaatcgccacattgacagggaaatggcagaacatccttccagtccaaagaaatgcctggaaaatcttaagcagacttcttttccttgtatcttttggcagcaactatgtacacaaacatattt

SEQ ID NO: 22226 - DNA, 440 bp, Glycine max
gcttctaattcctgtctgtatagaccttcgaaacatttgaagttttttacaattcttaatttctatatgactgagagagttaaagtaaaaaggtaatcattcaagaattctctcccaccttcacatcaaagccatgtaaaatatattaatgtacatttggctgaatcctctgaacactagggtctagggattagatggggttccattgtaactttggggtagattaatcaatggcgaatggcaacatatgtacattatattacctgacaagtctactgctccattctataaatgtaaatagattttgctccatgctgcaatcaaccattttttttcctgctgatgaattggcaagccatccgagcaacaaggcactagttaatgtatctaaaatatctctgaaaacattcatcgtccttgcaacttttgtatataacttt

SEQ ID NO: 22227 - DNA, 720 bp, Glycine max
tgtcctatgaacataagtctaatattcttcactatagattattttattacatgaggtaagtgctcacaaatatgtcatgatacagtataaaaaaaacaataacaaaaaaaaaaagaaacattagatacaaacctctgatcagtaatttaaaaagtaagaaatgaaattaattcataattaaattacgcaataataatggaaataatgccacggtaagagcaagagagcctgttacaagatagtgctgcctgatgtttaatctcacaagctgtgtggtctattaaggctgtaagcatgtcataggttgcagtttctgaatttgttgacacattatgcattagttccaccttcaaccaactgttgaaaccttgaaatgtcacatcttcacaacttttttcactttttttttctttctcaaagacttcttctatgcaatggaatggatttcttttggttagattccaaaagcaatatcagcaagctatttcctattagcttgaaataagttgaaaatgtcccactttcaagccttttaactcaattcaactcagtgagcagtgctctcctttctgcagcttttttcctgataaatatgccccaccttaaagcagctttgagcttaagccacccaacaacagccttccctgaagactttccctgatcctcgttgaatgtctgatacatctgaggctcatactgaaggctataggtgtaacaacc

SEQ ID NO: 22228 - DNA, 556 bp, Glycine max
agtcggggccgccctttttttttttttttgaaccaataatggcttttgaagagcattcattaacagccggacaaggtatttaaaaattactcgagcttctatcagaacctaataaaaactataattaaaccggaaaaaaaaaaaccgtaatccgcatttatacatgaattggacgtgcgtgccaatcagaagctctcatataattacaattatattataattatgaacaaagtgaaaaataccctcaatagtctctcagtaaagttcaataccagccagatcactaattaaacatcaagaaaactatcactcaattacagtattgcaaatgcatgatctggcccgaatatatatgggggactaaaaattgcaaggtggtcctcaagtggaagcgaagtgatgaactacattttgctcttaacaaaacattacaattacttccacgctcaactgcactggctgccaataaatttctatgaaaaggaatagtacattctacagcacaatcctatgcaaaaggatttccccggatcgaatcaactgcggacgcgtgggc

SEQ ID NO: 22229 - DNA, 437 bp, Glycine max
tttttgaaattattaaggggccgtctttcaattgacaacttcagaatggaacaatgtttaataatttggaatctgaaaattgtttttgtttcagacgttccttaatgtcattgcaacaacaaccacaaatttccctccctagatctcttatctctcactatgattacattgatgccttctgtcaataaataagaaagaaaaaaaaggcaaaatagtggtgaaacaccaccccaatctacgtccaattaaaggaagcaaggttgatcagggaaaatagccccttaataatccatgccacccatgccaccacccatggcaggaacatctttatcgtccttcgggagttcagacacaacagcttcagttggtgtcatcagagatgacacactggctgcatcaaccaaggcggtcctaataaccggctcgagcggctcgag

SEQ ID NO: 22230 - DNA, 501 bp, Glycine max
ttgctgtttttctctgggccaccatttaggtttattttctgttatgtcaatcatcagtctttttctctgttcaacttgttcctggttgctttgataaattgcgaagttcttaaaatatcatggagaatgatgaaatggttattgtaatagtaactgtctgtatcacttggattgttccttgtcactaagacattagccagattcatggaagctaattttttgacaatggccgttgctatgccatcattatctagtccatacaactctacccacatatcaacaagagcagcaaccggaattctttggccttcaggaaataaagctaagtccatgaagcactctttgatgatgtgattatcttccaagaaatctaagaacttttgggggggaggaattaattcaatggtagaatcaagtatagtatggacatgtgaaaattcctccaccatcttttgccacatctcataagaacgattacttagtgatctacccatcacttta

SEQ ID NO: 22231 - DNA, 662 bp, Glycine max
aaaaggtcaaaagtttaatgtaatctcactaaccaagttgcaatattacaacattgatcctcagcaattacagaatcctacctagctcatattaacaaggttaaaatattctttgagaaaatcatgtacgagaatttataagtgaactaaaacattaaaataaatgctacgctaagctagaaattggcatgttttgcaggcagaaataatttttctacatgatttccgggtcaactatcctacatatatatcatgatcaaagagagaggcattgaaagcataagcgaccactattctgcatgttcaaatgggacacgaacaaacaactgcccatgcagtgtcaccaccgcagacgtctgatgaggatcaattcttgagggcaagctgacaacctttttgaaaggtgtcacaccccaaaggattgttgggatgctcaggctccccacttatgactaggcgtcctgcagggtctgactgtacacggacctcttcccgcagtaggccaggaactaaagcatatacctcaaaacaatctttctgcacagaagagttttcattgaaataaggaattacatatatgactcatttatttgaacaagatagagaacttacagttttttgtacattcacttttacccaatcagcaggaggcccaatctcgt

SEQ ID NO: 22232 - DNA, 581 bp, Glycine max
ccaaaagaatatagaggtaatgatgaggaaagaattatggtggacatagaggaaatgtacataatgttatggccataagtaaatttgtacacggcagtatgtagtttgtagtttgtaatttgtaattacaaacgtagtagtcaacctccaagaccaattgttttgatagatgccctttaactaattacttgctagccgcggccactcaactgtaataaccaacattcaatcagcggtgcttcatatatcatatgcactagatgagccaggttcatgcttgtcatgtctaattattcatttcatcactcatctgtagtaactgcaagagcataaacatttaacagcagtgaagagagtttaatttcagattgacaacccagcatgtggctatgatgatgcaacaatacttgtcagatgtgtatctattgaggtccaataatgagaaacttgggtagcatttgtcaatattctttaactctgacaaatgctaattattggctgtcgggtgggcgcttggcatgttggaaatgggaggtttgtccatctttcttggtgatctacttatcaaggctgtctttatt

SEQ ID NO: 22233 - DNA, 411 bp, Glycine max
attaaataatcatttttattaagtaccaccatttgacaccaaagataaaaaaagacacggtagtgaattacatgatttctaataccaccgtttgaccctatcggtgtggagtacatgagatagattattgtacctctcaagaaagcacattacaaggtaggcgtacgagcccgtctgtgacctgtgagttctgaactcatagttcagctgcagcatcatatgtgcagcagcagctacattagagagagatctgcagacagaaaagatgtaagtcaagtagggatgagagctaacatctgcgttttgattcttcccatgcacatttgaatttctctataaataggaaggttttgagaacagcatggatgcagactggtaacggcagaatctaatatctgagccacatcagct

SEQ ID NO: 22234 - DNA, 537 bp, Glycine max
ccagctcaaatggtaaatctcattcataaaatatggttgaatctcgtgtctacataaaaaattccacatattaaaggaatatcatacacgatccatcatatatatgcccatattttttgttttttggggcatttgggatttctttctctctcataccatgagtattacgaagtactaatactatctaatctatgggggctgtcatttaatacatgaatattccctctcatcactaaatcaatataatttattgaattattctctaacctccactatacaaaccttatccaacgaacatgcgtttaaggaactatatatgctacaagagagctcatatgaattgggggtggaccaggtgagagtaacccattctttgtcaactttctcaacaaaggaatgtgcctttgggattgcatcaaattggagtttgttgctttgcttcgttaacttctttacaaagtccatcgagaatatcaagtcaaagttttcttccgaatcagtgattttaggcgaaatttgtatcccaatcttggcttc

SEQ ID NO: 22235 - DNA, 765 bp, Glycine max
gttgtgtgtgcgaaggagaaaataaccgatcaattagttaatttagttaaagatccagatacactcaggacctgtcgtcgtgtttgaagtaagtcaaccatttctgtatctacgatgtgcacacgattcacaatcagtggagacaattacagtatcaagactgaagaccaattatcaagaggattgattggtttggtgcggacttgggagagattagggcttttaagcaacattgatacagacacaagagccagacctgcttacatgctttcctgggaatcaaacaaaccacactttactcataattctctcctagaagagaaagatataggatgcctctattactctcttctctcttcaacaatgacaattttcccactaacttggctctgaatgttcctcattgtcacctagaaccggctttatcagctgcaggaactttttcaggataactggatgcatccaagtcgataagtgtcatatcgtatggcacagacaaagaatttgacacatccacaagtaaggaagatttcattgcaccagaatgtggaacatcagagatgggatcagaatttgaggggctgctactatttgaaggaaaatttgagagttgaacgtcatctgtcttgtttccaaacaaatgcttatttcttctcaccgtgtccatctcagggccaattggaacaaaagttcgtgacctatacttcctagttccctcttcaccttcaccaccatggttgtagagaacataatcatggtatgttg

SEQ ID NO: 22236 - DNA, 602 bp, Glycine max
ttttaaacataaacacttaataatctcatattataaacaacttatttacccatacacagcagaataaagaaaagaggctttctttgttacaaagtaacaaaaacaaaataaaaaggggtcgaaaaaagatgcctactcatctgatgattccacatagccaactttaagaagcaagcagcttcaactatatgaaacatgatcaaagaactgtaagaactcgttatcttttacaaatgaggcatacatcaatcataaactacttgaaaaaatggttgcaaccctatcaccaggcactacttcatcaatgggattgtagcttgcgagtcaatgataaaaaggtttcatggttttaaggttcctatgagctgtatagtcatgattgtgcaggtggacagcagagacctagactattagcaaaggtagcattgctggtgtagttatctctattaatccaaaaacccatttacaatgctcaataatgaattcaacttcttgcatgctcaggaatgagacgtcgccgcaactcatcaggtgcacctgccagttcttgagcagtgaaatcgaacaatggaggcaatgattgcccatttggcaagcatgca

SEQ ID NO: 22237 - DNA, 511 bp, Glycine max
ttttttttttttttttaatcaattcaaattaaaggattttatattaccaggtataaataatcaaactgtgtatgatccatagtttcttacaacttattgccaaattggagggatttattcgaaagacaacctaattttaaataaaatatgaccatataactataagcaacttctctaccaatttaagactgctttctgtatccaatatcctctccttcctataagactttttgtttcttcttttctgtatcctacttcttggtctttcgattcttcttcggtcccggaacctccaacctaccaacagaacagccacaccttcctctgaggacaagaacagcccttccattggggggtgccatcttcttaagctcggcctcgagttcgcggtgatgatcacaaaaaaccttaaacagtcccttcttaactccaccatccttagttaatgaaggggaattcttcacacaatcctcagtctccaactgaatgtcaaacgttgcagccttcctga

SEQ ID NO: 22238 - DNA, 770 bp, Glycine max
gcgagtgaaagtggattagtgattaattgattcggtaaaatatactgactacaattggtacatacaaaacacgaattcctccacctgacctacatttaaaatctaatttgctatagctacatcttgtcaatttggcattgattaatctagtcatagaaacgccatgacccaccacaccagttatgtaactaactggaaaacaaaaacaaaaatcaaatgtgcaatgaatgcttgcttagcagcacctacaccagtctcctcatttgaagggcttctatggcgatgggttcccatttgcaacaccatcactattatcaaccatggtaacatcttccacgttgttatatccagttacattatcaacagttgtagcttccttgattttatgtggcatgtcgtcctctgtttgttcaggcatatcagtgtccatagtctgctgcccactttgcaccccatctgtatgtgctgatggttctacatgactcaaataggccccattttgatcaagactgatgtctcaacttttcctgatacagtctgtctatgatactacccatctcctcaatgccactgacaagatgtaaatgatgccccggtccaggatcttcaacatgtcgctcagtatatgatgtaatctcattcacattaagggcaaggtggtccgcgcgcttaagaagcagctgaaatgtacgttgcagctcatagcattgttcaaaaagggaacgacggcaaaagacatataaaccaagccgagcacgtgacattgcaac

SEQ ID NO: 22239 - DNA, 641 bp, Glycine max
aagcgagtaaaagtggactagtgattaattgattcgaaaaaatatactgactacaattgctatagctacatcaataagccatcccatataccgactacaattgttacatacaaaacatgaattcctccacctggccttccacatgaaaaatctaatttgctaattgctatatagctacatcttgtcaatttggcattgatttatctagtcatagaaatgccatgacctacggatatgtaactggaaaacaaaaaaaaaaaaacaaatgtgcaaggaatgcttagcagcacctacaccagtctcctcatttgaagggcttctatggcgatgggttcccatttgcaacaccatcaccattatcaaccatggtaacatcttccatgctgttttcaggtggcatatctacagcgacatggttatcaacagttgtagcttcctctgtttgttcaggcatatcagtgtccatagtctgctgcccactttgcacccaatctgtatttgctgatggttctaaatgactaaaataagccccattttgatcaaactgatgtctcaacttttcctgatacagtctgtctatgatactacccatctcctcaatgccactgacaaaatgtaaatgatgccccggtccaggatct

SEQ ID NO: 22240 - DNA, 537 bp, Glycine max
  unsure (1)..(537): unsure at all n locations
gctcaactctttgctcagcatcgtcctagaagagttcgatcgttagttctatcaaacacatttttggagacacgaagtttctctgctgcaatgccatgggcgcncattgttagttggactccttcttttttgctgaagcggtatgtcttaacaggaattcgtgatggtccccatgaaccgtttattgcagattcagtggactttgttgtttctcaggtagaaaccctctctagagaagacttggcctctaggttgtctctgacaactgatgctgcttcagtgggaccacttcttctttcagtttcatttatcactataatggatactaatgactactgtgcaattcctcaacaacttaaagatcaactgggtgaaaggtatcccgaggcaaggcgtgcatatttgaaaacagggggagattttccttttctttcaagaccagatgaagttaacttgcatcttcagttgcaccttaggcgtgttggtgtggaacctcggccagatttggttcacaacatacctaaaggtgatattgga

SEQ ID NO: 22241 - DNA, 481 bp, Glycine max
cccacgcgtccgcccacgcgtccgcgggactcaggtccaggtttatgaattgggcttctccgacatgtccaaggtttatgtcttccgcggctccaaggagattcccgcagaacagattctcgatcagcttggtctttctgcttccggaaggagacctcacaagggtgctgctcccggtgtcgccggtgccggtggattccccaattcaggcatcacgcgcttccttttgcctgcttctgagtgtgaatatactctcaatgcgctgctggatgaattgcagacggatcaatggccggttccgcctgggcgccgccctgcacgctgcaccggagttgctttgagtgttgccgcagggttgctgagtgcttgcaatcctgggactggtgctagaatcgtagctttggttggtgggccatgcacggaaggacctggcgcgattgtgtcaaaagatttatctgacccagtgcgttctcataaagat

SEQ ID NO: 22242 - DNA, 413 bp, Glycine max
gggtcgtgtaaatacatggtttctgatctgggtttgatttaagttgggggtttctgggtttgtgattgaaatggcttatttccgtagctcaatctccctctgcaactcctccgttgaccaatacatggcgaattccctcgatttcgagccgaaatcgaggcacaggaaaacccccaattccctccagtctccgccgtgtcggcgatcccggtcggcggtggttgacgttgtgatttttgcagcagttatcgcggcttttgggttcttgttgttcccctatgctcaaattttggctagtgagagtgtcaaatttggaattttgattgtgaatctggtcaaagaggacgttacttttaccccttggatttatatgttcataggtgttagtgttacctttgcagcattgactactt

SEQ ID NO: 22243 - DNA, 371 bp, Glycine max
actaaatcaaatatctccctctagcccacatggtttttaataaataaaaaataacatacccccgggggaatcacgttgtacaaagtcaaaagaatagcctaggaaaagcccaaacttatcttgattcaaaaacccaatttttgccatcccaacttctataacagggggaataaaacgagctactatgatttacaattttacaaatcataccgaccctttcaaagttgacatactttaacttagaccccatgggcagaagcaatattaaaattttaattggagctgccctggacctctctttgatgatgatcttgaaggaggaacattaacttcaatagactgaggttttcttggttcttcctctttttggg

SEQ ID NO: 22244 - DNA, 583 bp, Glycine max
tcccagcatagtagtttagcagtatcctcaatctgccgttgctcctcctcaagctcatcttcaggacgttgccatgcttggaagctattcttccagttgataggaggaccagaaagtatccagtaaccaccaggtctaagaacccggtcaacttccttcatgtactttccatcatttgcaccccattgaatcaagcagcgagaacaatgtgccatgtcaaaagctccagaagggaagggcagcattattgttccaagaacaccaatgattgctggaacacctctttccaaagcaaattgaacttgagcttcatgagagtcccttggggcaattgacattgcaacaacatttttcttaaacaggtatgcaccaaaactagcaaccccacaaccagtatccaatgcagttctaaccatcccattgtccaatggaataacagatgcaagttcatcaatataagcatcagctcccttgggaaactgcgttccaccacctgggaacctgaaaacatttccttcatattgtatccaattctgcacagccttctcaactgtcaagctcttgtaaggcgcatttgcataag

SEQ ID NO: 22245 - DNA, 709 bp, Glycine max
  unsure (1)..(709): unsure at all n locations
gatcctctagagcggccgctnnnnnnnnnnnnnnnntttttttttttttcgacacacaaacaaagtccgaccaccatttctacaatcgaagtataatgtacaataatccaatttctttttctttttggactacacaatgtgcacctgttggaaataaacactcaacctatatttgccaaattgctcacactaagtgggataaaattgaacaaaaaactgcacgcttcaagaaataaaaccaaaaactcattcttgaagaaaccaatccaacaaaatttaagaaacctgacctgaatactattagccaagacatgattggtgccaaggctaaatacccaaattcccatcactgaagaaaaaattaaataaaacaacataaatgagaaacttatactcttcttgctcaaagtggccacttggtatcaatcagaatcacttgagctcgagctggagctggaactggaactagatttcctactgtgggatttttcctcgttacccgagctgctattaggtacatcttccgatttatccactgtggttctgctcatttcctcagaactggttgctacatcaaagaattcattcaccttggctgagccaacttcattctcttctactttgactgaagtgtcttttgaatccaaagaatttggcaactcccctttattaccttcagagacttggtttaaagcaatgttaatatctt

SEQ ID NO: 22246 - DNA, 403 bp, Glycine max
ttctaatttgttatcatggagtgttaaacaattgagcggggacaaattttcaatctcaataaaataataaccaagtcttattcaccaggtacatcccaggcataagttaatatgcatattgtggctctatttaaaaacaaacttctagtaacaaaaccatttattatatttttttaatgatttttcaatagaacaaattttcacccgcatttgagatgcctatgcaacataatttcaatcctcaatgatgtttttacttggtggcctgtgcgattatattactcaatgagctggcttcctctttggcagcttctactaaatcctcctgcaactcattaccataagatcagaattttgtgaaacacaaggttaattataaaatatgaggattaaaataagatgc

SEQ ID NO: 22247 - DNA, 461 bp, Glycine max
gagtacagagtttttgaagaatggagtaaaatgaagcacataacaattgtgaacacgatggacaggtccactgaagtttccctttccaatccaccatcctctgaagattcccacatatatgcatgccacgatcaaataaattctcctcattttgatgcgcccaaccattcaaattcaattcctataatataaattctaattagtcgcatcgaatatgtttccacagacaagctcggcggtgattgggtggggagaccgttgaggaagtggtgggtggcaccaatttcgagcgttggtttgggttcagcactcaaggtggaatcaatggtggcagacgacggagcaagcgtggtgggtggacttggagttgcgccggctgattcccttttgtgcacaaaaattggcactcccttttgggctgccgaaacacgatgccgtaatgtttttcgagaggatgttaa

SEQ ID NO: 22248 - DNA, 478 bp, Glycine max
aaaaaaaaatacataaaaagtatttccatttcatttggcacagtttctgttcttttgtccgtccccccgcccatgtcatcctctttatccctttcgtgttccacagaaaagctaggggggaagaggtgaccagggacaacagagtcaactgtcatatataccatactattacagtgtgtgatccaactctctagtcatcacatttcaccagaatttgtctcacttttttttttctttctcaatatcaaagactggatgctttcactatttcttctcctacttgaaagaaacactaatttactgatcatcctaactaaatgagcacgtgtaaactaaagccagtgaaaaataatcttttctagaagactgccttagcccatttgattcttcttcttcttcacctcatacgcactgccttggccggaacttttcattcgacaacaatgagctgattaatgtttcaagcctcttggaacct

SEQ ID NO: 22249 - DNA, 458 bp, Glycine max
ttacgtcctaaattcatacaatattatacaatcaaatcgttttcaaaatacaaatcgcagatgaagatgttacaagaactaagtgttgtacttcggccccgcgaaacttccactatgcgccaagcttaaaacaaggcgcaactttgtccaacaaacgctcataagtggatacacagcaccaaatccgtgtgtgtatgcttgacaaaaaaaagcagaatcagtaacttcatacttccctgccttgaggaccttttttcgcttctgttcacctatgaattcggaactgtaacgttttacctccataattaacaattttaacccacatcttcgactcttccgggtgcaaacatatctttcacaacttcctttctcctgcgagttctgacatgaaatgctcagccagcttggccttgtttagctatccaaagttaacccattatcattctcatctggtggat

SEQ ID NO: 22250 - DNA, 377 bp, Glycine max
cccacgcgtccgaaactcttcaagaaaatattaccaaactcttcaagaaaggaaaagtgaaattctaggtttcagaaatttcagttccaatttcaattttcgtttttctcagatccgatttccaatttttcccactcaatctcattttccacgcgaatgaaactcaaagaaaacctcgccatttccaattttccaattttcacttcgtgatttccgtttcctaagtgaatgaaagaaacgacaatgttgcgtttggagcaggaaaagatccgcaaacgaatttgattcccaattcgttcttcgaatttttgattgccatggccgacgctctctcggtgattccggccgccgtgcttcgcaaccttgccgacaagctc

SEQ ID NO: 22251 - DNA, 512 bp, Glycine max
cgagaacttcttatcagcctgaaccagctgttgatatgaaacagagatgtgttggccactgcaatattgggactgacataaaacaagccagttttcttggtcaaagaggtgaatatgttgctagtggaagtgatgatggcagatggtttatttgggaaaagtgtacgggcagactaataaaaatgctgagtggtgatgaatctgttgtaaattgtgtacaatgccatccatttgattttgttgttgcaaccagtgggattgatagcacaataaagatctggactccaactgctcctgttccatcttctgtagctggtggttcagcaggaccagaacactggcgatgtgttggttgctatggagagcaatcaacaaaaactatctcgtagccataattctatcttgccatttttggaaccgtttagaatgcaggagtttcctgaagggccattacgcttgcgtccgtttgaatgtgctcaaagctaaagggtgctctattcggttgtgtgcat

SEQ ID NO: 22252 - DNA, 701 bp, Glycine max
gtgcattggtccttagatttttgaaagatcgaattgcagctctaggggtgcttgaggttggatttcaagcttctgcctggatccctgtaggaatgcagataggggatgaagtagaagttaaggtggaagaagcacatccacgtgatgatattctatttctgaaggaggttgtaaaagagtgatgagctaagataggattttgaataggctttatcattgttcaacgatttattcaatagggtaaacatctttccgcatcccaaatccactcaatttggctggtaggatgcagcctccttcctggtctattgcatggaagagagatcacactttcactggcagaatttcatcatttgaaacattgttaagtggttcaaatcaaatcttgaagtgtcatttctggcagagaagttcatggatgtaatagccaacaagtgtacagtccttcaaacattttctccaaccatagtcacatgaggtctatcggttttgttcctcacttgagcaagtaattttgcccattcacctgatttggtgtagtagtagtagtatatggttggccttacaattcatatgaagatctaagtgagctttcattgtaatatcacattcttcgtgcaataacatccgaaaatctagagtttcagtactgcgggtgattacgcggaagagacatttttacatgatatacgcttacaccc

SEQ ID NO: 22253 - DNA, 318 bp, Glycine max
cttgtttgtaggcacgagtgacgagagagggtgtctccggaaaaaacaagtgaggttctatggctgctgtgaaagcagagaacgtgtgtgcctcgccatcgctgaaaatctccaaggaagtggaccccagacatgcttctgagaccttgcacttcgttgacgttatgggagctgccacgccccttcccggtaactgcaacgcgcgtggcttctacgacgccttctaccggagcttcatcaaagtcgataacatccaacgtggacggatttcatgcaccgttgtggccaaaccacccatctgtaatggctatggaactc

SEQ ID NO: 22254 - DNA, 475 bp, Glycine max
atatggaaaaaacaaagcccttcaattacaatggtgaatattattaggggacacatccatacttcttgtcaccaatttcgtttctagactatgtgactcaatgaagcactaacatcagtgatacagagactacaacaatcaacacaagaaaacttgtcaagagtaaaacctatgatgaccaagtattcctggtgatggatccatgaaaactaatttgacatatttactgcacccatcaatctctagggcgagcaagccaaagcgaactgagagcacgcagacgcgaaatgtagtcatgtatagcaaggagtgcgcgagctgattggcgagttgtcagtatacggtgcatttgttgaagagtttgctggcgtaaagattggcagcctggttggaatgaacccctttctaagaggtcccctagactttgccccattgtccattgggcgccttttgaaccccattgtaaacttggcca

SEQ ID NO: 22255 - DNA, 451 bp, Glycine max
ataaacttccccgaaattagatgaataataataataacaataagagaggcttatcataagttaataactgttaaaatgtgccaaaaaagagaatatgtactattccaccttttttctcccttcgcaaaatgtaacaaacccttcttcacctcaacctgaagcttcaacacattccctcgcaaaatgccctggcttcccacaattaaagcaagtgctttttccaccgtcgtcgtcgctttcgccaccaccaccaaatctccctccttccatgccgcaatccctagccaaatgaccaacctccccacaccgaaaacaacctccaccgcttcctccaccgccaatgttgcccttcccggtggcgcaatccctcgccatgtgtccaaatccgccacacctaaagcaagatccgcctccgccaccacctccaatgcctacactgccgccgcttcag

SEQ ID NO: 22256 - DNA, 561 bp, Glycine max
ttgacatctaataatctcgtgacaattttattgctaataagctataacaacgtccaaaacttcaacaacgatctgctgcatgttctaaaacaagtacccaactacaacattgtttaaaagagaagctgacaaaaatgtataacatggtaaattttctaaattctgaatctaagccagttttctactttggttgggttacaaatgtgtctaaacttttaataaaaatctaatcaccaaaagccatccatcccttcttttctttcggtagagactgggaggagagtcctgcatcctctttgtccccattgttttcatcctcaaacatgggtgtcttggatggacaaacttaaccaaagttggttaatcacctgtaagtgtacatgcaagagcctgggcacaaacaaactagggacctacattctttctttttaaagtgcaataatgccatgaaaatggacagatagtgtaccccagtgacatgccctgccatgcccggttctagaacgtataaggaggactatcctcctttttcaaaaattcgctctggccactgacctgaca

SEQ ID NO: 22257 - DNA, 507 bp, Glycine max
ctcaaaaaatgaacacaaattattggtttgatcatatgcaacaaactgccagatccaattctagcaaactcccaagtcaatacaaatcaaaatgataacttatactctaaccagaaacacaattttgttcctttttcttttttcacatttctattaattttttttcttctgctgctgctactagtatagagcagacaaaaggggtcgacccgagtcaatacccgaaccaccacccttgctttgtgttaaagatccaaacccgacccgaaaaagtctcggatcctcatcaccatgcaaggacttctctcacccacgcgcggttcgttcttgactcaacacccccacccctcgcgtccttcacacgcgccacctatccccacttttaagtacaaaatgtcacctaaattctcaaaaagaaaataataataataataataataataatagacagccccaaaaggtttcagctctcgcaatgaagagctgattttatcttctgcacggtgc

SEQ ID NO: 22258 - DNA, 689 bp, Glycine max
aacaatgcctttcaaaatccaacaaaatattgagcaatggtttttttaggacatcatttcaaaacaaaattgaaggatgatgtactagaagttactcaataagtagcccagaaacaaaagtttgaaggatgctgtttaacagcttatatgagtgagatttgtaagatgactttgttccaattaaaatataaaaaaaataacattcctcaaaaaagacagttatatctgaggtaagcgagttggaagatcagccgggacgtctgcacttgcctgaaggtatcttgtcaacattgctgtagtactgaagttaaagccctgaaccggttctccttttgtgcgagatgcattaagttgctttctcacttgagtggccagcgacttccccagctccactccccactgatcaaaagaattgattccccaaatgaaaccctctacagcaattctgtgttcatagattgccaacaactgtccaatattataagcattcaatgatggaagcagaaggctgagagaaggtcggttgcctgagaatgtcttgtgtggcacaagatgtggaggaacattctccttttgcaattgttcagcggtcttcccatatgcaagggcatctggttgtgcaaaaaagtttgacattagctcatcatggttgctcacaacctcaccactcaaataaacaggttgctgca

SEQ ID NO: 22259 - DNA, 537 bp, Glycine max
gttgtggaaagctgtgataatgatggtgctgaggaatgcggcgtggtttcgagttctgaagaggagtctgatgtggaaagtagtgagattgttgatcttgaggacattgctggtaaagctccttcgcggcggaaggtggtggctaatggggaagagagcaatgggaagttgaatggcagtagagaaatggtcactccggtgattcgagcaaatttagagaagcaggggtataaaattattgggtcgcatagtggtgtcaagctttgtagatggaccaaggcgcaccttcgaggtcgaggtggttgctataagcactcgttttatggaattgagagtcacagatgcatggaggcaacccctagcttggcttgtgcaaataaatgtgttttctgctggaggcatcacacaaatccagttgggaaaagttggcagtggcagatggatgatccaatagagattgtaaattctgcaatagacctgcctacaaatatgattaaacaaaagaaaggagttcctggagttaccttggagcgatat

SEQ ID NO: 22260 - DNA, 609 bp, Glycine max
  unsure (1)..(609): unsure at all n locations
ntagaataaaaatataaaatagtatattgattttagattttagataccttctaagggaatccaagagcgtttaacctacaaaagaattggtacacctgacatgattgacgaattccgaaatcggaaaggtttttaagaaatttcggaatcggaggaacctgcgaactctctagcatatctctctactctacagcctaatggctagaactacccaagaaaattttcccatatatatgactaccaatttcttttccattcataagaattagtagtcacaccaagaaacgttaatagtgcacccaacacgttttccataggttttctattggacagagccttcaaantgctctcttggcctgtacattgttcagatttatatccccaacacatatagtaagagagaaaggtcgtctcaactcattccacatagattgtcagtgcaagaaacatcctcggacggcatcatatttagatctggtatcaagaaaaaacttttcccggtggttgattctatcttgtttggcctagattctgatgcatgtgaatgagtatcatcttgaatgggacgtatgagggcctccgaagatactaccggacgcatgggtcgac

SEQ ID NO: 22261 - DNA, 1193 bp, Glycine max
cgatttgacgcttggtgagttgcttaagtataagtctgaggaaggggtgagagtgttgttgctggtttgggatgataaaacttcgcatgataaggttttcctcaagacggctggtgtgatggggactcatgatgaggaaaccaggaagttttttaagcattcttctgttatgtgtgttctgtcgcctcggtatgccagcaataaaatgagcttcttgaagcaacaggttgttggaacggtcttcacacaccaccaaaaatgtgtgattgtggacacacaggctgctggtaataaccggaagataactgcttttataggaggtcttgatctatgtgatggtcgctatgacacacccgagcatcgtctgtttcgtaatcttgacgatgtatttgatggtgatttccacaatcctacattttctgctggaacaagagttcctagacaaccatggcatgatttgcactgcagaatagatggacctgctgcatatgatgttcttattaactttgagcagcgatggagaaaagcaactaagtggaaagagtttgcgatccttttcaaaaaatcctctcaatggcatgacgatgctttaataagaatagaacgcatctcatggatattaagtccttctggtgctgctaccttaaaggataaatcggatgattatactgttccagaggatgaccctttagtatgggtttccggtgaagacgatcctgaaaactggcatgttcagatcttccgctccattgactcaggatccctgaaaggatttcccaaacgtgttgatgttgctctgtcccagaatcttatctgtgctaaaaatttggttatagacaaaagcattcaaacagcatacattcaagcgatcagatctgctcaacactttatttatattgaaaaccaatacttcattggatcatcgtatgcatggccagcttataaagatgcaggggctgataatctcatcccaatggaattggcactgaaaattgctagtaaaattagagctaaggagagatttgctgtctacattgttttaccaatgtggccagaaggtgatcctaaaactggggctatgcaagaaatcctcttttggcagggccaaacgatgcaaatgatgtatgatgttgttgctagagaattgaaatcaatgcaacttactgatgtgcacccgcaagagtacctcaatt

SEQ ID NO: 22262 - DNA, 786 bp, Glycine max
cgttgatcaaacactacaatctgaaacgatggtgcacataaaaagagtatcaacattttctacatcaatagttacaaatggtagcaagcaatgtagagaaattgaacattaactgcccatgtttagcctaaatggtagcaggcaatctcatctcatcaatttcaggcttcatgagagagggcagagacagggctgttttgaaccatactttgtaaatgaaagaaacgtacataactgcagaacatctttattccacatgcagaacaatcacgacattgacagaaggaaatagcagaatgtcgtccttccagtccaaataaaatgcctgaaaaatcttaagcagacttcttctgcttgtaccttttggcagcaactatgtacacaaaggtatttaagaagctaagtccggctaaaagccagaaaaagtaatcaagatgacccttgttcaagttatccggaatccatccaggatttccaccttgtgtagtgaagtaagtcactacagtgagaatgaaagagctcaagtaattcccaagtgaagtagtcaacagcgacaaagcactacataaactacgcatggcatctggagattggtcatagaagaactcaagctgcccgacgaatgtgaatacttctgctgcccccaataagaaatactgagggatttgccaaaatatattaaggggtacaggaacaggttcatcaacaaggccatgctcttttgcaaccttcaggcgcacaatctccactatagcagctgctgacatgcacaggactgagataaaa

SEQ ID NO: 22263 - DNA, 272 bp, Glycine max
attaactgcccatgtttaggtgaaatggtagcaggcaatctcatctcagcgcatctcaggcttcatgagagagcgcagagacagggctgttttgaaccatactttgtaaatgaaacaaacgtacataactgcagaacatcgtgcctccacatgcagaacaatcacgacattgacagaaggacgacattctgctatttccctctgtcaatgtcgtgactgttctgcatgtaaatgaaagaaacgtacataactgcagaacatctttattccac

SEQ ID NO: 22264 - DNA, 616 bp, Glycine max
ggaaaagagaatccggcactgggggcaaatataatgcctgagaacaaagtgtaagacttctttcctaaaccagattagtaaacattacattacgaacctgaacgagacctaaagaacataatgaatagaactttacgggaaacttcaaaagaacttacaagggaagggtgaaagaaaaattccatcttgtaactattaatatgaagcaaaagatagcagcatttggtatttcgtcaaaacatccagaatgatcacaacaactctataaagccaaatcattcggaatgatcacttggcagaaagcaaactctagtatatataactcttgtgtggctaagaaatcaagccacaacccatctgtccccatggtgtatgtaaaaccagccatttcaaaaacccacgctggtccagcaaccccctatttaccaaggctgaaccttgtaggagccaagggcaatcaaaggacattgacttgaccccaaactgttggactgtcaaactggaggactttactgatagaccagtcaaaactccttctaattaaagtcgaatccaccagaaggcaccgcaggtggttgagtgccaccaaagttgaaccctgattgagaagcatccc

SEQ ID NO: 22265 - DNA, 470 bp, Glycine max
aaaagaaaaattccaccttgtaactattaatatgaagcaaagatagtagcatttggtatttcgcccaaaacatccagaatcacaaatggtacttcctgattccaatctatgacagaaaaaatcacaaaactcaacaacaattttataaaagccaaatcactcggaatgatcacttggcagaaagcaaactctagtatatataaatataactctttatgtggccaagaaaatcaagccacaacccatctgtccccgtgatgtacgtaaaaccagccatttcaaaaacccaagccggtccagccaccctctatttaccaaggctggaccttgtaggacccaaggacattgacttgacccccaactgttggactgtcaaactggaggactttagtcactttactgatagaccagccaaagctccttctaattgaagttgaatccaccagaaggcacagcaggaggttgagcgc

SEQ ID NO: 22266 - DNA, 443 bp, Glycine max
gaggaatcaccttcttggttttaccttgctttccctttttacgtcccacattcttttttccttttttatgtcccccattcaattgactttgcatatacaacgatttggccttcctagtagaacggcgaagaggtatacttgatgggatattcttactgtttcgagatctcgcctgtcgtatcttattcttactcgatgcctttttattgcccttgaggttcactggtttacaaactgaaggcacaattttacgtttctttgcttgaatcttctgcagttttgagtcaactttccttttattagtattagtctttgcttgcaacccatcttgacatctgtgacatgaataagagcttccagtggttcttgtgccacttgatttcctgacatgcctcttgtggaaatatcctttgcaatgaaggcacctcacagcatccctcatt

SEQ ID NO: 22267 - DNA, 278 bp, Glycine max
ccctcagttttcagctattgtccatgattacgcctagtttttatatgtagtcattcatgttatctttatatatcagacttaaacatgcaaaagatactattggaattattgcgaagtccttgcagaatttcgacacagcggaatcaagttccactaccactgaacagaaagccttcagtccgacaatggtccatttgattatagtccatggtcgtccaggaaggcttctgatcaaatgtagtggaaattggatgccacactgaaaagttgtcctttca

SEQ ID NO: 22268 - DNA, 543 bp, Glycine max
tagtaaagagcattcccactacattgaaatgaataatacaggacaactttggaaaattagacgcgaaaagttaaaataagagcttgaatatggcaacgatcaagttgtagtagtgttgagttggatgactatgacactgatgttgtctttgcttccacgagccatagccaacttagccaacaacgctgcagcttctgttgcatagcttataatggagtcctctttaaaattcctcctcattttcccatggaggcaacctcgtacaacctcacaaacaaacttgttagacactacatcccacagcccgtcactcgccactaccacaaactcatctgactcttttcgtgcgtacaccttggtctctggttgtgaaatcacaaaaggtttcatgcagtgatcccctatggatctggaagtagcaagtactcccaaaacacgatttccgttccaattaatgaccatgccacctgccgcttccaccccctctttttcatcaggacgatcaggcttatggtcacgtgaaagtggcacagctacccccgt

SEQ ID NO: 22269 - DNA, 465 bp, Glycine max
gaagaaaaaaggatcaatattttagcttttatttttttggagttacaaattgaattggtaccacctatttagctttaataataattagtccgcatgataacatactcaatgcagcaagctaccatcgctgtcccaaataataggcaagaaataacaatagctcaaagagatgctacatatgcctaagcaaaactgataggcatcagtgtaactgatctgagtgccttttcttcttttcagcaaggaatggtttgaacaacatcaataatccaagtgcttcaactatgttcaaggcaaagaagaccatatgggtgcctgggagaaatgaagcatccattcgcttttgtgaccaagttaatacagcaccacctgcagcagggccaatagctttgaatagagacatgcctgtcacagcaaatgccattagctgcccccctttggtgttgttccactgctcggttttac

SEQ ID NO: 22270 - DNA, 426 bp, Glycine max
catccatagaagatcaggtaatctttattatttccttaaataagaggggttttctcactaaatatgagttacaagctagtttcgcattacactcggaaaatctattctaaaaacaatcttgcaaatataaaagcatattaaataagtgtatctgaatccatcaagacacaatgcaaagtacgaacatagaggcccaccaaatggatgggatatgcttctggaagttaagggtttacatggaaccttagcttctggaagcacgagaggagaggatattgcttcaatccttagttcaaaaatacaatagatggcacatgttggactttgtggtaatcctccccagcagttccaagcctggtcttgaatgatttaggcatccatctgatttctagctcccgaagagtagtgataaattttagtccatca

SEQ ID NO: 22271 - DNA, 411 bp, Glycine max
ttttctttcataactttattctcgttgccacactcgtattgtagaagttagaagtagtcttctgtaatgggagtgaagggtgagccgaattcggattcggattcactcttttcccgcatttatgcattcaacaacttggaactgttggatgaagatgtcattttataagcagtctaatttgaaaaacttattcgagatatcagcagttcaattttcatccaacagttacaaatacactgaatacatgaatgcgtgaaaaagtgactccagtgaatccagctcggccgaattctccctgtgccaaggcacagtatttagactcagtggtaaaggcgggaagaagcaactgctagttccttcagaaacgaaacgacatcgtctgatgaatcgagtatataccgagcatttgtt

SEQ ID NO: 22272 - DNA, 586 bp, Glycine max
  unsure (1)..(586): unsure at all n locations
ctccacaaaaacaaacagaaccacaaagacaggttttgttgctcttctgtggttcttccagagagagagagagagggttgaagaggatgttctgagaggaccgctttatctgaaaaaagatcttggtttgcagaatgtcatctttcagagagagagagagagagagagaaagaggtgtaatagaaaaagagtgttgtcttttgtttgtttgtaactttacattgaattccattatttttttctctctctctcttgtgttactcgctacaagctatatgactataaccgactccatcttttaccgtggaagaaggaaatgaatatcacaagtggaagaagacacagaaggcgctaggagcatagctactttaagagagaacaaggagcaagagaagaaaacaactgaaacaaacgcttttaggttgttctttctcttgtgtcatggcttcttcaaagaccaccaacccaacaacaactactacacaattggaaccactcccaccagctgaacaacgccatnctgctgcttctgatcatcaggtgcaacaacaccaccaccaccaccatcatcatcaacaaattcatg

SEQ ID NO: 22273 - DNA, 579 bp, Glycine max
cccacgcgtccggtaggcttgctgtcttcttggatcaacgtgttgatcaattgattccacaggacaagcaagtgaatgaacacctcacgtcccttgtattttttcacgacaagaagtgtaggatggaaaattgggacctagtgaaaggtgtttttgtcgagttcaaattacttagagttctagatcttgaaggaattaaggggctgaagggacagtcattgcctaaagaagtgggaaatcttttatggttgaagtttctgagtctgaaaaggactcgcatacaaatactgccatcttccttgggaaatttggagaatttgcaattcctaaatttgcaaactgtcaataaagtgagctgggattcaaccgtggaaattccaaatgtaatatgtaagttgaaacggttgaggcatctatatcttccaaattggtgtgggaatgttactaacaacctgcaactagaaaatttgaccaatttacagacattagtaaatcttcctgccagcaaatgtgatgtaaaagatctattgaagctgaaaaaactcagaaaggtagtactgaatgaccctagacattttc

SEQ ID NO: 22274 - DNA, 562 bp, Glycine max
ttttttttttttttttgacccatacagcacacaatttttatggtgagattttaacacattacacatactacatgatacatacatgggtcctatgtctagagtgttgtaggaagtacaagttgggtactgacatgatgcataaatgttctgcattttttaaaaaataaaacaaagaaagaaaaagtcacctttgctttacttcttgatcaaataggtacttgaaaaccgatacaaaaatgggtttttcttcccagataggtgtcagcaaaaaaaagaaaaagaaaacaaaagcccattatcattatctgggatttgagttacttgagaaactgattagactaataaattggcatataaccaaaccaagaagagggaccctctcactctcaccaccctttgatctttcatcaatttaacccacccatcttccttctggtgcatctttctgcgatgatgacaaattaggatacggttatgtcctttccaacactgatttccaataaaatgtgtcccttccaagcaaacccattcgcttgcctttctcttcaatttttcatctttg

SEQ ID NO: 22275 - DNA, 518 bp, Glycine max
ctggggcttggtctttgaattttaaaaagggggatctttcatgtggcaaaatcacaagtgccttaccctttatagtttttcctcttttggtttagattttagtacagcttatgggtcaataaacctatccaaaccccatgtgtgcacactcaaacaataaagaaaaaacccaaaactgtcaacagaaatcctaaatgcatgactgcactctactcctatatatctttgcttaagatatattatatatgcaacaatcacattaagcatcttcacattgaatagcacccgaggctatggcgttctattaatgagactatataaattttacaataaggcagtttttgaaaaccaccttacaaagaattgagacaacggcgggtatctgcacataattatttttcttaattaatcagactaacatcataaaaaaactataaaagctacactctaagcagcaaaaagtcacagcaatattgacgtacacataaccctgccaatggagcaattgcaatcacaac

SEQ ID NO: 22276 - DNA, 435 bp, Glycine max
tgctttaactacaatagctgctattttgtacaagttccaacatggggttggctggaagaagtttgcttgaaaaaaaattccaaaggagccaaaggtcactttggttgtatcagaattttcccatgtacaataagaaacacgaagttggaacattgaagcagagggagaaagtattgaacaagttaactatttcccatttgaattgccatgcttatggaaaggccaaagatttactagacgttcaagtacgctttttgagaaatagccagagaatccctgcaggggttgctggtggagggaagtcttctgcaggcatggcaaatggacgaatcatcatctccattttttccaatgtgagatatgatcctatttcttgtagcctttcaggacccattataggcagtgtgtgctcctgatgcaacgaagcagcctcgc

SEQ ID NO: 22277 - DNA, 720 bp, Glycine max
gttggatcaccgggaaattagctaataatgtgggggctctttaaacacatccctttttttttttcagtttcgttgggtatgagtatccgaaacaacttacaagacgcaaattactcaatgagttttaccttttctagtcaaggggttttcacatacacaataatgaatcaactcctatgacaattaagaacacaactttctactgactaaggggaccaaactttgttggaacacgttctttttgttccaagctagaagggaactaagggatgacatttgatcactgctgcaccatggcattcctaacatgaaaagtacttacgccaacatgggaataggtgacagattaaatttgcatcagcttcctcttttcttttattgggtcccataacttggttgaatagcattctccactgatcagaagaagggcaaaaatgaacgagatgatggaggagatttggctcatctgaaaatcagatggtggcatgtattatcacaagggtaaggacaatcaatggccttaacacctgctcggtcgaaataccagtctccaacagaaagagcaattgccttgttcccaatgacaggagagttgtcagcaaaccatgtatcctgcctctcagattggcagtgagcaaaacatgaatttatgaacaatccattctgacgtgatcttgagaagcctttaatagcattcagcatttgattcctgaatccttg

SEQ ID NO: 22278 - DNA, 431 bp, Glycine max
ataaattagggtattattttgtctctatttaccttaacatagaacttgaatttatttctcgctgcgacaaaatgccataataccggtagattgttcactacgccaacatgaaataaatatttttaaatgtaagtgacaattagaccatcactattgaatttctaatttagaacatgatcaagcttatcaatgtaacaaatgattcgtaaattctataatattttcataagaacttccaccttcagcggtagctcttacagctaaagttttccactgaatggcattggttttcatctctttgtctctatccattatctcttttatacaatgttttagagcttctcgccgcacaatatttttctcatcaactggagttcgaatacctattttccaaacatcggcaataagctttgcgtttgttctctgatctg

SEQ ID NO: 22279 - DNA, 421 bp, Glycine max
agagtgtaattgagaaattccattgaactttattcaaggagttctaggtacaaaggacctattgccacggaaagaatggattaacatcagaagggggcagcagctgtgatagaacttaatgagaaaacaatggagagacccacgttcctaagaagacctaaaacgactggtgaaaagaagaaaacaaatttacatggaaataaatgtcgctaaaccgatttctaagtcctaactttgcaagtcaggttcaccaaccaaagttggaaaaacacctcggcccgataacccagaggatcaccacccgtgcagattcctcaaatgttaaggcctgcacaaagaatgtaaattcataccctaatacgttaatatcttgccgctgcttcctccctcaatcaatcatttagatttactgtattgctcg

SEQ ID NO: 22280 - DNA, 307 bp, Glycine max
gacgataatgcgcaaaatcacctcactatgtttagcaatagtaaatacatcatccaatttacaaggaaaaaaggaagggaaggtgaagatcccctctttacacaaacgaataactctagagaaaattgcgcatgcttcccagttaacccaggagcaactagataacaaaactgtacagtgcactatacaggtgggttacaggtataggtttgttgggtatatgctccatcatgtaaaaacattgtattttttttaatactataaaggttgatcctgctttccattgaagtcgggagaggatgatgga

SEQ ID NO: 22281 - DNA, 224 bp, Glycine max
cagatttttgctacatacaagagattaactgtgcatcatgggcctactgttacgagagcggcacctagtacccatgtgcccattacaaagcgttctatgggcgacgaccaatccaactatcatggacacttcaactaccgacctatcgggcagagcatcggatcagatggattgaacgctacagagacagcggccaatgaccctgttgtgtccttcatagacag

SEQ ID NO: 22282 - DNA, 1057 bp, Glycine max
agggggaaagaaaagtgactttatcaaaggaagctagaaatgggttagaatttttgaagcgtaaaaggcttcagcgtgcaaaatttgtcactgccacccagacaagtgttgctaacatgatgagcagaagtggaaatgctttaagagcttcagcatcatgtggcccaagatttcatggtaatgctgatgtcttttccaagcgcaaggtggataagtttgatacaaatgacctggattggactgataaaattccagaatgtcctgtgtattctccaacaaaggaggaatttgaggatcctttgatttatttgcaaaagattgctccagaagcttctaaatatggtatatgcaagattatttcccctttgagtgcttcagtacctgctggggttgttttaatgaaggagaaagcaggattcaagtttacaactagagtgcagccccttcgccttgctgaatgggatactgaagacaaagtcacattttttatgagtggaagaaattatacatttcgagattttgagaaaatggccaacaaggtatttgcacgaagatattgcagtgctggatgtctcctgccacatacttggaaaaagagttttggcatgaaattggttgtggaaaaatggaaactgttgaatatgcatgtgatgttgatggcagtgccttttcatcatctcccactgaccagcttggtaacagcaaatggagcgtccggaaactttcgaggttgcccaaatcgattttacggctcttggaaacatcaattccgggagtaacggaacccatgctatacattggaatgctgtttagtatctttgcttggcatgtggaggatcattatttgtacagcattaactatcatcactgcggggcatcaaaaacatggtacggtattccaggtcatgcagctttggaatttgaaagggtggtgagagaacacgtgtacactaatgatattttgtcaagtgatggggaagatggagcctttgatgttctcctggggaaaacaacactatttccaccaaatattttgttggagcatgaagttcctgtc

SEQ ID NO: 22283 - DNA, 332 bp, Glycine max
aaaaacactgtcattccatttttcaccgtttcccgcactccaccacaacgatggacaacgaccgcgtctcccgccgcaccgaggtcctcaccaaccacctcctccgccggacacccccaccctccggccttttccacccccacccctgccttagctactcccccccggagctctccaacaccatcttcttgggcagtaatgtaatagcattatgccaagctggcgcttcatgataatcacgacaacatgccaagtcggggggacaaaatgatcttacacattgaagacgttcgcaggcttcagatacagcaaagaaataaaagtgccgaact

SEQ ID NO: 22284 - DNA, 420 bp, Glycine max
  unsure (1)..(420): unsure at all n locations
gcgtccgccacgcgtncggctttggatgcgattactcgtgctgttcaacttgatcctgaaaatggggaagcttggaataacattgcttgcttgcatatgatcaagaaaaagagcaaggaggccttcattgcatttaaagaagccttgaaattcaagacgaaacagctggcaactatgggagaactacagccatgttgctgttgacactggcaatatcagtcaggcactggaaggtgtccaaatgattttggacatgagcaataacaagagagttgattgtgaattattagaaagaatcacaagggatgtggaaaagaagcntttaacaagtaacgtgccccagttggtaactgatgataataagcctaaaacaaatcaactctgcattgttgattctggatcaaaatatcaagagcaagt

SEQ ID NO: 22285 - DNA, 570 bp, Glycine max
  unsure (1)..(570): unsure at all n locations
gcgtacgtaagctnggatcctctaaaaccggccgctttttttttttcttcctttctttctttttatatgacataagtgttaaacaatgccctacaatcaaatgaattacaaatcaatggcaaaaaaactgtacacaagaatgactgaaaagcggtacaaggaatgacgcttttggattttaataattacatacctccctccccccacgctaaaacaggcaggcagctctgaatgatgaaccgctcctccatatctataaattatcgagtgttctctgaccaaaattccccaaaccatgcaaaaatttaacgatcccacatggcttggaatatggcaggtctgtgcttcaaccaatgaaccatctccctgtccagtggagagttattaactacagcatctaacattgggctaccaaagaatttcggagaacttttgaatgaccatatccggtctttgggccaagatctctgcggctgcctctccattctagccagcatagatctaacggtccttggaccataaacacaatgccgtgatggcttctgagccttggcataaaaggaactggtg

SEQ ID NO: 22286 - DNA, 778 bp, Glycine max
aatcaccataaattagaatttcaactagcaatacaatacacttattcaaaaccagttcctgatccattgattatgatttggtttttcaaagggattcaatccaaaaaatagtctgtgagaactatcagatcaatgtttatgtaccccgaaataatgagatgtgcaaatgtggctagtgcacaatcactaatttattgactacaacaaggatagttagggaagtttaacttaattttacacctttcagccgtacaagacttgattgtatacaaagaagactcaatatgatggatggaaacaatctcattaggaacggaacttgaggctcactgattcatagcttggaacatagagaacatctccatatgatgccattgtgagaggggaagaaatgagtttttgcgaaattgaagtgatatcctttgaggttacttcatccactgccttcaagaaatcctccacaggtttcctctcaccatatgtcaaaatttgtcttcctatatcttctgaaacaaccattcttgattccaaattcatcaaaattgcagatttggtagcctgtttggctcgattaagctgtgcctggtcaacttgtccaggagtagcaacaccaagaatctcattagcagctatatcaatggcttttgatacaaaatctgagcctgttgtaacttggataccaaaaatgccagtgccattgtaaatattgttgaatgctggaattgcatgaacttgtggatattcattcagaacattttgctctagcatttgaatttcc

SEQ ID NO: 22287 - DNA, 586 bp, Glycine max
ggcggcttttttttttttttttttttttttttggtttaactgcgggggaactctaacaaaaggaggaaaattacaagatgctgttaaagattaatttaaaactatagctaaactacttttacaaccagttcagttgagtgattaatttccagcattatggtttctctgagaaccaaaacaaacagaatcatcagatatcctcagaaacctattgtctctcctaaaattcataaatcatccctgaaaatttcctcaagtagtttgacaagaaagaaaaaactatggtagttggtaagtagcatgtaatggcagatttgtacacatccttagaagagatgaagaagttgcagacattgagaaacatgctgtagctcttcccttatcatgaagaagctttgctcccaagtaacaggcttgacggcttaaagcttcaataatcagcatgttcttacaagctttggtctccacatcctaacaaaccaattactttctccgagcttctgatccatggttcgtttcttgttatttgtttcagtatcctgggaagcttccaatgtcaccacactcctcaggggcaacagtggac

SEQ ID NO: 22288 - DNA, 676 bp, Glycine max
gaaagtaagttccttgctatgaggcaactgtttctgccaaacatttctactccccttaagtataattctttttccagaggtttccaatctgaaaccccttagcatcccatcaactttcccttccattgaattggacaacttcttaaattctgtcttatttgtaggatcttttggtccatccccaatacttttgtcctgctcatcactacagcaagtgctagaagaatctattaatttatttgaattatctttaacagatttgtccaaaagtccactagtaattgtatgtatactttcatcacatgcaccaaaatttatgttcttgctagaatcactatttgccagtaactacatcatcagatattgtcttcagctttttataagaatgctgagaatcatcaggagggagtgatgagtcacggagtgctgtgtctgactgatttgggactttccatttttccacactcactgagataggaacatttaaattaagagatccaagacaatcaacttctgttggaaaaggtgctatactctgattactaggttcctctataatggagggagccaatttcacatctgcctcttctgtaattgtagttctcttattctgatcagacccagaagttgaatcttctgtcacattttttactacctttaactgaaggtaacactg

SEQ ID NO: 22289 - DNA, 566 bp, Glycine max
  unsure (1)..(566): unsure at all n locations
aagctnggatcctctagagcggccgcttgttttttttttttttttaaaaattttttgggacataatgaatgatatatgcttcaaaaacttcaaaaagtgttaaatatgtttttagtcactatgcaagaatatatttactttttatccctaaaaattcattgtggtaagaagggggtgcatgaccagtggtggttgaagagggaggaaagaaaggcaggtgtaagttgtaactagagaaaaaggtagattgtgatactgagggagaaagaaggcaatagaactctcacaatggagagaaaaggatccacctaaactttaaccaaagttttgaatttgaatttagtgtatgtcctggacgtcctggatgagagagttaagcccactatcttcagatttttttttttctagttcagatttttcaaaagctaaaacaaatacttttaacaaaaataaaggcaactttttcgatcagatcaagccaagatgggccaaaacaaattatttcagaccatttgtgtccgacccatcaaactatacccattttcacactgcacctccacattttg

SEQ ID NO: 22290 - DNA, 588 bp, Glycine max
ttatttttttttttttttggagagaaatcatatctagcttcatgaaagaatatatcggtagaaattgttctttgtcgggaggaaagctaccagattgaccaagaaaaatcattacaatgagtatattcactttgaacaaataattctatctaataaccgtaaaaaaaaaaaacaactaccctgactcgctacagtccaacttcgattggtagtagtcgtatattagaaggcctaaaatgaggcattgctgggccattgcattcttcaaacaaacaatcaaacattcattaaagccttctcatgttgcagttctctgaatactctataaactcaacaaggacaccgataggtcaaaagttctagctggaatgatcatatttgtcgactgaagtacatattcataaagtatctagaaggattgaaaccacttaaaatcaaaattggagaaaggacaattacgattccaattgggtacaggaaaaaggtggtcctctccaaaaagggcagaacatcataacctaagaaatttagataatgatagtatgaagcgccgaccatgaacagcagatttgacagcaatactggaat

SEQ ID NO: 22291 - DNA, 521 bp, Glycine max
ttaaaaaatttttaaaaaaaaaaaaaaaattaccgccggcttttagtcccttattccccccataatgaaagaaattggggagtacttgcattctaatgccggcggaaactagaattcaattattgcggaatgaaataatgagcaaagtgtgtatgcaatgatgatgcaagtactaacaacctgagaatttttttccctttcttttatggtataggaagaaactgagaatctttcagttttgcatgcgcaaatgaattgtcatattttagatatcaataacatcaatgctaactttctcgccacatgcctgagtcaaactcttatcaaacccgcagattaattattgaaattcttttcaagctataaaccaataaaatgactatatgttgaattgtatatatgcgtggacatgtgtattactttcaacagacttcaattttcattaaaccaaacaatcatcaaatattagtgtatatgctaaggataagcactttggtgcatgcagatcgatctagtatgat

SEQ ID NO: 22292 - DNA, 552 bp, Glycine max
atgcagtaagacgacacacattacatatatagatagagagggatggatagaggagatttcccaaatatcatgaatcagtagtagggcggaatggcagcggagacgccacaggggttggtgcgggaccaactagcaacatagaaagcacaatagtgtaccaacaatggcagccaaaatattttgcttccttatgctccttggtctttctgcaagtgctgctaccgcgaccattttcccacaatgctcacaagctcctatagcttcccttcttcccccgtacctctcaccagcggtgtcttcggtatgtgaaaacccaattcttcaaccctacaggatccaacaggcaatcgcagctggcatcttaccttatcaccctgtctctcaacaatatacccatacagagtccttggcattatgccaacatagcacaactccactgctacactgtctattaaacaatttataacatatatacttgttattaacacatcatacatcttctaccaatttatacatgaatattctgtataaaacaatctacattgtacttct

SEQ ID NO: 22293 - DNA, 816 bp, Glycine max
gactagttctagatcgcacatattattgagaccaactagcaacatagaaagcacaatagtgtaccaacaatggcagccaaaatattttgcctccttatgctccttggtctttctgcaagtgctgctacggcgaccattttcccacaatgctcacaagctcctatagcttcccttcttcccccgtacctctcaccagcggtgtcttcggtatgtgaaaacccaattcttcaaccctataggatccaacaggcaatcgcagctggcatcttacctttatcacccttgttcctccaacaatcatcagccctattacagcagttacctttggtgcatttattggcacaaaacatcagggcacaacaactacaacaacttgtgctagcaaaccttgctgcctactctcagcaacagcagtttcttccattcaaccaactagctgcattgaactctgcttcttatttgcaacaacaacaactaccattcagccagctatctgctgcctacccccagcaatttcttccattcaaccaactgtcagcattgaactctcctgcttatttacagcagcaacaactactaccattcagccagctagctggtgtgagccctgctaccttcttgacacaaccacaattgttgccgttctaccagcacgctgcgcctaacgctggcaccctcttacaactgcaacaattgctgccattcaaccaacttgctttgacaaacccagcagcgttctaccaacaacccatcattggtggtgccctcttttagatttctcatgagttatagttcaataataaagttttttgtctg

SEQ ID NO: 22294 - DNA, 343 bp, Glycine max
ttgagaccagcaagcaacatagaaagtagaatccattagcaacaatagagcaacaatggcgaccaagatattttccctccttatgctccttgctctttctacatgtgttgctaacgcgacaattttccctcaatgctcacaagctcctatagcttcccttcttcccccataccttccatcaatgatagcttcagtatgtgaaaacccagctcttcagccctataggctccaacaagcaatcgcagcaagcaacatacctttatcacccttgttgttgcaacaatcgccagccctatctttggtgcagtcattggtacaaaccatcagggcacagcagctgcag

SEQ ID NO: 22295 - DNA, 706 bp, Glycine max
  unsure (1)..(706): unsure at all n locations
gaccattttcctcaatactcacaagctcctatagctgcccttcttcccncataccttccatcaatgaccgcttcagtatgtgaaaacccagcccttcaaccctacaggctccaacaagcaatcgcaacaggcaacttacctntatcacccctgttctttcaacaatcgccagccctatctntggtgcagtcatttgtacaaaccatcanggcacaacagctgcagcaactcgtgctaccagtgatcagccaagtagctctggcaaacctttctccctactctcagcaacaacaatttcttccattcaaccaactgtctacactgaaccctgctgcttatttgcagcaacaactattaccatttagccagctagctactgcctactctcagcaacaacaacttcttccatttaaccaattggccgcactgaaccccgctgcttatttgcagcagcaaatactactgccatttagccagctagctgcagcaagtcgtgcttccttcttgacacagcaacagttgctgcctttctaccagcagtttgcggctaaccccgcaaccctcttacaactacaacaattgttgccctttgtccaacttgctttgacagaccgagcggcctcctaccaacaacacatcattggtggtgccctcttttagattgcttattagttgtaattcaataataaagttttttggatgatgt

SEQ ID NO: 22296 - DNA, 859 bp, Glycine max
cattcagaatttggatttacatatatattacctaagaatttcattaacaacttttatttcattgactgattaacttatgaaaagcaatatctgaaaaacaaataccaaaccaagtcaaaataaacgaaaaatagaatgtgtagttttttccaatgttagccagccgacctaaagttcttgaccaattgcttacacacaatatcaaaatctcatctcatctaataataataaaccaagggagaatgagagtttcggaatcacatcagcaaacgccagtttcctcacatcataggaagcaacaatttaaatggtagtcctcacttctgcagatggcactgaccttgttcaccacttggtgtatgagacatgagatgcaagctattgaatgtgacttggaaactgcattccaggggttgtttgcggtggcaccatggcggatggcgtgtaaggatggttatgcatctgttgcatagactgaggtggacctgtcccccatccagcctgagaatgagacatcagagtttgctcagtaactggtgcgtactgagctccattgtaatgttgaggaggagggcccgtcatcggaactggatgttgccctaaaattgagggctgagcattcactacaggtggaggtacattaggaatggtatagtctctacttctctcattattcacctttatactaagatcagtatgacgcgaatacgagatgtgaagcttgcaaaaacctccatcatatatgcagtgtccttccaaggcttccttggccacaacagctgtttggatatctggatattgaatcagagcctgtaaaccaccattcttgtcaaacattgcaatcttttggacaggtcca

SEQ ID NO: 22297 - DNA, 408 bp, Glycine max
cgttatgggaaacccttaccctccaattcctttcaatttgttcttttcaacttttaaaaaaattgacatgaagaatgagtgaaatcctgttaaaaaatggttagccacaacagtcagcagaattcacatcatcttgtaagaagcatagatccttctaaagaacaaatgagtctcatttatgtcctttaggttaatggaaaatgataaaccaagaaagtgagaaaatatttgatagagatcagaaaattggttgggagtttaacatctgataagtgttactacaagacctctgagaggttcaaatatttatacacagattccattactttagatctaacagaattgtaactgactttcaactgtctataacagactctaaccaactctaacagctaactaactcaatta

SEQ ID NO: 22298 - DNA, 590 bp, Glycine max
  unsure (1)..(590): unsure at all n locations
agggggagaacaagaactagtttctattatgaaatgaaactaatgaagtgttaaagataacactcgctgattagaaagcacagtactatgtacagacacaggcactccaaacaggcaaaaaataatgtaagaatgaaagaataatagattgtcctacctacactacactactactacacgttagtcctaaagagaaaagtaaactcaaaaattgtccacaataacacacccaatattcattcactagtcgaagggatggctccatcgtcaccccgaactggctgctgatatctctggtctaatctcttcaagctgctgaaggacttgctgaacttctggtcgtgctgatgaagaaggatcaacacagtgcaaagcaagcttcaacgtgttcagcatctcgtcgccgaatgttgaagcatctctcatcaactctacatcaaaaacctcatttgtccactcctctttgacaatggaggcaacccactgaggtaaatccactccattcatagcctcaccaggtggtttatttgttagcccccctaacaaaataaaaccacccntgaatacatctgtttttgtgttgaaaataa

SEQ ID NO: 22299 - DNA, 389 bp, Glycine max
aaacagaaatgaaaaatgatgattagctcgattcaattttcactacggccggggcagaagttcagtatggggaattttgaatacgtacttttccgtctgcttttcatcctttatacaagagaaatgtagtctaatatgacgcagccataaagagcactcaatcattaatacagaagatagttacggagcctgtacacctggtgtctttcttgcctaaagttgcagttcagcttcttcaatcatcaaaaggtgaataacgtgatcatttaaacttcagagccagagggctctgtggacaacgatgagtctgtgccataattccaaaggctcttcaactcacctcttatacatcccaatatgactgtgacacctagtgtgcatggaacaag

SEQ ID NO: 22300 - DNA, 500 bp, Glycine max
ggacttgagcttcaagcttatcccaatctgttattttcggttttgaggatggataagtaggtttttcacctcttgcaactggcaaaacactaaacctctgtgcaactgtgctaccctttgtgaattctaaaagaagccattggattatatctgcttttgcaaggcaaatttcaattttggtggacaaaacttcataccggcatttggagggtatgatctttccaaataagcgaggttggaagacataagcatctttgcaagggatattaattgtaacacttaacttctgctccataaaaaagaattaagaaaaaaaaggaaggagcaatcttagaatattatcttcatgttacaaccccatcagttacagtcccttacatcatgatgaataatatgagtcatactatttgttcaccaaagtcaacagtaatgctgtctcgtggaatgccctttgcaaatatggtaataaccatttcatcaggtttctggtaggattcaaa

SEQ ID NO: 22301 - DNA, 478 bp, Glycine max
ctcggaagatatcttaataataataattagacttaaggatggatgaggatgcagatattttagaaaaagatggctcaacccatctagctgattttcattttgatcatggattgagaagatttcaattgtcaaagaaagattttaaattaatgtacactcaatagtttatctatatagcatatatattttatacatttaattatacacatataaagggtggcttgacaattagtcttataccacatgtggtagttaattaaaaccactcttgtaaaagatagcaatcaagtttttctgctcggaactggagaaggttgcttgtggtttacaccggctctagctttcacattcacgttattattgttggagactctatttttagtagattttgatgacactggccagtgtccactggtaacagccatgtccttgtactgttgcaagccttcaagagtttcaacaattggtggcattcttg

SEQ ID NO: 22302 - DNA, 383 bp, Glycine max
gaaagcaataaaacactttatatatgcatatttacgacataaattacattatcataagaccataaatactagagatcaagacaagaattaggcacgattggtctatctttgaatatttgacacgcatgctataacatcaatttctatcatcacaatccaaataactataatactaaaactgtagtcagtaggtttttctccttgcagtctctagcaactcatcatgccttatcagttccatttgcaaactatactgggcatactgcattgctgacattttcctggcagtaaagaattggctgcaagcctgcaagtgatctcaaatatatatgctctcctcaacagcttatatacaattgtataagtatacttttagttggcca

SEQ ID NO: 22303 - DNA, 498 bp, Glycine max
gatacaaagtcatttaagattcatcttattataagaattggtgggtaaccgaattgtatcaaatcgtaagattcgaataatgaaacgtaaaattctaataactacgctttcctcgtgttcaactttttgtgaaagaaaataaatggggaaaagataattaatcagggttgatagcttaaacccctacagaatttgaatgaaatgcttattgtggccttctgttgctcagaatgcataccggtagatggcatctgctgcaccatcttcatcattgctcaaaccaattacgttagcaacagatttggtcttctctgatccattactaagtgcgatgcctagagaagccaattcaagcatctccacatcattttccccatcaccaatagccattatctccttagcagtaacctcaaaatgatctagcagcacttttactccattccctttcgatgttcccacgggtacaatttccagcatgtctggcacagcttgaacaac

SEQ ID NO: 22304 - DNA, 383 bp, Glycine max
ggaagaaactcaacttaccaatgcaaaacataacttctcaaacaggaaacactaagcacaaatctcacactatgctattgctatacacaaccttcctctgtcgggatatctcaggggtaaagtcttactggataagagccacaaattctcttcaataccacgtgatgtggacgtactatatagcctactagggcctcattaaagaaaatcttataataataattttaaagaaaatgatttttcaacctatcattgaaggcaagttattagacaaatgaaatggggggacagagtctagatcatatcctaggagaaagctgaacctgcaatgcatttttcatgacagtagtaaactcctgtttctccgaaaaatccacatcccc

SEQ ID NO: 22305 - DNA, 530 bp, Glycine max
atcttgacccagtgggaggtttttatcttattaagcatcatcatcaaacaaaaatcttcccatgcaaagggaagaagacaggattacactgtaaagcgaaaatcaaatattatacagatagcggttgattcaggaaattcataaccactcaagtacgtagggattatgtccgaaatttacataaacctttattttctttaccacctcaatgctttacctgaggatgtgcactagcaggtcctccaagtgttaaaaccaaccccccttgaaggtcactattgattttatgctctttggaaacaacatttgaagtgcctcgcatgattggaaatggtaatgccactggggtttgccgtgaaccatgacatggctctgcacgcaaaccaattggtgctggttgggaagcccttgaattacccacatgattagagttcaaaaatgcttgagaggaagaaggaaaagaacttgttagagaacaatttggtttgacattggccacttttgagacaactcctgctccgggtgaaaat

SEQ ID NO: 22306 - DNA, 381 bp, Glycine max
ccctatctgcccttgtatcattttgaagtatagaagggggtaaactaagcgaatgtgtgtccctggaggtgagaaattcccagtacaaaaccctcaacccttgagggcgaatagcagaaaaccaactaacacagacaatagaagaatgagaccggcagcgacaacattaatgtgacctggcttcacagttttactacttgaactctcgcttccgccatcacgtttgctcttgtcttccatgaggtgaatttctgaataggagggcactgccacatcccaaaaagatttagtttggaaagataacttttctttctctggctccaaaattttagagacatcaattggggcttttatggacaattacttcttgcaatgatcttt

SEQ ID NO: 22307 - DNA, 524 bp, Glycine max
ggacagattaaatgttatgttcatatattagcggcgtaattattagaaagttcatattcctcttaattttgtaaccatgtatcttagctaggttgtcattacaaagccaatctaaataagtatagatattaaaatgatataaataaataacatctagaactaaatttgtccatgactgcatgcaaatgattttatcctttagtctttctgttttgcattttctccctcctctccattgttgtaggcagtagggatgaaggaattccactgatctaagttgcgaatttgatggtgcccccatcaagtgtgatattgcacttgttttttggggcctaatgtttgtccaagcactattttagtctaagaacgaataagtactttatttctaggctgcttctgcttctgttcttctcaaacagaatgttgaagaaacataatgcacacctaatgagtaggacttggcgttttgttctgaaatcgtagggagctggatgaactaataaaggattgtttcctaacaagtg

SEQ ID NO: 22308 - DNA, 568 bp, Glycine max
gggctactgtattcccagttgaatttgaatacttagttgctttaagttttagaggcttgaacttatttgattcctgatattgattgttgttattgacaacatgtgtcaaattctaattttttatcattcatcatgaatgtctttaattttaggcatttttttaaaaaaaaaatcagcatatatatgtttgtgtaatataaagcatataatgtgcgtctcaacttttgaattgcaaccatcccactacccattatcttactatagggttttcaggcttagccactctgtagtgctatttgggattgaataccatggatagtacaagagcttgtaagctcttttattctatgaggccttgttctattcctttatagtatcagttgtcactctgttgttaaaacataacgccgtcatcttttccattaatttcttgactggaatttttttgtcttgtttttgggcaaccaaaattggctgattatagagaaaggaccccttagagactacattggacgcctattaatgaccgcaaccaatgattcctatccacggtggtcagatttcaagt

SEQ ID NO: 22309 - DNA, 324 bp, Glycine max
  unsure (1)..(324): unsure at all n locations
ggacccccaagatcactatatactaattccaaacgaaaggaattaacagaatttgaggggaaagagggaagtctattaaattttccagcagcacaagctgaacaaaattcaagccaatttttatttatggtgggaatattacaatgtttgagaacaggttgtaaaacatggctatttggatgaccaagtctgtcatgcccaatactattgggcctaattacatgaatatacatgtgcatctgcgggaaaaattatcttcattagtaatcttagactataatngcatgtgtgtgcacagacgttctgtgctttgtgttctgtaca

SEQ ID NO: 22310 - DNA, 417 bp, Glycine max
  unsure (1)..(417): unsure at all n locations
cactgtctcaattaattctcctatttgcctcctaatttctgttcgctgaagcctctcttcctcgaacattctccttaattcttgcaataccctcatgcgtggtgatgaacccctcgtagctgtgctcaagaaattcaactcgtgcatcaattcctctggttgaaaccatgaatcattccctgaatcgagttctctgatagcaatctttggaatgtgattttattgatgaatcctccaaggggacagtgagttcctttgaggtagagaagaaaaacagaaagaacctgataggaatgttcgatagcctatcctctacccaacctctntctaagagactaaccaaatgccctctctctcctccttctattctatttatacaattcttacacaactaatcaatttacagcagacccattt

SEQ ID NO: 22311 - DNA, 350 bp, Glycine max
tccttcattaggggtacctgctatactcttcctaacttcttgcaactcccatgtaaaaacaaagaggtgttaggccatggtaatgattgtagaaacttgaaaccaaggttgttgtaactaagacatgcacaaacacagattgtgatgttagttagagggtgggtaaggggggagggaaaaggcgttaattagttgaggatgattggatcataggatataaggataggataggataggatagaaatgacacatacagcataaattatctattgcatggactttgtacgccgttagctagggaaagaggagtgtcttcagctataataatttggcatttgatgatctgaaag

SEQ ID NO: 22312 - DNA, 285 bp, Glycine max
ctacctctaggtgtggggaacacttgataggctggccataacctagagtaggcaaatttcaccaattcccagatacacactaaggctaatgttggatttgagaggttttggtggaaacagttactagagtgagatctttgcaaaaggaaataacataccaaaagatggatatttattttcatttttcatgttaagttctagattgacatgctacctgttggaatggtgtttcccatagtgattacaaaaaagaataaaaaatgcaatatttttgttctttagaag

SEQ ID NO: 22313 - DNA, 365 bp, Glycine max
  unsure (1)..(365): unsure at all n locations
ttctcctagggacagtcatagtacccttgcaatggggaacaagcttattgtgtatggtggagactccggtgatcagtatcatggcaacgttcatatgcttgatatgacaacaatgacttggtctaaattgtctattcaaggttctccaccaggagtcagggcaggtcatgctgcagtgaacattggaacaaaggtctatatcattggaggagttggagataaacgttactataatgacgtttggatctttgatatctgcaattttacatggactcaacttgatatagattntcaccagccacaagggcgattttctcatacaactgttgctgctagcattggttttgcaatatatggcgggtgtg

SEQ ID NO: 22314 - DNA, 1385 bp, Glycine max
ggcagaaccatcatgatgggttatccttcaagactctatcttgttttgcttttgtccatttgtggggtggtttctttagcttccccaattgaagatcagaagagagatagaattactcagcttccagggcagccaaagaatgtgggatttgctcagtattcaggttatgtgactgtgaatgagcaaaggggaagatcacttttttactggttgggggaggcaccagtgaagcgtggaccaaagtcaaggccactagtgttgtggctcaatggtggtccaggatgttcctctattgcttatggggcatctgaggaaattggtccttttcacattaggcctgatggcaagtcactttacttgaacccttatgcttggaacaatttggcaaatgtactgttccttgattctcctgctggtgttggtttttcatattccaataagtcaacagatctgtatacatttggtgaccagaaaacagctgaagatgcatatacttttcttgttaattggtttgaaagatttcctcaatataagcatagagaattctacattgctggagaaagttatgcaggtcactatgttccccagttgggtcaaattgtttacgagaaaaataaggggatcaagaacccagttataaattttaagggatttatggttggtaatgctgttactgatgattatcatgattatgttggcacatttgaatattggtggacccatggtttggtttcagattccacgtataggatgctaaaaattgcctgcaattttgggccctctcagcatccatcagtcgcaatgcatgcaggctctcagagttgcaactgtggagcagggaaacatcgatccatatcagcgtttatacacagccttgtaacaatacagcatcactcagacgtggtttgaaggggcgctatccatggatgtctcgagcatatgatccatgcactgaaaggtattctgatttgtatttcaaccgtccagaagttcagaaggcacttcatgccaatgttactgggattccttatgcatggaaagcatgcagtgatattgttgggaactattggactgattctccattgtctatgcttcctatatatcaagaacttattagtgctggtctccgaatatgggtctacagtggagacactgatgcagtggttccagtgactgctactcgatattcaattgatgccttgaagctacctaccatcatcaattggtacccttggtatgataatggcaaggttggtgggtggagtcaagtttataaagggttaacattggttacagtaagaggagctggacatgaggttcctcttcataggccccgccaggcattcattctttttaggtcattcttcgagaacaagtccatgcca

SEQ ID NO: 22315 - DNA, 545 bp, Glycine max
cttcccaccgacatcccaaaaataaggggtgcaaattgcaataatgatttttctaatcaatataaagaaaaagacgtgaaagaatgtttatatgtgaatttgggtgtgttagatcttataaaatcgtgtttgagaagtcacacaataaaaacaagtattattgtaataaatctaaatccttctatctatcgtattccttgttagaacctttaacgtagaacaatcttatacatttgatctatgggctaaaagggatattattgtgcaaggatatgaatattattattattgttttttcaatgatgtgcacaatcaaagaggattgtggatgcacaaaaaaaattaattctaagtactcacattgaatttgcaaagaatttaaccctttatttatttttttattttagaaaaaaaaataacattgttgtggacacctttcccaagtaaactactccatttgaatgatttgattaagagtttgttacctgacattttttctttaaaaaaaaggacacaagtcagtttcctgtttgattatgcctttg

SEQ ID NO: 22316 - DNA, 537 bp, Glycine max
  unsure (1)..(537): unsure at all n locations
gatccttagagcggccgcttntntnntttttttttttttttttggagtttatcaatcttaacatgtatcaataacacggtgaacattagaagaaaatgttgcaaatattgtcaaggagagtcccatataacatatgaactaaaattttgatgacaagatgaaagccaataatgttaaatgtgtactaaccagagaaagtttacaaattaacaatgctttaacacacacacaaaaaaaaaaaaacataatcacaaatattatttatgatatgatttcatttggagcctcaattcaaagcatgccatcaacacaggatggctacctcttgaagaaattactaggcttcgagggttgctggcttctgaacctggggtgcctgagccagaaaatgccagcatctgttgccacaaaccttgaaaggtgtctcattccaatgccccagacaacaacaaggtcgaaaatatcacaaattgggcttgtggactctagggtctctcccactctgcaacaatgctttgaaaccctcttacctttttt

SEQ ID NO: 22317 - DNA, 506 bp, Glycine max
ggacacaaagtttgaaagacacaagaaacaagaacaagaacgtgacaagaacaagaacaagaacaagaacgcaaataacagaacagggacaaaaacacaaacctagacaaattacgaagaaaaaaaataggataggataggataggatagaacctgtatcaagagccgaagctctgataccagatgatgtgaacctgagtaggagtggatcgtttgatacaggctacggaggttttggatgacgccacttccggtgaaggaagataagtcagggtagacgccacaaggattaccttgataagtctgagaattggttcaacaaggaacccggagagaaactctcaccaaatttgatcaaaatgtccaaaagtttctttttattgaaaacaaaaaccaatacttatagtgtatctgaacaaaaagataaaaatagacatgggccttctaaacagtttgggcctaaattacaataaaaataaattataactaaaaacttatttaacttg

SEQ ID NO: 22318 - DNA, 549 bp, Glycine max
gggaagggagccgaagtcacagccagggtgtttaacaaaagaaaggacggacttctctttaccctattttttttatacgcaaaatatggccgaaaaaactcaacctgtgagagctcattcctttaagtaattaattctttttttacgacgctctatcttcagacttgggcaaaacaaaacttctatgcgatgaaacaaaggaacaacattcattcccttaagaaaaagaaaaccatttccaagccaaaagataattttatatttcacaaccgagatcgcaagcatggaccaaagacggaatctcctcaaaaagaagcgctatcgatacaaaatgctataacgattcctaatggaagtctttcgatgatccagctactcagactggactccttgacttagtgggtaggaattaaatatagagtttgttattcacggagctaccactacttgagcttacacccggactcttactgtagtctcatttccagtatcctataaagcaaaatacaagtccgttttatattccttatagcacgggtatagattacc

SEQ ID NO: 22319 - DNA, 661 bp, Glycine max
gctaaaaaaatagagaaacatattttacattttcaaagtcaatctcaaagtttaaaattatcaatctagagataaatctaagacatggaagcaaccttgatgaccaagattgatagtgcgacatttaaagtaaacacagtccagaagcaatcttgatgaccaagattgatagtgcgacatttaaagtaaacacagtccagatgaaaggacgaactttcagtgtattttgtcataaaaaaatctcttcccatcacaactagagagaatacacagaataaccttaaagtgcctgacaaataaaaccatttcttttacaccaagcgtagctgctagcaacctaatgatattatatgtacatgtttcatcttaaatgatcgctattaaacgagaaacgatttgcaagaggaaccccaactgtgctacttgaatacggtcttgaaacttcattaccaaatggcatctgcggtgttgcattttgataggatggattgatgggaaatgtgggatacgtgtatttactggaagagagtgaacccccatttggcccgttcccacatatcggatagcaagagattgatcattagcaggcaagctcaactgtgtgtcagggtaaggaagactgggaaaaaactgaccatgagaagttctagacatggctcta

SEQ ID NO: 22320 - DNA, 581 bp, Glycine max
tttttttttttttggcatgtttataatattaattgagcagattttgttgatttgtttcaacaaatttggttgcaacaaatttgattgtagcaaagcttattgcaagaaatgagtttgtaggaaatagtattgattcagactattatagtaaatctcgttaaaaaaaatattatttgtattaatctattttagaatattatgttgatggtattaaattaatcaattttactactttcagacatttaataatactatgttaattggatttgatatttggatgaatcatgatataaaatagtagttctaaaaaaaaagatcaaatttaaatggataacccgttgactcgaaccaaaccaaccattcatgaatggattgagttgggttgagtttcaaaaacaaattgtgaaacgaaccgaaccaaaccgatcaaatttgattgggttaagtcctgaatttagctaaaatcccgcgaacacccctacttaccaggactaaattcatatctaagcctaataaaatgttgctcacgcaattaaaaattggacaaccttgatataagcaagttaaaaactgtgcacagc

SEQ ID NO: 22321 - DNA, 908 bp, Glycine max
  unsure (1)..(908): unsure at all n locations
acgcgaaggtaggctcctatacagcggaccgcgcgcggcattgacgttcgcggatctcggggcacgggcccccctccagctgcggngcacggacggccagaacggcatcgcgttctcggtccgtcgcgacgaggtcgtcacgggcgcgacgctgcatctggtttacagctactcgcccgcgctgctgccggacctgtcccagctcaaggtgctcgtcaacggcgaagtggcggcgacgctgccgttgccggccgctcaggccggcatgacggttgcgcgcgacgtgttgatcgatccgcgcttcgtcaccgaatacaaccatctgaatgttcaactgatcggtcattacacgaaagactgcgagaaccccgccagttcctcgttgtgggcaacggtgagcaatgcgagccgctcgacctgacctatgcggcactgcccgagcggccggagcttggcatgctgcccgcgccgttcttcgattcgcgggacgtacggcggctcgagctgccttttgcattcgccgcacgaccgtcgcgggagacgctggaagcggcgggcatcgtcgcttcgtggttcggcgcgctggcttcgtatcgcggcgcgcggtttcccgccaggctcggcagcctgcccgaatcgcgcaatgccgtggtattcgcgacgaccgacgatcatccggacggcgtgacgctgccggccatcgacggaccgatgctcgccatcgccgagcggccggcgcctgccgaaggtcagctattgctggtgctcggtcgaacgccggacgaagtgaagactgccgcgctcgggctcgcgctcggcagcaaggcactcgcgggcacgcaccccgccgtgaaccgacttgcgaacgtcgcgccaaacgtgccgtacgacgcgccgaactggctgtc

SEQ ID NO: 22322 - DNA, 385 bp, Glycine max
gcaaaataaaattcatttaagtttacaagttttaatccaaacatgccctaactagtagtaatgatcttgtacataggtacaagagatcgttattaattggaggccaagatcctctgaatatacaagatatgccattgtcttgcacaatggaaaaaccatttaaagaataacacttcatacaaataatcatattttcagtaacaaacaaatagaagtggtagaactactatcggtaaatttatcaattttccaggcagagaaccaagagtgaactcatgaggattgaattccttattctggctcggcttggtccatatgtatatatatgaattgcaattattcttagcctaggagcaagaatggggggacttatgggcctatactt

SEQ ID NO: 22323 - DNA, 433 bp, Glycine max
gacctacaaatacaaaatccctctttgatcatcccttgttcgcgaatcgtgttcggtaggacaattgtcttggttccttttgctctctctcttggttggagcaacaaagataacaagtgcggcgaaattgctatggacccatctatcatgaagcttctagaagatgacgaggatgaagcaatgcattcaggggtggatgtggaagccttccaggctgccctaaatagagatataggtggagctgggtctacttcacagttttctggctcagatgcagtgttgtctcaaggaagcaataatacatcaagtcaatctttatcacagtggcctacttctaaccatgacagccaaactgactgtcaaaagcaagaatctaaaactgcacaacagcaagatcaaccttcatctggggtggagctgaagcaacgtggat

SEQ ID NO: 22324 - DNA, 248 bp, Glycine max
ggtttgaacaaaggtaggaggttaattgcagtgaagagactagagaagttggtggaagaaggagaaagggagttccaagcagaaatgagagccattggaaaaacccaccacaggaacctagttcgcttgttgggtttctgtgccgagggttctaaaaggcttctggtttatgagtacatgcctaatgggtcccttgaaaaccttatctttggagctcagagtcagagacgtccagggtgggatgagag

SEQ ID NO: 22325 - DNA, 573 bp, Glycine max
ggaactcgatcaaagaattccatcaattattattaatacaggaatgaatgattaaatataacttatacaaactcaaccaactagatcggcctaatgatgaaagttttggatggttcatacaagattttaggttcacaccttattctcgccgttaaaaaaaacaaaaaaattcgtacaaattctaaataggaatgatgataacacattggtacttttctagttgggcctggtgcaatcaaacctaatttcaccttgatttccagttttaacaccaacccttcccaacttagtaacagcatcaacaaaagctttctgaaaagctccttcatttgatgcaaataagttgactgtggcctttgaccttgcatctgtaaacagcacctgatcagaagtgaagagacccttaccttgctgcagattcttgaagtattggttgtcaaacttttgaggcgtgacagggtccatgtttatggctattctaggatcaacccttaaggggcacatttgcctaagttgaaaagcatattgtaaattcagtgttgggtcaattctgtttctggggctgaagttgta

SEQ ID NO: 22326 - DNA, 576 bp, Glycine max
ggagaattactccatagttctaatcacagagaaaggggtgatactctaataaacatattcaaaagataaccatttatacctccatataagaggacccatataaatatatgtagacccactaatagtgtggggactaagccaataagacagatagtacttttaaaatactaatgattatttgtgtttaaaggatactcctaatttgaattgtggaatacgtggctccatctgatattctaagctattactttgaggactgagtccattgacctgttaataattaggttgcagtttgattcaaatctaacataatttttttacactactacaaaaaatatatttaacatcggcatattaatatcggtttttgacaaaacccatgttaacaaaaatgtggtggcattgttgtaaaataaaataagtttattaacatcggttttttttaaaacccctgttaacatccacttgttaacatcggttttttcagaaaaccgatgttgagtgacttaattataaaccaaaattggactgcccacgcactctcgctctcactcttgcaacaccacgctgaccacc

SEQ ID NO: 22327 - DNA, 603 bp, Glycine max
  unsure (1)..(603): unsure at all n locations
gagttggctggtaactttaaaagctgttacttttaattacatagcgtaacaaaatttaaacaattataaaatgatttaattaaataataaacatacaatttgtagacatataaaatgatttcaacaattataaaatcattcaatttatagataacactaatatgtaaccaatacttccagcagccgcaacaacacatctaatacaatgcagacttggaatttagatgacaatacttgaatgttgcaatatgattaattgcgactatatatatatatatatgcaatgcaaagataagaacattaatcggatataacaccatcattattgtttaataagagttccattaagaatatttaaatcattccccacctaaccccatttaattttgtattgatattgaattgattgatccaaattttgagacaaaaaattgtaactaagcttataagttacgaactatttttcacatatattagaaagtttatttaaacttaattaaattgaaaataatttataaccaacggttaacctccctatttcaataagttctttcaaaaaccggcaaccctttggtggttttttcccagccgtcgnacgcgtgg

SEQ ID NO: 22328 - DNA, 659 bp, Glycine max
tggtatcagaattttacttatatctagttgcaatttactgggtaaagacttaataatcttgaacccttcaaccagcatatttcattttatttggtttaataggttagactgaaatgttatctttgtgtattcagatacgtgaggctgacatctctcgactctcttttgcggttgagcttgctgaagaattttatgggaggtttgcatcttgatgaactttttatttgttaataatagtattatcttgaattatcaatgttgctctccttatccttttaatattgctttgtaaaacatcttttgggggataaattgtagttattaactttgtttgtttgattcacaaattctgcacatactaaatttgcaactacggtgtgttgaacagagtgaaggtaaaagctaagaccttagcgttgttaccattgatctaatcttcctttctttctatttctatttattttttatgcaaactgtcattgataatttgatttttgtttgaatgttcggatattttatagggtcaggatgttgcatttgaacctgctaagctcttatggctcatccaacgtgattttttgcgtaagttaatctgagacaaattagagactttgaattagggaaatatttgcttgagagttgagagtcagcccttcaat

SEQ ID NO: 22329 - DNA, 591 bp, Glycine max
tttgaacgaatagcagttaccagaaatttttcaaaatttaaaattgtctctgtccaatgaacaattcctaacatatgcacagtttaacattcagtggcttggctataccacgggtcaaatgtccaaagaatttcttacatgagatgaataaacaatatggttacaacacgtatattagacaagcggaaggaagatcatcttccatttttcaagtctgtgacgtcatatctggagatcatccaatgaaagttcctgtgctgtcagcatcttcaatttcgtaatatattgtgcaggatcatcgatacttgacgagcctagaataacttccctcttcagcttaccagtaagcttgtggcatatcctaagctcagatctggttgctccaccaacaatgaatataaatattcgttgccccattttcttgaaatcactggatgcatgttttagcaccgagtcgcttgaatatccatcatcagagcctctagatcgagcccaagttggtgtgcgccttgatctcattgaatgagcaggaggattgtgagttactggtacagcataagttgtaccgcggaaagttggacttgggtcatt

SEQ ID NO: 22330 - DNA, 454 bp, Glycine max
aagattttaatttgtttgtcttggtgcaaggagagagagaggagagtgagagatggaacgcagctcaaggcttcaagaaagagagaaccacaaccacatccatagccataaccacccttctcctatgaacgctccaacaagcaatgtgagcaactgcatgagcagcagcaacagcaatggcatccaaatcccaacaccaccactcactcccaaaaccattcccagatctgattccaacccttaccctaccacttttgtccaagctgacacctccactttcaagcaagtagtccaaatgctaactggctcatcagacaccacaaaacaagcatcacaagatccacaaccaccacaaccaccatcatcatcatcatccagaaacttcaacataccccccatcaaggccccaccaaagaagcaacaaggaggcttcaagctctatgagaggaggaac

SEQ ID NO: 22331 - DNA, 282 bp, Glycine max
ctgcctgcgctcgagggagcaattgaagagaagaagaagtaataaggtaatactactactgttactctgtgtatccgtagttaattggaaagcattttttaggcttagggtttgtgaattttgatagattagattagatggataaagtgtgtctgaacagtgaggctgtccctgttgctcctgctgttggaatggaatttgacagctacgatgatgtctattacttctataattggtacgccaaggaacagggttttggggttagggtcactaatacctggt

SEQ ID NO: 22332 - DNA, 343 bp, Glycine max
gatctcacttattattattattattaccacctcgtaactcttccttgattagctccgaaattcaagagaagaaaaatattttcaacaaaaatggcttttcatctgttgccaatgtcagatttgggtgtgcttcgttagcgaaacaacaagtacgtacagtgttgttttgtttgtcttaatttgttccatggagatggagagccctttgtgcggtggcattgctataggacttgttttcagcaactgggtcgtaggatatgaacaatatcacttcaatgaaacagagttgtctttattagaggctcatgaagcttccttgtcctacgccgggaccgagagaaat

SEQ ID NO: 22333 - DNA, 532 bp, Glycine max
actggactttgctttaatctttgtcttcgtagatcgacaacacagacagcagcaccatttaggccaacagttacatgtctgtccttggtgctttcttcgaagtaggggcatcacatccataaaatgcctgcctcctgaagacacacccagttcccacatatattggtccttggatgccatctaaacctttcatattgatatcaaagaatacaacattgcgattcgagtatctatcatgacgatcaatcccatcaaatctttgaggaaactgtacatagcatatttttttccctgatgtaggatccatcatgaagcacatggcttcacgaagggccttactgttatttatgtagtgatcacaatcaacattcagtacataaggagcattggtgattattgccgagactctcaccaaagcattcatagccccagctgttttgtggtgatcatatccaggtcttgtctcacgagacacatagacaagacgaggtaattcatttccttcaatgtcacgaacaccattctgaccaag

SEQ ID NO: 22334 - DNA, 706 bp, Glycine max
gtaatatcttcccctttattgtatatatgatcaacaatctgattcaaaaacaacattaactctgtggtgctgtgaaagccaaattattgtctgcaaaatagtattgacctctcctcgtgctgaaaataagaccagatttggccatcaagaagcttcaatccgcatccctcaaacaagccacaaagtccttatcataccttcctccatcttcatgttttttgaagaaaggtatgtcctaacattactttttaaaaaataatacgataaaatatacagtttactccacccatagcacatcaaaatttctctcaaagaatggataaaaacctacttaaatcaacatgaaatttatctagaatgcaaaacggctcccagttccatccaaaaaccgatcagtgtgccaccctttgttctgcaattcccttaagaatacaggaaagacaccattcattttctcataagcctcatgcaggacactagtagcactgagctcatgagaggaactctctgttcgtgcagcatatgcagcaactagccaccccctcagtgcatcttcaccactagcatcttgttccaataccatgtcaatgcatttattcccaaaatttaagagaaatttctcctcggggaacacttgttttaattcaagaagcctggaaggcttaatgaccttgtgcacattcttccccactcttacgtttccaga

SEQ ID NO: 22335 - DNA, 438 bp, Glycine max
gggctgtacttcattgtctaatgatttttgaatcacaactggttctggtgatctgggttgaactggttgtgaaattactttgcggctagccatggctgtttgaggggggcttgctaagcacaaatcacatacaagctttgacacgcccttgcatgctcctctgcagttcaaacagatggaagatttcttcattgtgaagtcaccaaggagcttttggacggcttcatccatggactccaatggaaaatcgcagcagcagcaggcattcatgacatcacggagagtttttccacaattcccatcatggatgtaaatatactcagggggccgcttgtttgcactgccagcatgcagctcaaacacagtgggcgtgacaacctcaaccccattacaaatcttacaaaagcacaaaacaccggagtcttgaattacttcttg

SEQ ID NO: 22336 - DNA, 588 bp, Glycine max
gcaagcagaaaatttaattgacccgagcatgcaagttggcatgactctaaaaacctttaatgtttacatttcaaatgtcgatgttttattaaatgtttagtttcctagtggaggactgaaaagtccaaggtcaatgatgaacaattctcacaatggaacaaatagataagaatgctgacaaatgtctcttcagcttgtctcttcattagtcagcagttgagaagaaaacggttctcatcagaatcggtatcgaaaattaactccagaatcaaccattttcagctctatcgtaagcatttgatttatgcttaggagcaaatgtaaagccatctggaaccttgccaagtagcatctctgatattcgtatccaatcggcagcagagtctgaggccattagtgtctcaagctcatcacgcccatagtaagatggtggacgccagtttaatcgttgtggaaccacatccaaaagaccaacaggtatatacctgaaagtgtagactaagccattccaacaagaaccgccttgttgtctcaaccccttttgtgtcagaaccccagtgttcaagtccaatattcacaaaatctttg

SEQ ID NO: 22337 - DNA, 532 bp, Glycine max
aaggggaaatatgtcaaatatattatcatatcaacattggttaaataagtacaaaatttcagacttaagttacatgtgtggtaaatctaatgaatcagtagtgcgcggtaaatacattagctaacaggcaacgcctcaattaaaaaacaaacaatacagaaacaaatcaagggatcccttgtgtaaatattaagtgacgccataatctgattacaaccaaatcatgcacgattaacttggaagctaatgctccactctaccagtttgatcaatcaaagtgccaacttgatctccacataatgctcttgaaacattccccggttcaagcacgttgaagactacaacaggtattccattctcttcacaatatgccagcgccatcatgtccatggaggtgacgcccctagaaacaacttccctaaaggaaatgtgatcgagtgttatattatcattacggggatggcagtcaaagacgccattcacattagtacctttcagaaccgcatcagcattaagctcagctagatcgcga

SEQ ID NO: 22338 - DNA, 636 bp, Glycine max
attgatcaaaaactaattatataaaaattgaaatcagctagcaaaagaaaggacggttcctgataaatatatttgacccttataatatcagccacacttaaaatattggtcagaaattatacacgaagcatccttttttgccaactgtcacatgcccttcttggctgatatagagcaacggcggaaaatcagtacattgtagaaaggaaatataggacagaaaaagttacaggtagaaaaacacagaaagatgcctccatgaccatgatgtttcttagcaaaacactagagacaatcatcggataatactgaaagctaacatattagcttggatgaggattggtgcactcctcccaagattttccaaaaatttgaagccctgtagacagattcatgctggctattgcacaaaaggtggagcgtccattggcaccattattagcttcccaatttggagacaaattggggaaggagtggtagtcactgttgtttacacttgcttccttagggatcacagcgttttgatgatgaatattggaagacatcaaagtgtgtttcaactttcttctgatgacaatggattcctcaataacgttgaagtcatcatctcttggcacttctccacccacattttga

SEQ ID NO: 22339 - DNA, 444 bp, Glycine max
ggggcctagaactaaaagaattggaggcgggttgagacgaaacttatcttgggaagctgcaacgagcgaagagcagagaaatggtggttgggcagcttgttccttcgaatttgttcctgaatcgttctgctgcgaccagacacagacaccttctttgtgtttctgcaaatgacacaacctcaaccaataacacggataacggttctccattctcaagtttcggaagactcaaggcccagaaagtgaagactctcctggtccacagaagaggaaaggaccaaagccatagacgccccgttcaccttgaagatgatgatgattatgtagccacccctagaccccgacgctctcagtctcgtacacgaggaggagaaagatgggatatgattcccaattatactccaccggcacaaagcaaatcggtgagcgacaccaagtttttca

SEQ ID NO: 22340 - DNA, 361 bp, Glycine max
aagatgacagagaggtccaaaaggagcgactaattttgaatggccgatggatttccaaaatatctggctcaactaattgcgatagcacaccacagagttgacagtcaagcttttttcactcaagttttttgtcgcttggaacaatgtcaacacctttctccaagtggtgcatggtgtccttgatcgagaaaccacaactccactgaagcagaccaagacaaataattctcccaattgagttttgcagctgtgatgagggaggttctagaaaaggagaacgcaagtccagcttaatccatctttgatcaataccgaaaccctaatgaataaggatacaagaaagcacacgggctgacacaaa

SEQ ID NO: 22341 - DNA, 509 bp, Glycine max
gggaagaaataaattttctttactagtattaactattaaggaaccaaaatctgtacaacaaccaggcatgctttcatttcatggcatacaaagtggcatctctatattacttcaaaataatgcaaaatatgtgtaataggtctcatgtatttcctctcctatgtacgaagaggagaaggagataagcttggattaggagtagcattgctgcttgagcttgtgtctttggaatcgtgaagatgttccaataatctcaccacctcatttatgtttggtctaagtttctgttctgtagataggcattgaattgcaaggtgagctattctctttgcttcgcgctttgagtattggccttctatgcgagcatccataacttgggagatcttgtgtttgttggtgaggagtggtttggcccattcaactaaactgtgctccccgcttggcctgttgtcatccagtgcacgtttccctgccatgagttccagaagaacaactccaaaactgtatat

SEQ ID NO: 22342 - DNA, 533 bp, Glycine max
ggaatcttgagatatggtacctgatttgcttgaacttatgtctcctgactccattttttggggagtgtgaccaacatcttttcctgtatagaaggcaaaattgagaagtttaagagtctgaataacagactcttcaccgaaataaaatattccattcatcaggaaagacaaaatatctccatgccttaaacagtacttttgccagttacgaggacgtgcagctgcaacttcggccatagtggaaaggcatttcacaatctttacacttctttcatatgggataggattattttgaaaaccaccagatttgtttgtgtgtttataaagtcttttggcttcagtagagaactgccaagagtctcgaacactgtaataatgagacttgctgccacagagatgcagaaaaagcctcctggcatatcttcttacaaaattggtgtgaggattgttgatgtaagtgcagagaacatcttgataaccatcaagcttcaaatccttaccatgtgataacttgtagaccttttccttttccc

SEQ ID NO: 22343 - DNA, 419 bp, Glycine max
  unsure (1)..(419): unsure at all n locations
ntnttttttntcaacccgtttttaggcagcacaaatatccacatcctccacgcactagaagaggcacccatgttagtgtagagaggaaacccattttatttcaaacaagatagtttcctttttttaaaagcttgtagctcctctgagcatttagcttttggtgggggagggagaaatttatccaatggatctacatatttttgctcttcttgatcagcttctccaagttctgcatcctctgatctgatcacagcatcattgttcatggtatcagatttcaatggctcaaagaactggggagtgttagcttgattgctaggtgtcaaaacttggactgttcccaaaggtgttctgtcttgaaaatcaccgttggtggcatgaagctgatccccaatcacgactcgaacgctaccatatat

SEQ ID NO: 22344 - DNA, 583 bp, Glycine max
ggcttgggggaatatggagaagattgaaaaatcccggtatgatattagtaacagagttgatgaaagagggcaaagctctacttccgacaaaagcctctgcctcaatattaaggtgctcatatcgaacttcaattgttggaatatcaagtccaactctatcaatacgctccttgagcttgaggaggaacctctcgttgtcctcttcagctactttgaccaacctctcaagaagtttgtgcctctcttgggtgccgagatcagagacatcgatttcattggcgacgccatgggaagctgtgagcaagcctttcctgagacggttgtaggtagggagcttctcaagtgcagcccatttcagagcttcttcgtcatcctcttcacgtgaagaccttgagaatacctccacgccactgtttctccaagccgtggaacttcttcgtaaactgttacctgctctgtataaatcacttccctcccatcaggacccccctggttcctcttctctgggctaaaggaattaaatgaatgttgtaatgtgtaaggggtatccgggtttctaatgcggtgatggtgccaatgagtc

SEQ ID NO: 22345 - DNA, 1061 bp, Glycine max
atcagccatataaatttatagtacattcataaaataacacgcataataaaaattgagttttggggctaaaagaaataagccagcatagaaccacaatcaaacacaacctaaaaagtacaattatgacaatattttcttacataacctgaataagtaaaatgtcaatcatagtttattactcaggtagcatggcctcttctcataaaagttataactaggatggtgagcgaggcgagaaagggtgctattcatagaagctaacaaacaaaggtggggaaatagtcaactgttgcagcagcatatgaccaacttacatttttcatggttcaaccccgaattgttcaacctcaactttgagagacttgaggtattttacagcttcatctaaaacagcaacagaatccatttgattacctccacctggcacaatctttctcaacatcctcaccatcctcttcatctcccggtgcttcccttcattgtggcagtaacccccagccccagaagacttctgtacagaagatgatgatgatgacctcttcttccttgattttgagcaataactggagcaagtatcggataaactttcatatttttcacgagtccttgctgtgctgacttcttcctcgtcaaagtcttctagttcatccgctcctatgctcaacaatgcatcaatgtcattaggatcttcttcaaaagcagatgacaattctctttccatttgattgactttgttcttctcaaaatcttgagaaccagtagcatgagcatgtaagctaggactgtcaaatttgtaggtcattgcaggatggaacatgatcctgctttgttgatctgtctgatcaaagatgacaaagttcttggggcaagcctcagagggtagcaatttaaatctttcaatgggtgttatctgcctcacacctggaggtaaatatgcatcaaaggtagaagcaagtggagcatgcatatgaggatcaatggtctcatcagccaaaggaagtcccatcttatctgggagaaaatattcccgagtttgcattatattatctgttcaatctgac

SEQ ID NO: 22346 - DNA, 555 bp, Glycine max
gcaaaaggaaggagtactaagtacaattttattcaggttcagctgatttgagtataataatttgcttcatttgagaaatatgaacaactacactaataagcgatacataagtatgtaacttacacttgaaagacaattagaattaaaaagaaaaaaagcactagatatatccgagtggagggtgggagaaagaatttgaagaaatacaaaaggcctaggcatgaagaaatataaaagcgcgggatatttctacgggatagtgtgtctcccaaagtcttgaagctcatataggttaacacacaggcttgtggagaattaacaatgcagtagaaatatcaaaaatttcagctcccttatctttcttctcatgcaaggtcatccagcaacagaaacaggtacattatacctgtaaaagggaaactgctttgaagaaaagccaataagagggtactataaggaaagcttaatacgttgctcttccctttcctcataatatactgatgagcactggttttacctctctgccatgcaccttttatatggtacaaacccttt

SEQ ID NO: 22347 - DNA, 386 bp, Glycine max
tgtcaaaatattgatatagacttgtttacaaagctacatcatgcttcatatatggtagcagtagcaactatgctaggtataatttgtaatatgcacaaacttcttatagataagtggaattacttttaagttatttacagggtaaactgatcttcatgtgaaagaggatgttaatggagagttacagccattaattggcttagtaatcaacatcactgagaatccttttcagatcatacttctgttgtgtgggcagccttgatggaaacataacatcaaacatgattctgaggtttcctttcttgccaggttcctttgagatgggcatgccttcatttgggaccaccacctcatagccaggtttcacaatatcagccactttgatt

SEQ ID NO: 22348 - DNA, 387 bp, Glycine max
ggaagagaaagagaatgtattttactcttaatcccaggaggtcaacattttttaaatgtagtatgaaagaaagaagatcgacaaaaacaaaagtgggacataaaccaaagcagagtaataaaatgccatctagagatacgtaaaactacgtttttgctttgtcccaattagtcttcactatcggaatcttatcttcctggaccaaaacacgatcactgaaacctaagctacataaacatgtcaccttttgagatattacagctattgcagcactaaatcatagcaagttagggtatagccaatttttgcagctcttcatctttaagttacttgcttagtcttccttcttatccggttcgtccagcacagccaatctttcaacaaggg

SEQ ID NO: 22349 - DNA, 385 bp, Glycine max
gcgatacaaagccaaaatgcttttactagatcacggggtggtcttccaattggagggggaatatctttgaattctggtgtgcatcctgttgcagatattccactacatgatcagttttcttgtggaaatgactatgccttgaaggtaaggaaaccatatactatcacaaagcagagagagaggtggacagatgaagaacataagaagttccttgaagccttaaaggtatatggcagggcctggcgacggattgaagattcttcgagagtctagtagaaacagtacaaccttggaggagtcaattgaaatcccccctccacgaccgaaacggaagccaattcatccttaccctcgtaaactagttgagattccaaagacagaaatt

SEQ ID NO: 22350 - DNA, 677 bp, Glycine max
agcagagagagaggtggacagatgaagaacataagaagttccttgaagccttaaagctatatggcagggcctggcgacggattgaagaacatgttggcacaaagactgctgttcagattcgaagtcatgctcagaagtttttttctaagattcttcgagagtctagtgggaacagtacaaccttggaggagtcaattgaaattccacctccgcgaccaaaacggaagccaattcatccttaccctcgtaagctagttgagtttccaaagacaggaatttccaactcagaacacccactgaggtctaattctctgaagtcatcagattttggtcaagaaaacaattctcccaagtcagttttatctacagttgtttcagaaactgttggttcctccgattcagatacatctagtcgatgtttgtcaccagcctcatccattagtggtgtccccacaaacagatttccacttgctgagcccaaaacatcatttaaggaagaagggtctgcaccaagttcagctcatgatgagcaacctcctgtgaaactggagttttttcacaaagaaagtgtttctaccagagatgatgcaacagaagaatcatctggtcgtactctcaaactttttgggaccactctactggtaacagacacatgcaaaccttcttctccacacaag

SEQ ID NO: 22351 - DNA, 554 bp, Glycine max
ttgtgcgcagcgtctggcttcggaatggctccgcacgtgccggctctggtgccgcacgtgctggggttgatgatgacggtagcaaagcgagtgccacgcaggttccgttttctgttaacgcgaagcgcgtgtttgaggctgcgtttgagtattccaagtctctgggacacaagttcgttggccccgaacacattaccgttggtttggtcaaagtagatgatggaagtgttagtagggtcctttacagattggggacaaatggaagccagttggcatctgtggcattctccagactacaaaaagagattgctaaagatggtagagaaccgaatgtgatttccaagggggtgcctaacaaatcgatttctagaaaaggttctgatgcaggagcctctgccacaacaggagaggagagtgctctatcacaattttgtgtggatctcactgcccgtgcgagtgaaggaagaattgatccagttgttggccgagaagttgaggttcagagaattattcaaattctatgccacactaaaccatccaagaaagaactatga

SEQ ID NO: 22352 - DNA, 339 bp, Glycine max
  unsure (1)..(339): unsure at all n locations
aggaagggttctgcttttgatgttgctattatacctcttattggaatgctgacctgaaatagatgagattatttataaaattaaagagtcaggtaagtggctgcttgatgcgcagaatgcgcatactcctctgtttacgcagtgatagacgcaacaaacacatcaatttttatatatattgagattaagtcgctcttgagtgaagatcagtgatttgaaattgtgaactcctccatactcatttgttgaaaggttgaatgttattacatgaggaagttttagggattacgagaatgacttttctaatagctngagtgagttattcagctgatctagtat

SEQ ID NO: 22353 - DNA, 373 bp, Glycine max
ataccattctttcccaaattatattcctaactgtttctccaggttacttttaatctgccttattggggaaaaaaaaaggttggtttaaccaattttctaatatttcaggttaatgatatttgggctcttggatatgcttcttgagctaaacagatcttttcctttttgggtcctacttctgactgtagtttttttgttccacaagtttttctgcttctgattttctaaaatagacaaccttgaaataagaggctgtatggttatggtatatagcgctgctgtaatgtttagcttactatccaggtttcatttgctggctgaatttgatgatggtaagcgtagctgtcgtaaacgccttgcaggccacaatgag

SEQ ID NO: 22354 - DNA, 361 bp, Glycine max
tctatgaggtgtttgatgtctggggtatagatttcatgggccctttttcctgtcttttttgattatgtttacattctcctcacagttgactatgtttcaaaatgggtggaagccaagcccactagagctaatgatgctaaagttgttgcagattttgtcaggtctaatctattttgcagatttggagtacctaaagcaattgttagtgatcaaggaacccatttttgcaacagaacaatgcatgcccttcttaagaagtacggggtggtacacagggtatccacaccataccacccccagaccaatggacaggcagaaatttctaacagggagatcaagagaattttagagaagattgtgc

SEQ ID NO: 22355 - DNA, 389 bp, Glycine max
cagcctgattttttaagcaaagcaaacgtgccgtccaatgaacatttctttgaacacctaagtaaaagcaaagccatttgtgacattcgtataagaggcaaacaaatatatacttgaaattatttacaatagcatacatctaaatctgatgtatattttggttagatatttcaaaaggttaatgtaacatcccaatttttcgtaaataaatttaaaaagttttttagtaaaaaaataaataaataaataaatatagagcaaataataggctgagtaccctaggtataaatagttatgttaagtcagctgcctccttttggcctcattttcgtttttccccttctcctctcaaaaccctttctttttcccgcagctcaccaaaccagtct

SEQ ID NO: 22356 - DNA, 412 bp, Glycine max
tcgcccacgcgtgcgtccacgcgttcgtcggttgcatttgacgacagaagagttatgtgttaatgtgacttaacaattgtagctaacgggatgtttttatgtaaaatatgcaattggtttacatttgagttctttttttccttagaattaatcaccgttggatttcaataattcatttgttttggtgtcttgtgttggacacaacctgtgcctaattcggctaattttgttttgttcataaaaataatgtgttaataagatcaaattttattggaaacatgtgagttagtgtccataaacaaaattcttgtttttttaagcaaaagacttgaaaaaaaaatgaaggcacgagacaaagtgggtgaaaaaatcccaactaaattcacaccttaacaatcacccgcaataaaaa

SEQ ID NO: 22357 - DNA, 290 bp, Glycine max
ttctcagggtactaataataatctgacctttctcaagcagtttcaagtcggtcgcagtttctccagtcaattcaaccaccctcaatttaagaccacctccaaatttcctctcccaatcacgataccgctccttggcaagagcttcaacgggtgcaacataaacgacacgcatgacactatcaggccctttttgatgattcctcaaaatagcaaactctgcacatatagtcttaccgctccctgttggagcagcaactaagacattgtcatcagaattatacagaactgtg

SEQ ID NO: 22358 - DNA, 361 bp, Glycine max
agaagagggtacctcgtcctttgctgggaagtctacagcagaaccggatgaaactggaagtgccagcagaaggagagtttcagaacaggctcggagagggtctgaaaaaataggacggctgcagttggaagtgcaaagactgcaattcttacttctgaagttgaatgatgaaaaagaaggcaaaggaaaagcaatgatggatgaacgaaattcaaaagttcttttgagagattatctctatgctggtggcacgagaagaaactaccagaagaggaagaagaaaacacacttttgtgcatgcatgcaacctcccactaagggagattaagtcgacaggattttagaatagtttaaatgactt

SEQ ID NO: 22359 - DNA, 380 bp, Glycine max
tatatatatatatatatatttaaaactaaaaaaatgaatttagaatgaaaatgaagaaaaaatagggtggggtgcaaaaaaatgagttagataggtatttggaggatgatattgaagatgaccactctgagtttgacattttgaattgatgaaaattgaaagcatataaatattatatttttttcttgtatagctagagatatattattagtcattcttgtatctactgtatcatctgaggctgcatttagtacaaattgttaatgacttgcaagttgaaataaatgaatcggaaaaaattgaatcaagtgtgggatctcttatttcattttttatatttgtatgaaatatcaattaatttattgtgtttaaattgtaga

SEQ ID NO: 22360 - DNA, 383 bp, Glycine max
atgcacattaggaactctcttcattgacattgttctgatttccatgtgtctaagaggcctggttctccccctcttcttttcctgaatccccaaaagtgtcacgcattcatcttacaatactcacaataaaactttgatgactgtttttcagttattgttagcagttgctattatttctattaatagctactaaggttttactccctttctcccattcctgttcttccttgcatagaccctattggtggtttactatcaatacagttttgctaaaaccacataaattaagaaaagagtgaattatattcagtagcaggttcattcccatgtcatttagatatgcagaaacaatacatatctgtcatgaatgtgcacactttggc

SEQ ID NO: 22361 - DNA, 392 bp, Glycine max
gacaaaacgaaagtacactgccgttctagctgctaattaatctcttattcagaggcactacttcagttctgctactgtcttctgctttgtccaattatagtcattttgaacagtgatgaagcaagggtcagcaaacaaccaacagctcttttgggcaagagtggttatgcgcaaatggcttaacatggctagtaacgagcctgattacaccgctgaccctgatgatgataatgaggatgaccctgaaagtgactcagataatgaagagttgggaaaacggacacggtttggggacagcagagaggaacaagctccaattgagtcaaatgaatttcttccaaggttaaggaggcaaaagtcattaacttctaggtctcagtatataaacaaaa

SEQ ID NO: 22362 - DNA, 533 bp, Glycine max
gggaaacaaatcaacaacttatatctgcacaagggaaaaaaattaaaaaaaatcacattttttgaagtcacttcctaattgtttgggggatattcaatcaggagcgacgtctgagacctacctaagttacaacactcaatgaaatgacgaggacgcacgcatcctctcccctcctttaaactattttgcaggtgccatcatcctctctattactttcatagaaaggtcacaggaatatttaaccaagccattgctgggctcgacggtctccgctagctccaacagaatgacgaatgctaatcttttcaccagcatatttttgttgaagccattcaaaagcatttacatcaagttttccattaactgacttcccttgcttccgacgagtttgttgctcccgtattgaagcccacaatttcccaacagcatccctctggcgagctgtaaatcttgccacattatcaaaggcatgcttcactaaaatatcaattacagtttgacaccagggtgttttataacgccgagcagcaatt

SEQ ID NO: 22363 - DNA, 505 bp, Glycine max
ttcacaataccacaacaaaatactaagaagaaaagggcgacaccaaccaggcactattgaaaccagaccaatacgttctccaaacagaaggaagaatatttagatccatacaaagcagaaaaatggttttgggcaacgcaagactaattttctatttccaaagtcaacgcacaagctttcgccatctagcaaaaacaaattcactctgagtgcgtggttctcattaatccctttttcagagtagaaaaacaaaacaaagattatcgataaatacccaatatgttaatgaatacctaacactcagaattaaaaaaaaaacataaatgttttagataatatgatttcgcgtataaaaaataaaaaatagttattaggtgtttaaaaaatgaatgtccatatatcataaagaaaacatatggtgaaaagggcaaaggcgtgcttaaccaaaaacaattataaacatgacaatttcaaaggctacccaaaataccaacactaaaaatat

SEQ ID NO: 22364 - DNA, 459 bp, Glycine max
gaaggaaagggtaacaaatggcttggcctttattgatcaataattcaacgtataaccttaaaagatctcaaataatatttgtacttttttctcactgcattttaaatttcctttttcaagcagaaaatgtgtcggataaaataaaaataaaaataaaaacatgagatgtttcttgtatatatagaaaaaagaacaatgctgaacgaaccacgctactgagattcatccattgggtcatgacggttacaagattgagatctcaaatcctgatcatcttgcctagcctcttcagactcaaccgacttggaaacagaatcctcaagagcctcaagaaaagacaaaactgtgaacttgtatttacttggatcaattccaaattgagacaagtctatctgtcccgttcgaagtacataagtaaacgaatctacttgctgacggaaaggtgggctctgcaacaac

SEQ ID NO: 22365 - DNA, 981 bp, Glycine max
aaaccaacatgtgtgagagatttggggtggatcctatgatttttgtgatttctagtgatggtgccactaggttttctacaatggatggaaaacccatcttccatttcttgaacacttcaactttcacggagtacacggtggtggattcagcatgcgtcgtcaagattcacgttgatggcgatggcgacctcaatccctacattaaaagacttaccttactcagttgtggtgtatctacgggtgttggagctgcttggaataccgctgatgtgcattttggttcagctgtagctgtctttggtttaggtgctgtgggtctctctgtagcagaaggggcacgagccagaggtgcatccaaaataataggcgtggacatcaattctgacaaatttatcaaagcccgagcaatgggcatcactgacttcataaatccaagggatgatgagaagccagtttatgagaggatcagggaaatgacttgtggaggtgtgcactatagttttgaatgtactggaatttaaacgttctaagggatgccttcttgtcagctcatgagggttggggattgactgtgatattagggattcatccatcaccacaattgcttcccatccacccaatggagttgttccaaggtcgcagaatagtaggatcagtttttggaggcttcaaagggaagactcaattgccacattttgccaaagaatgcatggatggagtggtgaagttggatgattttatcactcacgagcttccaatcgaggagataaacaaggcctttgatcttttaaccgtcggaaagtcactgagatgtcttctacacttctaaaagaattgtgtttctgagtgttaatttcttttttacttcagactcacgtctaaaacactattacatataccctaaaccctaaagttcagtttctttgacataatttaaattcaagataagcaatttctttgctacaaaaaaaaaataataaa

SEQ ID NO: 22366 - DNA, 359 bp, Glycine max
ttatgacacttacaacactgttagaaaggagctgttctacgtcggtctttgtcggtgttcaacgacggtgcacgaccatctttaaatgcgacgtcgttgtagatctccgaccaatctacgacggtcactaagcacagttttagaaggacgtgattccggcgacgggactgacgtcacagttgtagttgaagcttcgccttcgaagacgttgtcgacgtcagcaacgatgttgaaacatacgcttttaaggtagggctttgacgacactaatgtagtaaatatataacgttcaaagacgttgtcgacgtcagcaacgacgttgaaacgtaccctttattatgtcgttgcatccgcaacca

SEQ ID NO: 22367 - DNA, 360 bp, Glycine max
agggaacgtaaaaaatcaaagtcatgtttgcacattcaattaaaggctgccgtcccttgggacggacgtgtggggtgctaataccttccccgggcgtaaatacaactcccgagcctttcacttaaaaagttcgttgatcgcgtcttttccggtttttccgacgttttcctcaaataaacgttggtggcgactccgcgcgtattcctttcgtggaacacgcatcccgcgagtctcgcgtcgccctcccgccgaagggttggttgcgagagttggcgactccgctggggactatttttagagagttaggccatttaatattgtgcaaattttgccatgacttactcctttgttggcttcccc

SEQ ID NO: 22368 - DNA, 504 bp, Glycine max
tagcttccagcagaggggtttaattccatctccgtctactcctcaaactcctttacagatgatgcacaaagctgaaaagaaatatgaggtgggtaaagtgacagatgaggaacaggcaaagcagaggcaattgaagggtatattaaacaagttaactcctcagaatggtgagaagctttttgatcaggttagagcagttaatattgacaatgtggtcactctcaatggtgtcatctcgcaaatctttgagaaggccttgatggaacctaccttctgtgaaatgtatgccaatttctgttttcatctggcagctgtgttacctgatctcagtcaagacaatgaaaagataactttcaagagattattgttaaacaagtgccaggaagaatttgagaggggggaaagagagcaagaagaagctaataaggctgatgagggtgaggtcaagctgtctaatgaggaaagagaagagaaacgaaccaaggcaagaagacgtatgttggg

SEQ ID NO: 22369 - DNA, 341 bp, Glycine max
gaaggtccaaaaatgagcagcatgaaggtagcgaaagggcgtatcctggttggtaaatacgagttgggaaaaacaattggagagggaagctttgccaaggtgaagttcgccaggaacgtccagaacggtaactatgtcgccatcaaaatcctcgaccgtaaacatgtcctccgcctcaacatgatggaacagctcatgaaagaaatatcaaccatgaagttaatcaatcaccccaacgttgttagaatacttgaggataggtgttggcaagcaaaacaaagatttacattgttctggagtttgttgatgggggagaactatttgacaaaattgctgcaaat

SEQ ID NO: 22370 - DNA, 414 bp, Glycine max
gattccaaaaacaaagagctctttgtggctttcatccatcttattacaccttagttttcctggctcccagaactttctttcatactctctgttgccttgtgccattcatcaatagttaaggtcttaaggacactaaatcttatggaggtgaccaaccttgtagtcttgccagcagttttggcattctttgtcctttgtctatatttcatcactaaagttgttagactcgggaaacatccaaaccttaatcttcctcctggaagattaggatggcctattgttggagaaacctttgactttatgcgtacaatgaatgagggaaacgtgttaaggttcatacaagagagagtggagaaatatgacgccagggtgttcaagacttcaatgtttggagatcctgttgttgtgttttgc

SEQ ID NO: 22371 - DNA, 552 bp, Glycine max
aggatcctctacagcggccagctgttttttttgttttttttttttttttttgaatttaaatagtatgtatttagttataaagagaaaggggttaaataattgcttattgcatgcttaactactttctgtttctcttttctaaattcacttactccatatatgcatgcattttatttttgaaacacttttagtttcttcacggttcacaaacttatactttatttcctagcaagtacattagatctagcaccttctatttctattctttggtaatttaatctccctgccaattttcctactatttactaaacttaatttttgttactttattccttggtaatctacttttcttcatcggacagttgactcactaagtaacccgctatttgattcactatcccctaactaactaactaacggacctatcaaacagcctcttaagttgcactgatagacaaagagctttcctgctaattgaagttgaataagactactacattaataagaggaactcctccctcggctgattccaaatgaacatgatgaataatc

SEQ ID NO: 22372 - DNA, 138 bp, Glycine max
atggattctatttttttttttttttttttttctgggccacattttgtaccaaaacttaaacctcaacctgcttaaaatgaaagaatctatgtcatatgttaaaatgaaagaatctatgtcatatgtttgatggttata

SEQ ID NO: 22373 - DNA, 398 bp, Glycine max
aaaaaaagccagcctcctgcaaattggcaatcgaataaggggtacatgttttaaaaggttccatacaagagcaacaatattacaatgattggaattctccgtctttccacagtccaataattcgatgttatcgtactccatagaatctgcgcctgaaagaaccaaatcctcacttatcaaaatactacctcaggagcccttcctacacattccaggcaataacatttaatataatagtttatatctcggaaagaaacattccccactcgagcattttacgacaaaagagctcacagacatcaaagcattgttttgaacaatattaatgcttccccttccatcatcagtattacaactatgaactcttcaagcttttatacggaccacaaatgaacatg

SEQ ID NO: 22374 - DNA, 573 bp, Glycine max
cgtaagctaggatcctctagagcggccgcgtgtttttttttttttttttttttttttttaaaaaatttatgactaattaatttaaaattaatggcggaaacataaattgaagctatgacttttaaattattaacacaaccccctaatgaatcaattacattataaaataatataaataacgttgttatacataacactaaaatttctaatgtatatttaatgggcatgtaaatttaaataataaattttatgacaattaattttgacataaatcataccaattatttaatttgtatattttttataaataaaacatatttactattaaaaaatttaatatatattaaatttaataatagtaattttttttaatgtacaaatgataatttaacatattaataattaaaaataaaataaaactttaagaaattataaaaaaacagaaaaccaatatgaacgaagttcatccatatgatttatatgaatgaagttcatccatataaaacatacagattaagttcatccctataaataacataaatttaatgtgattaattaaattaattattttta

SEQ ID NO: 22375 - DNA, 569 bp, Glycine max
ttttttttttgggggggggtcttatttaatcaatttccggaattagaggcaatgacagttgcagtacttttgaagaaataaacttctgcaattaagagaaatataaaaaataaaaaattgttaaatagtataaaaacattctataaataaatatatctcttttttttagttataaataaataaatctctaatctttatacgtagatgaataagtatagtttgactacgaataaaataaaaaaacttgtaaaaacatttttcttaaaaaattcttatgaaagaagcaaaggactgaactacttgatagactagtaataatttgatctcgatatcatcgcgacgccgcaattttaatttcaagggccatcttcatcaattattcatttctaattttttaagggagagaaaaaacaccacggggtgttgggcttcgagattcgtgcaccatgatcaagtggcacacgcctgaatcatggcattcatttatttatttatttttgggtaggggggtatgtccgactctgtgatctacgaaactcaaatttacaatattagattatatgtgctct

SEQ ID NO: 22376 - DNA, 356 bp, Glycine max
aaataaaaatttttgcatggataataatttttggagttcacctacaaccaggcacattaaatgataatatgaaaaaaaacttaaatcaaggggatagaaacggaaaacaggaggtaaataataaaggaaaacaaaagagcttttatcagtctttttgtctccatatttaaactacttcttttggctggatctgctcaaagtcaaaaacctcaaacatcagacgcctcacatcacgtttcccataaacaagatacgaaagcccatgaagagcttgttgaacagctgtcgtggctgggtttctctttctccggttatgctcataagtgtcttgaaccttctcatcaaatataataacc

SEQ ID NO: 22377 - DNA, 411 bp, Glycine max
cgctttgagaatagagtgatcataagacgagagagtatatctggattctgcgaagaaagcagccggcaagctaagaagggagcgtaatgggtgaagcattgtttgaccttgaacaagttctcatgtccaagaaggaaatattgacacctcaggaggcggatattcttctatcatgcaaatctaaatctttgagagatttcactgctggtgcacttgctgcgggcacagctgcatgggctgcaacttggaaactcagtaaaccatttcgaatcaacctttcggcaggagctggtgctttctgtggactgtggatgttaagtagatccttgtattcttgtgcagatcagattcttacaatggattgtagtatattacaaaagggagtaaccaatataatggtgaccaaatacc

SEQ ID NO: 22378 - DNA, 353 bp, Glycine max
gacgcaacctcaaattacacaaagaaactattgttctaagtttcaccagtaaattttgcttcacttgcaagattccaactcaccccgttatgatgggtatctcacattttcttgcaataccttacccaatcctagggcacatgaacccccttcttcagttctcccaggttttggccaaatatggctgcaaaatcaccctcttgagttcagatgagaactacgaaaaactgaagagtgcaagtggtggtgggaatgacaaagtcatcatggactcacacataaagttggtgtctctccctgatggtgtggaccctgaagatgacagaaaggaccaggccaaggttatttccacc

SEQ ID NO: 22379 - DNA, 487 bp, Glycine max
agtctcataaattgcataatttgtaaaataataattaattaattccatcacatgaacatatattacgcgtacaagaattgaggagtttgactgagggtacacactgaaaaagaagatagagaagatacgttgttacacgttttactacaatgagagagtgatggaaaaggccaaagagagactctcatgctaacacaattgaaaacctaacatattacagctacccgttcaggcaaatacgttaatcaaaagaagaacccttaaatattaataccaaattacacgtacggtaccgttcttgcgttgaatgagggccccacttggcaaagtaattaaagtcaattgtacttttagattaaatattttgggacctcattttttttttcctttccttctttctctttggacttggtacattattgcttctagttcacacattgctagctgtctcaatcacaggcacagggaccattttttgtacatgatt

SEQ ID NO: 22380 - DNA, 476 bp, Glycine max
cacacaaaccatatagttcttttattacatcgggggcgcaaaccaatagagtaaataacacaaattccactttgtgagtggctaaacaggaatgcgaagacttattgctctgtcccagaactatattgcacatgaagtactccggggcaggaaatctaaacacacaaaagaagcatcatacatgagtaaaattttacaacattccaattcaaaccagccatgaaaagctaagattttatttccacacacgagttctattaacaaagacagaggtacaacactcggttcaatccgtagcaattcagaaatccagcttgcagtcaatagcttctccaatagtcaagaagacccttcctccaattcttgtgacaaagttggtcgcctttagcttataaatcacttgccaacgaggattggcaattgctagatgcttcccacttgagaccaaactcttgtgcagttcctcaagagaagca

SEQ ID NO: 22381 - DNA, 287 bp, Glycine max
  unsure (1)..(287): unsure at all n locations
nnnnnnnnnnnnnnnnnnnnnnnnnnnnnnnnnnnnnnnnnnnnnnnnnnnnnnnnnnnnnnnnnnnnnnnnnnnnnnnataacaataatgactcaaataaccataaggcacatcaattcattatatttcaaaggtgccaacgacatcaattcatgttgaaattttaagtacaagacattcatttgatacgtcatatttacatttaaaaagaaatgcaatgacaatgtcacgggaatacatgcagaatacgcactaccatgtgaagagagaagggaagagcaaagct

SEQ ID NO: 22382 - DNA, 730 bp, Glycine max
  unsure (1)..(730): unsure at all n locations
nnnnnnnnnnnnnnnnnnnnnnnnnnnnnnnnnnnnnnnnnnnnnnnnnnnnnnnnnnnnnnnnnnnnnnnnnnaaaggcaaaggctatcttaaattattgagaaaattcaaggataccttatggcaccagatcaaatccaaattagacattccagttaaaaaccattactaatgtcaggtgactgagaatgtaatgaaaattattctcttaaggagcaatccctactcagtggctgacagatagtcactgataatctggccgtaagagaagataaattacagaatgatgttaccaagatcggtactagacagcagctatcgccttgcaaggattcccgagcaatctctagggcctcctccactgatgttgcattttgaagtttggctttatcaatcagaggctgacttctggcaagtttaggcaggagttgaaattcctcagggctcccactttcaagaagaactcctttcagcttaccagattcaatccagaaggtagatattttaggatcaaaatttccaatttcaactgtttctccaacattgtctccaaagaactgccaccacacttttctagggcttccttcatattcaaaaatcctcgagtagaagtatggaagataatcatacgtgtgagtttgtgcactgagtaatgctttcacacagtgctgtgcagagcgacgggcatgatccacatgctccactcgagagatacgattataaatcttc

SEQ ID NO: 22383 - DNA, 568 bp, Glycine max
ggggtgcttatagttacccttaattagatgaaggctgcccaagccatagtattagtaactcattcccctgcagcttcatgcaaaaattggaaagtcatggaagtacatttgaggtagggaaaaagtaccgccaagagaaaataacaactcacaaacccactcccaatgctaatttcctatcaaaatttccccactatctacatgatcccgcaaatcaaatcactataagacacatgtttataatatgcctaattatgatataatcttcgtactttgtgaataagccttcggcatataggacacactatgctctcctcatctaaaatcctctgtgcacagtcatagcaagtggcacaatgtccacaaggaacaaagaagctactgcgttgttcatcataacaaatgcaacacaatttttcatcatataactcctctgaagagctactggatgctcctgaatcttcttcttcatcatcttttgcatttgttccatatgtcaatcgatttgtctccacttgcatcaagggctgagtttcggtttgccttgcaactacattacttgttctgt

SEQ ID NO: 22384 - DNA, 479 bp, Glycine max
ggtattgaatattttatttgagctacatacaaacagtttattcaaccaacaagcaatggtagattttttttacaatttttctgcggcagcttcatgtattagtttttagaattgttcttgaatcattcatacaatggcttttgcatttgtttttgagggggaaacaaaatctttaggcaaagctttttgaacaacgttaaggggacatcaggaatgtgcccttcaatccaaaaacctactaaaaatgaatctgaaatccacaaataatgaaccaacaacaaatctacacaatttgcaagcaaggaaagctcacaagcctaggcatcatcactccaattaaatgtctcggcaattaaattcaaactagataacctcagcagcaacagaattcaaattcttcgaattggaaccagaaaccccatcctgtttcgaagtagtctcactctgacctaaaatctggcctttactcaagcctaatg

SEQ ID NO: 22385 - DNA, 400 bp, Glycine max
tttaggcattacagtttattcttccatacaagatgcaaccccatctaattcttctctaatgaatgaatctatgtcactcgaaaacctggcggaatggttctgagcaaagctcttccatagtgatggcggataacatggccagtgaacaatcaagtgtaatgtcaaattcggccgaatttacaagatcagcgaggaacatggaacttgaatatgtaaaggatatattcagcactgcagagttgatgacagaagaatttgtggtgggtgagacagacaagatcataatgccaaatctctttgacaagttggagaataaaggccttggggcagaaaactatgaagagtactctaagattgagaggagggctatatttgacactgtgagtgagtgcctagaact

SEQ ID NO: 22386 - DNA, 525 bp, Glycine max
cataaaaaagaccatattaaaaattctccggattcctcagccaatgttccgacgtgctctcctctccctctgttctctattctccaactgtacatgttgcaaaacttgatctgtctctttccttttctttggtaaaaaacccaacacctaaccgttttggtgagtgctgtagtgaaggggcatcacacagtgtcttttctttgaccttttggtttccaatgggaactggatttccacactttcactttccatactcctcctattgagcactataatagcaccaaccaacttgttcaaaaggactacaaggtggtccttcttcctttactttcattcatgggaaaggtcacaacttctgcaacccagcctgtatctcaagaagcttccaattatgatgaagtttttatgcaacagagcttgctctttgatgatagtctgaaggatttgaaaaatctgagagcacattatattcacagctgatatttgactctatactcacgatgacaaaacagtgtgtagaacatg

SEQ ID NO: 22387 - DNA, 467 bp, Glycine max
agtatgtgcgctctacctcagatttaattgtggtgaaaggaagaccccatcaagcaactacgaggtccctaccttgtttcgaatactacacgtattggggcttgatgaggttgattttgggtggggcaagcccatttatggtgggcctgccacgggtggaatgacaagttttcctcaaatgacaagcgtgtacgtgtcatgtaagaaccacaaaggagagcatgtgatagtggtaccaattagcttgccagccaaagccatggagaggtttgctacagagttggaggggatgctaagacacgccagccaaccaataatgggagctcatcaaggattaatgtcttttctgtgagaaattattgtagctatatgtttggtgtagacatatatatgtcctaggtgttaattaagaaatatataatataatgtgatgagaagagaggaataaaataaaatattagagtgat

SEQ ID NO: 22388 - DNA, 395 bp, Glycine max
aagatcatcacatttaggtgattattattgcagatgagataaaatggaatcatgcttctcaccactgttacttttcagctttgctatgcatatactgaattgaatgaccctgtagtacaacgacagagatttgctgaacatctcatggttatggaattcgacacaacagtactatgtactgtgctctaattggcgagctttctcttaataggacatattatttgcaactgtttgttattcctttcacatgtcatgatcggcaatctggcgatgatgaagcaatggccttagatgaaacattttgtacggctctacagtatggtttaccacctactggtggttggggtttgggcattgatcggttcaccatgtttctgactgattcacaggatatt

SEQ ID NO: 22389 - DNA, 531 bp, Glycine max
aatcgtttttttgatactgatttctaacactctgaagcacatttcatctgtggtccaaacacaaaatcttttgtttgccctgcttttgttttgttttgttccattccatccattcaccttgttctatgttcatctccagcaccccttgattcattcattcaaaagccacaaacttgaattgatgatggggtacctctacctttcttgcagagccgaatccgctgtctcaacctccaattcggtgtcctcttccaaagagaaaagcagcagcatcaagatccaagagtttctgtacagtgacctcgaagctgccaccaatggcttctccgaccgcaagctcctcggcaaagggagccacggctacgtctacaaagccgtcgtccgcggccgtcccgtggcggtgaagcgtccatcgcggccacaccataatgttccccgaccggtctcttcttccgcaccctccagatcacaaacgaggtcgacaacgagatcgacatcttgtccaaaatccagagcccgaggttggtcaat

SEQ ID NO: 22390 - DNA, 805 bp, Glycine max
gataattttaattggtgtttttggacggattgaacatggaacattcttgtcctgagggctgaggcagcgccaccaaaaacacaacattgaaccctgaataaacactcgtgctctctccgatgggttctagcgaggatccgaacaacaaagtcgattttccgtacgagtccccggcatcgcaaccctttctatcgaaaccctcgtacccttcatcgtcttcttcggctgtggaagaagaatcggagtcaaaccagcaattccatcacatcacttacaattcaggtcctcgctccttcaaggaccttcctttcctcatcctctttccttctcttcgtactttcctccttcgcctttggcatcttcgccatcatccaccgaaacaacagctacccctctctctcctccttcacctacgaccccaccaccacctcctgcgtcctaaacccttctaattcctcctcctcctcctccgtctccacgctctccctcgtcgacacaacatcatccgtttctccgaaattggtgaagggtctcatatggactctcgtcatcaccttcgttctcagcgtccccttgtgctgggctctgcttctcttactcaagcattacaccaaacagattgtctacgctgctattccattctttatcgccatccctattttcctcaacgtgtattggttcgtggcctgcaccctcggcgcgtcttgcagcaacgcgttccccctcgcgtaccgggttctcgtgatggtgttcgtgttcttggtgattgggatcattgtgtggatcttggtggttaattggcatc

SEQ ID NO: 22391 - DNA, 772 bp, Glycine max
ggctaggcttgaccgtgggaaattgacttattcttgctcaagtcaagtggaatcagtttcatttggctctagactacgattcgatagagaacgatttggcacatcttcgatttcctggtatgaaagtagttaggcttggttttctttgagttcaagatattcggcataagccggctttgcttttgctcttatcgatgtgatccttgtctttagcttggcaccagggcggcttgcttacctaccttatgaatgactttcggactttcttcttttctgttagcacgcatccagtgaccgatgaatctgttgtcggaataagcgtaagcgcagcaagagaattcgcagcttttgtgcctaaaatccctactttaaactgggttggctttcaaagatagagactatcactggattgcttgctcagttcctcaatccaatttcccatttgacttcctgacattttcaagagcttgaataaaagaaaggcctgcttacccgcttcaacttcaaagaggatttctcacgggattggtgtaactgtctttctcccactcgatggattgctcctattgacctagctgtcttactcgctgtctagcccgctctccctgacttttttatccgtagcttgaaggagggagaggctagatggcagaagagaaggcaatgcctcctcgttcttcgttttcgatttgcttgtccattttttcattttcacgtgaaggaagcaaagcaaccttagtcttagtctgccctatctttttttttcgaatat

SEQ ID NO: 22392 - DNA, 282 bp, Glycine max
cccaaataatggaagctattgtacaactattttcaaatggtcaatgttccaccgcaggaacagttgtgctttaaaagaaataaaaaagcacaacggttccgaggagccttggagagaaaagggtttcttctgaaatgaaatggggatggtttgtttctggatttgaagaaaaagataagggtgagagtgaagaagagagaaaaaggggaaggagaagagaggagggtgctttttgtgttttggtatttctttttccctttctttgttggggttggtggggtc

SEQ ID NO: 22393 - DNA, 500 bp, Glycine max
gggggtcgacaaggggctgcccttgctcctatgtgtgcctcaggtgtgatgaggaattcaaacttatgtagtactttaagtctaaatgtttctgtattaaatagattttatgttttttgaaatatttattttaatcgcgaacaaagagtcattgaggcgttggatcttgaaacaacgtttaaaaatttgaaaagcgaattgagtcgttaaggcgttggaccctaaaacggtctcaagtgatatttgataaaaataagaagtttgggttgtgaattgatttcctttatttgctttttttttggttattagttcctagccccacaaaaggaggaagcgacttcatgacactgatgatcagctagaactaaaccttacaagtaaagtgaaattgcccaccgtaaatgggagaagatgagtccctattaaataacagagaggacccataagggtatatggattatattcaactcttaagaaaagaaaagaaaaatgaaaaagaa

SEQ ID NO: 22394 - DNA, 475 bp, Glycine max
gaggcgacacattgaacatatttcaatttataaacattcttttggtttggatcaatattatagatctccccagtcaaaaaatgagggactaagctccaatcaagttctccgatgttatgactgggatacaaaattgggggctttctgtatgtcaaaccaccttcatataatgcattagccacgacctgaaaaattgaatgtgcagcagctctaaactaaactgaagccgtcccagattgcttcaggtaacaccgcgtcaggtcagcaaaggagttagcctccatcatgggttctccaaattatttgaatttccatttccattttgtacatgttctacagaggttgtcttttcaggtgctttccttcaagaacctttttgcataaattgcaccaaagacaattacagctccaatccattgttgccagctaagaggatgggcaaaccacacacatgacagcaaaatgcttaccaact

SEQ ID NO: 22395 - DNA, 501 bp, Glycine max
acacaaaaccataggaacatgatataagttataaccatcatcggcaacattgtgtacaacaatagcaagcgaaaaactaaaagctaatagtattcctattacataaataggattacgaacaagatagcaaaaaaaaaaaacatatttagcgataaccataatcataatcacactgaactattatttttatttttttggtcgataatgatcagactgaaccttgggtaaccttgcttatgactttaacatcctgacccaacgacacccctcccggtctcatatctgcggttacgggcggaaaaaccccttggtacggaggagcgtgcgctaccccaccacccggcgcagtataataaacctgtctcccactcccactatcgtacgccacctgcgcgtacggaacaccagtattatccactatcccacctggccgaaccattccgaatccttccgtatacgcgggagccttaatcggctgctgcgccggcgccaagctagccg

SEQ ID NO: 22396 - DNA, 435 bp, Glycine max
gaaagaacaatgaggcaacaaagagaacctgtgagctccgagtctgaggcgcgccgtgtctaatccgacgtcgttttggtggtgttctatgtcagtgtggtgctcgtgtttgggacatggcggaaacaacctctgcttctgtttcttctcctgcgggtgattctaattggagagagaacaagttgtggaaaggcacatttgctgtcgcaggaatcatgctcaccctcgttacctatggtgttttgcaggaaaagatcatgagagttccttatggggtgaacaaggactacttcaaatattctctttttcttgttttctgcaatcgcatcacgacatctgctgtttcagctggtgctttactggcaagtaaaaaggcattggatcctgtagcttccatttataagtattgccttgtgtcggtatcaaacatactta

SEQ ID NO: 22397 - DNA, 514 bp, Glycine max
tgatagttggtgcaaatttatagataaaatcatagacttctatgtgaagcataatcaatcaatcatttacgtgctgtgtcaggtattcttagcttagcagcgagcttatccagtagactgatgggaagtgttccattggcctccgctgctgctcttgccagaaggctagaagggaaggtggcactgataactggtggagcaagtggtataggtgagtgcacagcaagacttttctccaagcatggagccaaagtggtgattgctgatatccaagacgagttaggccactcaatttgcaaagacttggattcatcttcagctacttacattcattgtgatgtcacaaaagaagaaaacatcgaacacgccgtgaacacgaccgtttccaagtacggtaaactagacatcatgcacagcagcgcaggtatagttggcgcatggaaccccagcatattgcacaacaagaagtctcactttgagcaagttatcagtgtcaacctggtgggcacattcc

SEQ ID NO: 22398 - DNA, 364 bp, Glycine max
ggtcgtgatatgagataccttaacttgtgtgctgccgtgctgagtaacccagagagagtaatgggaacggtttgctgctgcataaacaagtttgctactttgagcaacatcaggtcacgacccttcttctcttcacacttcccctctcaccattttccctccacaacaacttccatcaacttcagcatcgcctcttcttctttttcttctgccacatcttcattcacatgggatgatgtctttcgcatatctgaatctcaatctgccactcaagaccgctctcgctacctccaaggcttctcccacaaacttcaactatgcaatcgtgcttctgtttgtggagcatttgagggacttttgcgat

SEQ ID NO: 22399 - DNA, 1128 bp, Glycine max
aatctcatacctcttctctctgccatgctgtatgtaatgccccttggttgtgtgcatccccttcccataatattccgcaatatctagtggctcaaccaatagtttgtagaaatgtgaagcattgacccatttagcccgcaccgccacatcatgaggcagctcatttctctcccacatttcaatcacattgttccaaaatctggcaagtttgtgacgattcatgttgactttcatagccatttttgaagtgctccttctcctcttgaataagtcgtagtatcccatttgatcaacttgctggtgacaccaagctttgtaccattctatttcggtcctataaggcacaaactttgataatgtaattgataagttagcagcattcttggttggtgaaggacccatcctccttgtcatcttaaggcactccttggcaggttcgattgccgattcctggttacccaaacctgaagattgaaccgacaattcaagtcctgcttcatagcttgaatcaggaatattcccctgcacggaattgttctggttcaagaattgtaatgacaaattcttaacatagtctccatactttagatggtcctcaatactacaagctggggaaactgatgcaaacatcaaatgcaacatctttataacagaagttgcacaatccacacacactgctccatctgatgaaacaaaaaggtagctcccaaatgggtgaaacaaaacaggtgcagacccttcttcatcttgtgtggctgcatccaagtgactcatcacaaagttgaacagctctttctgttggtcagaaattggaactgcaagcttcccaaagcctggagcagtcatggacagttgccaaaactgaagcaggaagtttatttgagcagtgtaaggtgttatgggagcaaagagaagccttggcattatgtcatgctttgagaccacgtgacagaagttaccaccccatctttctctggcaatggcacgtgagaaagagccattccctagcatgggggaaccgaatgtgatgcacaagactgacacagaaatagaggaatatgtctggtggaggtaagatagtagccaaagagcacatagagaggctgtggctcctccaatggagtggcc

SEQ ID NO: 22400 - DNA, 581 bp, Glycine max
gtacgtatagctaggatcctctagagcggccgctgttttttgttttttatttttttttttttagagaacaaatttaaatattaattaacaattatctggtaaaacagtacacattataaaactattttataataagttgaaatatcttttaacctaaatttattagggattttaatttatacataattatgtaaaatttaatcatcaattgatataatgtctaacctttttctcctgagagaaatataatgtccaaccttaatctccttagatattatttctccccaaactttaagaaataagtaaaaatacgaagatatgatcataatccatttatcaataaattaaattgagcagaaaattgaatattaacaaatacaacataaattaggaaacattatgatattattctataccaagttgaaataatatagtaacttctacccaaaaagtatagtaatatatttaaaataattttggttcgattatatttactatgattggcctgtgtttgttgaggacttttttgtaatctacttattatattattttttactaatcggcaacccttctgtcgtctt

SEQ ID NO: 22401 - DNA, 553 bp, Glycine max
agggaaaaagctgaatattattgatgcactcgaggggcagaaattacatcatttgcagttatttggtccacttgatttgaaagtgagagataaagaaaaatgaatgaagttggcctcccctttaaatatacttcttaggcctaataatttgtactactaatgccctgggatgttttaatcagcaaaactctcgaattttgtacagttgaaagaagcagctgaatattgacttatatgcacccaacaaaagcgaagtcatttaatttgttgctgaaaaaagtaatacagtcgcacaaactcttagatatacattatagcattatttactttctaatcacaggctcattgttagttatatttataccttaattatgttacccatgaaacaaatgctaaagggacaagggtcgtataataagaattttccatgtttggcaccacaagcatcggtcactactaaaccactcgatagactgttagaatccatagtatttgaaatctcagatgagttctatacaaacatcacagtcctcactcccccttctgtcgtctt

SEQ ID NO: 22402 - DNA, 535 bp, Glycine max
  unsure (1)..(535): unsure at all n locations
ctggcaataaataatgaacctattatttagccgtaggaaaataaataatagaaaggcaacaaggtaacaaaccaccagtgaaaatccaactctacaaactaaaacaagtctagaaagaagctcaccaaataataaaatgaagaataaaaagcaagcaaggaattaatcctccaatgaagttaatttaaaaagtacaaattaactcatcacaatggagtaaagaacacaaagtcagtaaggcagcagaatggagtctttagtcttcatctttctcttccgcatactcatacactcctacgccttgctccatgctcattctttactcttctgggnngagatataaacttggagaatatttaggacaatcagttatgtcatgttgcataacatcatacttgaatccatggggaatctttttgaagtttggcaaacttgtgaatgttatatataacaggttacgtagtagtactttttctccatccttaacaatcccctcttgaccatcgncatcagtttcacattcaaaagcaaaaac

SEQ ID NO: 22403 - DNA, 675 bp, Glycine max
gaacatccagcgacacgaaatttccatcgctaaaaattgaacacatgatataccgtagtaccatacgcactcttctgctgcactataattcccgtgttgcgtcgtgtctatcttcattttcatattcttcttctgcaaccacacaagaacaatgggaatagagattctggagcctaacacgtgcattaggggttgctgcaccagcccctctattccccttcatctccctccctcttcttatacccttctctctcctattgcccgagggtctgagagtgttgtttatgaagggactttggatggcacgagggttgctgtgaagaaacccatcttgtcaacttcagaagacattaataagtttcataaagaattgcaattgttgtgcaagttagatcatccaggaatagcaacaccgattgcggcccatgcaaaaccgcccaattacatgtttttcttcaagttatttgaatctccaaatctagcacaaaagttacatgtggaagagtggatcccaactctgaacgatgcacttatgatagcaatgcagttagcaaaggctttgcaatatctgcataacctcgggattgtgcatagagatgtgaaaccggcaaatattcttcttgacaaaaactttgtccacacctcacagattttggtttggcagaatacaagaat

SEQ ID NO: 22404 - DNA, 454 bp, Glycine max
gacttcaattaatcaaatctatgatctaattttaaatggcatattcgtaaatttccgccaaagcacagaggatattatggacacacaagataacgggtggtaaagaatattttcgcggcacaaacaaattttttagcattttttgcttttttcctgcaaagatcaatgtcttcagcatttgtagtttctctccccccaataatggagtcccgttgttgaatgatcgaccaataaaaacatccctgtgttcgaaggtttcagaagaaaagtgcaagctttgcaagtttgaagggtattattattatggcacagttcaccacgcagggtcgcctgaagctgctcttgaatggggagggtgtgtcttctgttttggagcacaaggacccttttctctacaagtgcagatcagttcagacccagaatagaagaacaaggtacgcaggttcttctgcca

SEQ ID NO: 22405 - DNA, 493 bp, Glycine max
gatgcagtttatgctgcagaagaatatttaaaaaccggagtaaagactgggaagaccagcttggagcagatatcaagagtttatgggaatcaggcagtggttgttagtatcgatccccgtagagtgtatgtaaaggatcctaatgatgtgcaattgaagaccataagggtttcaagtccaggtccaaatggagaggaatatgcatggtatcaatgtacagttaatgggggacgagagggccggccaattggtgcttatgaactagcaaaagcagttgaagagcttggtgctggtgaaatactacttaattgcatcgattgtgacggtcaagggaaaggatttgatgtagatttaattaagttgatatcagatgctgtaagtatccctgtcatcgcaagtagtggtgccggtgctcctgaacacttgtctgaggtgttctataaaacaaatgcatcagcagcacttgctgctggcatttttcacaggaaagagg

SEQ ID NO: 22406 - DNA, 353 bp, Glycine max
gataggaactccaataagcaaaagccaattgatacgtgcatatcacaaaactactcttaaacacacacgcaccccaaaaaaatcctctatcaccaaactcacctatttcctcaactcaaggccctatagtcccagcaagtgagtgagcgtcacacaacatggaatatacttattcagcaggtgtagaggcagaaactcacacaagtagcagcaccaccccatcaagatcaaagaagagaaacaacaacacaagaaggttcagtgatgaacaaatcaaatcattggagaccatgtttgaatcagagtcaaggcttgagcctagaaagaagttgcagctggccagagagcttgga

SEQ ID NO: 22407 - DNA, 476 bp, Glycine max
atccttgctttcaggcaccactaagggggtcacgggtgaaaccatcacatatttaaacattacccacacttttagaaaatatactttttacatcggttttttatcactttctatatcggttttttactgatgttaaaactcttatcattaacatcggttttttaaaatcgatgttaacctaaaattgacaacatcggtttttaaataagaattatacaaaaaaaatgtttgaatgttgatagttcacatcgatttttatacaaagctgatgttaacttatacattaacatcggtttttataaaaaccgatttttacttatatgttaacattcggtcctgtttaaaaaccgatgttaacttccaaacatttgtggaagcaatgccttccaaggttattttgatgatgccaaagaatcaagagtcaagcaaattccaaagattcaagaatcaagttttcaagaatcaagtttcaagaa

SEQ ID NO: 22408 - DNA, 757 bp, Glycine max
gggataaaacacatcagctagtagcctgtggtatgggctacgatacatggagaccaagaaaggctcaagaagggtgacaaagtagtaaagtacagatgataagctttggtgctggctttaaatgaaacagctgtttgtgggaggtaaagaaggatctgggggatacaaaattacatcagtgggacaactgcattgatggttgcacgtttgaaattacttgatgccaaaaattttagaaacacaattgggtaagatatcaccttctataaatcacattgaagagaccagttaaatagttacaaaaacatatggaaataaaatactgaaggaaagattagcagccaatcaggaacctccttgccatagaaaccagaacagataaaaaatgaagaagatgataatcaacgatttatacttcatgttagctcaggcatttcatcgaataggtcataggcaagtatgcaagttggttaaacacttaatccccaaagtcctcacaaccagcccaacacaaggcatccacaatcattcaacatgatgtattgtagggagactcgaccatcaatacaaactaatattatcaagtctcatttttcagtccagtaaaataataataagtgagaagcacaagtcgcaaataaatattatcaagactcctcaaacggggactgcatgtttagtctttgcactaaacatattgtgaacatcacttcaatagtagcccaagtgaacaagcccaattagttaaacaaaaacc

SEQ ID NO: 22409 - DNA, 621 bp, Glycine max
ctctaaaatcaaatagttacttacaacttcaagctatttcttaagacaaattacaggtttttaaaacttgcctaaatatttgatattaatttacataccaatgttgacaaaagaaaataataggaagaaagactaggtttaaatgcgtcaccaagaaagacaaaaaatgattccaaagaaagaaattatcaggcagggacaactgatagatgtcaccccagaatatgtcaaaattccagaaccaggttttgcaataaatcttgcttattgattctggttaacttagctattctgttaatctgaccaaccataatcactcaagcaaaagatggcatcactcgtcagccactatatgaacttggtctttttgctgataaagattttcttcttgaaatgatctcagcagcccaactttttcctatttcagtttgaaacttccctgcagttgaaaggaagaattcatccaacacttttccatgttctatttcatattccagcgcttgcagaatcatctcaaccttgtcaaaatcctttacaagatttgcctctaaagaagaattgttttcatactctgcccaaagttctttgatctcttcagctcttatccctccaccgagaagt

SEQ ID NO: 22410 - DNA, 725 bp, Glycine max
aatgaaatacatatttcaccacagactgaggtaatcaatacaaaagatgcaagaaacaaaatgaaaagaaaataattgaaaagtgctacaaaccatcaacatgcatagtaccctattctatacatgggagattgaatttacattttttgtctgattacataaaaagagatgagcaaaaatatacatgtagattgtgtgctatacatgtcaaaggtaagagttggccaaatattacaatttacaatctttgttaagccacttatcatgccatctcaggcacttgtacatgtgactatagcagagggggagtttacatgaccacatcacagacatggaagtatggttaaggtcaaagaacttagaaggctttttcaattcttggaaaagaattatgcagcagaaattgccaagctttaacagaaaggcaatccaaacaccattttcctgaagggggcactttgtgataacatcatcatcacaagttggacatccttcacagtgaaggacaaagagtcggctccggatcccgagcttacactgttaaacacagcccttttcctcctcgaagaacatcaatcaaggcccctcattcagaagcttctggttgtgctcaaaggatcataatcgtagacgtcaccagctttgacaaaccggcctttcacgcgccttctgacatcagcccttgccttgcgagaggcatacctcacttttttgtcaaacatccg

SEQ ID NO: 22411 - DNA, 504 bp, Glycine max
atagaggaggcaatcatttaaccaaaaatatggtatatgtatatatagcagagccaaaaccatgcatacctacatttattacatgaaaagtgaggagtatcacaagctaaaagtaataatcaattgcaactaagtttgctgtgcttgactaagaatgccccatctgttctggagggttatttacattcctaatgttccaccaaaatttggcattacttctgccatcagaatcctttctttcagactgtgcttcctgcatttcagatgaaccaggattctctgtcaagaatcgttcccagaatatgtcattaacaccagtagtcacaggggcttttcccactggttgttcttttgatgcatcaagatcaggaacagcaactacagatggctcagaattcatgttgattccaggtgacttaggctgatcttcaacttctagttgcacacaagatatagctggactatctgcacaacttgtagatgcatcaaaatccaggtttaaat

SEQ ID NO: 22412 - DNA, 585 bp, Glycine max
actcacgccaaataattcacacatttggtgtttattttttaaattatacaccatgagatccggactaacgcggcaaatcaggcatgctaaatacagttttggctaccaggaatgaaataagacaacttctccaggaatgaaaaaaaaaataaaaaatcttaccatgcattatttaaatgtgtatggcaacgattattgcattggtaaactaattcaattggataagtgatgccttacaaagaaagccattgtagcacgcattcagtagtacaacaaagcattagattttacttcccccagaaacaccaaattaaacttctggtagaaaaaatatatattgtaatcgagtttcccaccgttgaggccgccggaaatataactgtattgtaccatttttgcgaggagacatgaatccaataacttgcaacatttgttgaatataagaataatccatctaatattatattttgggaaccttaatgttctttttataaaacggtcctcttaatcctaattccttcaattttaatacactggacgctttatcttttttattttccacatttaaatggtttttttttattt

SEQ ID NO: 22413 - DNA, 316 bp, Glycine max
atcttccaaaaagaagagtggataacgttagggggggttttcgtatatatctaaacgtaactgcccagaacaaacaaattcaaaaagcatccgcaggtgcagagccttcaaagatagtatggacaactgtaattcaaaagatacagtaattctacttaaggaatttatggcagcaatccaacaatctttttgcatctggctcaccagcaagaacttcagcattcccattattcttggcattctccttttcagcagtccactgattcagaatactgatgatccttccaagagatgtatctctagcatttgctgttga

SEQ ID NO: 22414 - DNA, 563 bp, Glycine max
  unsure (1)..(563): unsure at all n locations
caatnngcngaataaaaaggaaagaaaaagggggaatgaaatataagagagaagatgaccaaatccttacttttaagttaaaaaaaaaagggaaagaagaaggcaccccatcagcaaaaggtttatatattcaggctagaaaagcacatttacaaactctaattgatcccacttacttacgcttaacaaacaactgcaagcaggggaaatcctaatgttaaaacctcttctccattgacgaccataccttaaaaacacaatttaagggaagctttcacgttttgaggaattatgaaacaaaaaatgtcttgatgctgtgttgaaactgaaagcgaagggttgtctaacgctgatcgagttaggccaccataagtccctcccatttggggcaccaaggcataacttgccgcgtctcactcaatcaaagaagcaaccaaagtaattcaagtgctccacttcggagggaacctaactaggccatcccttttcttaaggcccaaacaccccccccctgttactattaccacacccaacccaaccgtccaattttcactatcccgcgt

SEQ ID NO: 22415 - DNA, 482 bp, Glycine max
aggaaattcaatttcgtattgtaatgaaaatgctgattccaatatcagacttaagtagtggacttccctttcatattattttaattacatatacataaatctacaagtgttggttatgaactataatcacatactagcaaatgcaaatccaaccgaattgcctagtagtacagcctgaaaccaaaaactgaaaactcaagatgaatgatgaaatcccggtgagctaacattatcacttagcagtggtataacagtttcagttaaaagggtgaaacattgctcttctgttgtgtgagaacatgattcttgactcacagggcatagatcttctcaatgtcagaattgtattcatccaaatctgatatatttgcagagtaagaccatgagaaagatttgcttccacttgttctcttgatgcgcctctgggaatcactgcggaaaatgccaaaatgttgtcgaaaaacgaagtaacacatgctcgc

SEQ ID NO: 22416 - DNA, 459 bp, Glycine max
attacatatacataaatctacaagttttgattattaattataatcacatacagcctgaaaccaaaaactgcaaactcaagatgaatgatgaaatcccggtgagctaacattatcacttggcagtagtataacagtttcagttaaaaggttgaaacatttctcttgattcttgactcacagggcatagatcttctcaatgtcagaattgtattcatccaaatctgatatatttgcagagtaagaccatgagaaagatttgcttccacttgctctcttgatgcgtctctgggaatcactgcggaaaatgccgaaatgttgtcgaaaaacaaagtagcacatgcttgctagagtgccaactagaacaggtacccccaaaagggtgatggtgatagccatccatgttttctttccaacaacctcaaaagctattgctagaaaagcaccacaagtgcaagcaca

SEQ ID NO: 22417 - DNA, 587 bp, Glycine max
  unsure (1)..(587): unsure at all n locations
nnnnnnnnnnnnnnnnnnnnnnngtcggcgagataaatgggatttcacacattcccgagcactaaacgtgcacaaaatggaagattttgcattgaacgggatttcaatgcttattcaaacacacccttagtttgtcaaatctgtgcctgttgattccagtaattcaagcaggcatgtgatcgcgtctaccaagaggcgacaggaaaatacgggaagaggcgtgttaagttgaaatgggtttccttaacagtcttcatatcacaaaaaataggtaatttcttcagcaaatccagtgcccgtgttcaactctgaaccagagcaaggtgtgtcattctaacttagcggtggacagaaataaataaaatcattacacatgagaaagcctgcttttaaatgttatatgaagggtatatcttttaatccagggcatttcaacaaaatagcaatttttttagattgttcccgagtgagttaaacagagttgttgacaagggtccaacacctaagagcattttttaagaacagggaccacaaaatgagtattgtatagctaacaaggtactatatatgaggtcatgcaaagaaca

SEQ ID NO: 22418 - DNA, 463 bp, Glycine max
ggaggagcgatgtagcacgcaacggttcaatcgggataatacttttaaactctcttgactgtcacaatgcaattgtattacagagaaagcagttggatgttatttttacattttttatgtcaattatgaagtctagattaaaatagtatttgatgtgatttttttatcttaaattatttaatgaactatcacttgcaccatttccttaaaattgcggctcctgggctgatgtatagcactggtaacccaacaaacattgcgaacccaatcaaagctgcaagtgctcgggttgatataaagacatcaagtggaaggttgacattgtttgagactactttgtgcgaaaagatatcttgggaaaagcttgaagcacgcaaaagtttggatcccctgggttatcttagagcatacaatgagaaagacattcaattaatttgttgccaatcagaggcaagtacattgt

SEQ ID NO: 22419 - DNA, 442 bp, Glycine max
ggtgattgcaagccggccaccctgcaaataagttgacaggagcctgtgactccagaagccagcatttcatttatgatcattggttgtttacaaccctgaaatggatgttgaaaaagtggtgcatactggaggctgccactgtaagagtgtaaggtggaaagtggttgctccttcgagtgttgtggcatgggattgcaactgctcaacctgctacatgagagccaatactcatttcattgtaccagctaacaattttgagcttttgggagattctgagaagtttcttacaacttacactttcggcactcacactgcaaagcacacattctgtaaaatctgtggcataacctcattctattgtccacgctcaaacccagatggggttgcagttacattcaggtgtgttgacccgggaacgttgacacacgttgaaatcaggtat

SEQ ID NO: 22420 - DNA, 397 bp, Glycine max
gtttgtctgttcgtttgctacggttctctcactttctgggtgcaacatttttttttctgtttctccgagattccatcgcaaggagtcaagaatgtctaaagaagttattgctactcaatcacctactccttttgagtatgagatcttggatagtgatgctgaagtccttagaactgttagagcctcatccaattgtgctaatccatggattgaacctgaaaggttgaaacttagacatagaattggccgaggcccctttggtgatgtctggctagcaactcatcatcagtcaactgaagattttgatgagtaccatgaagttgctgctaagatgttgcatccaatcagagaggatcctgtgaagattgtattagagaagttcaatgaattgtatttt

SEQ ID NO: 22421 - DNA, 414 bp, Glycine max
gcgtccgtagaagacgacagaagggcccaatgtgtttttatttcattataagcatacttgcattttagggccttggatgatatctgggataatggggatcgtcaaattccatacttgtggtcggaaatggaatcattgtgcttacgtgaggctctaagattctaattagatccgccatttttttaaattaaaaaccacgccatgcttgccacgtctgattttggattatagaaagccaaaaaattaagaagtgaaagacgcactcactcactcttggattgtcgctgctgttagttgcagctgcggttgatggctgttgatgtcatcatcttctgtcttttcccaactcaaaggataaataattgggtcacataatctccttatgggaatttgggggttaggatttacgacact

SEQ ID NO: 22422 - DNA, 587 bp, Glycine max
cggaatgagtgatattaatatgatcctactatcggggaaacatatatactatcaatacagaagcaagttggactggtcccaacaaacttttctatatgttgttagttgttgcctgggattactccatcctcaccctcttttatccactttcctcaagtggtgttcctacttttctcaaaacatgcagaaatgtattgaatgtgaccgattgcatggtaaccaactcattactctcatttcaattcattccaatatgatataaaaagaattggatttcaagccaacaacattttatattatcaatatgtgtacatatgatgaacttaatttgaatgcatttgtagattctttacttaatataaataggatagtttgctatgatataccgatcgataaatcataaggtttaagtctaagtaattgatttatttttttggaacaattgttgaatgagtttaagtatatcaaatgagagaaagaaagagagaatttctctttattgtttgagaaacttagttttaattcttgtaattctttattcaaatagaccttattctttctctatctgatctgattttattatagag

SEQ ID NO: 22423 - DNA, 530 bp, Glycine max
ggggcttcctccaccctttttaatgtaaccctctggcatttggtccaccgtgcgcaccacggcctctgttcgttctcagctcttttcctcacatgaccaaacccatcttaggcaagtttctatcatcttctcaataggtgttactccaacatattcccaaatacttccattcataatcttatattcttatcttaatattcaacttatccacctcaacattctcatctcccactactccagcatccacctgaaaaaatcattcctagtcatagaaaactagcataccctggtgtcagaaggctcctcgcttcgcgaaagtatgggggagggtcattgtacgcagtctttcccttgcatttgcaaagaggctatttccagattcaagcccatgaccaaccggtcaccaaagcacaactttaccgctgtctcagggctcaccctcattgctagtcatagaaatagcacaaaaatatgtaagtagctttcaccaccaacaataccccattcatcaccatttattacatagcaat

SEQ ID NO: 22424 - DNA, 674 bp, Glycine max
agtacccaactggccaacaactacaataaaagttaatcaaaacacaaacatattaaccactgaatcaatgacgcaaaattaaaacgtaacaaagcgtataaatgatatcaccaccatgcatgatgcatgcatgcatatattgcgcgcggtggatgcaaattttccccatatgcatattaattctttaagccgcaattttgggacagtactctcgttgaacggctttcatgaggaggctatcgtgttcaagagccatctgaacagggagaaatccaagtccattcgccatggcaagcattatctgcttcgtttcctccttgaattcttcaaggtcaaccctcccattcaagtcgtggtcgaattgcacgaacatggactcgtacacacgtgcgagttcgtcggggtcacgcttcacgtcgacgccgaagtgggtctcgaacaccctcagcctctgcaactccttcagcatctccgcgtaagagagaagaccgtccttgtcggtgtccagttgggtgaagaggtcgctcacgcagacgttgaaggcttcctcgtcctccacgaatcctacgatggttgcaccgtctagtatttctacactcatgatttttaaggggacaatgatggaaagagagagtagtagtgagtggaatttgattgatgaacccacgaaaccg

SEQ ID NO: 22425 - DNA, 541 bp, Glycine max
aaaaattctaaaatcaaattttattatattcgtgaaaattaaaaacatattttgatcttatttttaaccatagaggtgcactcacccaaagcactattttgttctgtgtttttaaagtgatatagtatattctacttaaacacggaaccaaaaagtcttacaaaattctatagcttatgcatacattgtactttcacagtacaggtaacacaggaatgggcatcatttcatgtcacccaccaaacttcacaatttttccccaattcccatatcaccctgacaccctcaattttgactacatgacagtgcaggcatttgggttctcatcgctgaacatctggggagggtaggaatggaaatacgcagggtgtgcaggatatgcatacacctccatgccataccttggtgggttatagaagtattcattaatcttaacccctggaacaaccttgttggtgtcttcagtagttgctggtgttgttgcttcctctactttggcttcttcttccttcttctctttgttttcttctccttcaccacc

SEQ ID NO: 22426 - DNA, 590 bp, Glycine max
aagatcttcccactaattcaaccatcgaatacactattgaccattaactagaaaattttgaaatctcatctgatttttttcaattgaaacggagcttcaaagcatggcagcttttacatcaattgttgtgcagtactcatccacatcatctttacagtctttggtaccttctttagaagctacacgcgatcataattcatggtgggggagagtgagatcatacagatccacaggaaaaatttcactccaacagaatatcacaagaggcttaacaatccaaaatgcagccacaaaaccagcaaagtcgccaggtacttgttctgagtttctcttactaaattaaattgccatggcactttgaagacattatagaaccttaatagttcttatttaaacttttcttggagtcattagctgaagaagactggaaggttaagcgagaatatctgctggaaaaaagggtaaagcactaaagctccatactctcaactgtactttgtatgttgcatatcttctcgggtgattatgaaaaagattactcttgacttcccaaatgattgatatgttgctctctgatggtcccatcttga

SEQ ID NO: 22427 - DNA, 447 bp, Glycine max
cttaatgatggcaggttccaggagttatcatcagattatttcaatttgttcttaggtaggaaaatttgacagttgtaatctacaaaaaagttgatcaaagtctattattgtagaaatatacattaaaagtatcttttttgagatattgacccattgatgttatttattgtcttcttaaaatcatgtttgctatcgcgacataggtgatgtctagggtgagagaccaggataggtctccctccgactgtcagaaagtagtagatttttaccgttggatctatttattttttaaacggatggtttagacttttttcctttttctttttttttttactcatttcttcgcctttcctagtttactcctttgtttgccacacacaattcaccctaatcagaccgtgacttctcactccaaaaccccctcattctccccaacctaaacacttt

SEQ ID NO: 22428 - DNA, 606 bp, Glycine max
ctccctttgggggaaactggtaccccttcaagttcccgtccggaatttattcccgggttgctgaggttccttagcgcggcccccccttttttttttttttttttttttttttcaagctttgtttgtcatagcttaaaacaaatttccaggtaactttcaaagtcaagcaatgaaaaacaaaattgaggggggaatagaagccagtcaaaattttggagatccactacttatgctttagagcgtgagtagtgattgtcatttggatttctccctcccaccgaaaactgccattgctttccttacaggaggctggaaaggagctttcttgtctgtgtggtggctgaagacactgtctggtgtaaagaagtcatcatcctgcttgttggctttcttcgttttaggataaagtaccctttgaggaagttgatcttcacggagaatgaggttctttgtcactgcatccctcccaccttggggtaaaggcaatgaaaactttgtgccacgtaatgtaactcgtggtcgacgggcagctaatactattccattttcattaacagtgactgctaccttccttaaggtgccaccatttccacatttgggacaaaa

SEQ ID NO: 22429 - DNA, 668 bp, Glycine max
  unsure (1)..(668): unsure at all n locations
atactcagacacacataacacaacacagcaaagccaggaaactccaacaaagtccccaaccccaatcccctttgaaagcaaaagggtggctagcttttgcttctcatgccccgcgatgatagacactttgtctagctagacaacacccttttatctacccttcttctctcttctctatctcttcctcgtgcgcgtgtgtgtgagaagaaacccaacctcgtagctcgatcttcctttaccaatcattaataaggaatggatctgtggctaaaaaaaacaatcaagggctaattgatgtgttcatcagatcacacacaaaatcaagcagaaaagaaaaagaaggtttttctcgtacggatattacgagaaggagaattttgtttgagtggatatggcgacgtactttcatggcagcacttcagaaatcccttcctccgctgaagggttgcagacactttaccttatgaatccaaactacgtaccgtactctgacgcggcacaacacccaacgcaaaacatgctcctcgtcaatcccaacaacaacaacactagtaacactagtcccacttacaccaacgcgctcaaccttggtaacttctcccacgcgccgncaccttcttctcccaacaacaacaacaaccaccgtgaacaacaacaacatcacctga

SEQ ID NO: 22430 - DNA, 532 bp, Glycine max
gagaagactacagaacggaacactattctcattctattcatctttagcattttggattgaagataattgcgaatgtgctgaagcttgatgaagaccatcctgatgtgcaccagttgtatcctactatatacagaaacgttgtggaggcaattgatgctgtggataacggagtcaatcaatatgaccttgatgtccctccgaaatatgaaattaacacgatcctgtcctctagaataaaacgcttgaatttgagctggatggattctgaccagtcttctgatagagaaaacgaggcttttcttcatgcaatcgtgctggccggtgctgaatttttggagaatgtgaactattatgcaaagtcatggttaccggcacggtctactgttatggagagtcttgcagcaaggggaagtgctgattcaagtggagaaattatactgtaaagctgaaccgatcttgtcctgtaagacacagcccatgaggcattttaattaatttcacgagttattagtgatttttgtgagagttttct

SEQ ID NO: 22431 - DNA, 554 bp, Glycine max
  unsure (1)..(554): unsure at all n locations
nnnnnnnnnnnnnnnnnnnnggctctcatcagttggctatgtccaatttcccgtagtcactcgatctctgtgataagcgccaaaacaatcatcacaatgtgtaattggctgacactgttggcaagtcaatgtattatgccaatggcttgtatgtattatgtaatgcgttgccactgttcatttctctccttgtccttgtgataatgaatcgctcatccctttggaaaactaaacgaagcattcccattagggatttgatgctatgcaaaaaactttagactttaatgggcaacttaacacttgtgagttctctgcttgctcgtggcaaaacattccttcaaaaattcagaaagctgtgataagtataggtcgggaaatgtcctattatgatccacctggggagataagcccaagttaaaggaccttaccctctttcccatcttcctctgctcctcaattaacgtttctatggattgacatggaactactttgtcagcagtactatacaggtaaagctgagggcaaggctggtgtttcatgagcacattgacaat

SEQ ID NO: 22432 - DNA, 584 bp, Glycine max
  unsure (1)..(584): unsure at all n locations
gagcggccgatattttgtttttttttttattatttttttgcacgttttcaccgctaatgagttatagggatacctcacgtacctcagctcttatgttcgcaacatattcaacaaaatgcgctacagtttaacccttcaggatcctaactaggaatcctacaattttctttaacactgcgcataaaagttctctcaaggtacacactggtcgggttactgtataactcataactcacatgacaagtaatatctctacaaatatcaatcacacactcattcacaaccatatttcatgtctacagtctaacatttcacactctaactaattacaaaatatactcaacaattagataacaatttatcataataataataatatacaatttttaacttcaaggcttttaaacaagttactataaaatacacgtaaaatatatatttgagtatattatattcaaaatatataacaaaatttatatattaacgtaaacgtaaacgtacatatcacatataacatataaaacgtnttaaatatatattaatataaagtaatcacaataatatcaaatatattattaagtaaa

SEQ ID NO: 22433 - DNA, 529 bp, Glycine max
  unsure (1)..(529): unsure at all n locations
tttttnnttttctgaaaaaccgacataatataattctagttatttctctctcaagagttttaagacacataattattagttggctaatgcgcacaagtaggtgatccctgtcggaaatccaatatgactagtgtggcaacactatgggcaagtgcgccaagaacgacaaaaacatgaaaaatttgatggctgtgccctgcgatatcaaatgctcctggcttccatcgctctggtactctagcaacataaaatccagctccggtggcatacagaatggccatagcaagctcatatccaagtgcaacaagtatatgcggctggccccaatacagggcaacagcatgagctgcaggaattatacctgaaaagcccatggagaggaataaggacgccctgaggggtcggaaccgaggtgtagaaagtgaaggtgcgagtagggtaataatggcaaggactccaagcacagatattgatgccaaatagaataaccttgcgtaaggattgcagaaaaaaacatagtaaattggag

SEQ ID NO: 22434 - DNA, 1697 bp, Glycine max
ggtgaaaaagctcattcttattaccaaccttacaattacatttttaaaaaaaaaatactaatgtcttgtattgataaaagtacaagcaaaaagaatggcaaagaaagtagaaatgaatgggagagagaacaatacattttcctaatctcttctccaaaaatcgcaaccaaccctattactttattggctgtgattgatgaatcaaatctagcacgtcctgtcttggaggttatgacatataaacaatttacggtttgaatcaatggttccttagaaccaaagcaccatgtaggaagtttagaggtaaaacttaaaatgtccctgacaataagcacactattaatctgtctattatacacttacgtagagattgaggttatttagcaggtactatatatgtatattttgctgaaaaaggcgattggtggtgtgtgagtaatggaatgtaacgttcgaaaaatttaggacttgataattccaagtgtttctgcctgaagtgacacggagtgtttaacatcaccaatgtgaagactgtgcaaacccattggaattctcctagtcccagaccggtcaaccacgctcaagagcttacaaacatgaattttgactctcacccgttgttgggccttggcgggaatatggactttctcaaaagccactaattgcttgtgtggagcccaatggccattacccgcaggtggggctgagaacaccaacaacgtgtgaatgccatctttggagccaacatttttaacgtccacgtgaaggttaatggaaagcttgccacatcgtgcatgtgtcactttaattgccttgttcgcgatgttggagctgttgccgtggcggtgcccatccacgggaattgagaccaatttgggtgcactagttaatgtatgaacaaagtgcgtgtaagacaatccgtaaccaaatggatacaccactgggccattgtaaaatcggtaggttcttccagggtaccctttgcttcggcttgctctcattgccatatttgtcattggcaagtttttaatgtacccttgtgggtaccatgtcataggcaacttgcctccggggttagatgttccaaacaagatatctgctatagcggcaccaccagcttgaccgggataaccggcccacaagattccttggattcgaggatcattcttcgcaaatgttatatccacaggcccaccagacataatgaccaaaattgttgggcccttggaggcagctgctactttggacacaaggtcttgctgatgtccaggaagaagcaggctagccctgtccacagtttcagcctcaatggactgatctaggcccatcactagcacagttgcatctgcttgttgggctgcatttatggctctcccgaattgcttgtcatcagtacaagccacatttgcacaaccatgctcataaattgtcttggtgtatgtccctattccttgtaagggactagtgtatccacaagcaataccagcatagttgccaatcattgtgaaagtgacattagaattgggcccaataacagctacagtgcggccacgcctagtggagagaggcaaagaaggacctttgtttttaagaagcacaatcccttgtcttgcggcttcaagggcaagctcttggtgactttgggtgcacacatctcttggaccaaggttgttatatggatgacttgatggctcaca

SEQ ID NO: 22435 - DNA, 560 bp, Glycine max
agcaagtacagaaagaaggagagaggggagagagagtagtactcattgaggagaggctggagccgaactggagggtaaacgaatgctttttgtaagggaggcaatgattcggacatgccgaagacatctcacccccttcctccaaaacgccaatcttctcctctccactacttaaatatctccctctttctatattccaccaaccacttctcacgtccccactaataactccttgctttcgcttccaattcccaattcctctttaattcattctggatttctaatttctcgccatacacataattgtctcatagacataacaaagagagagatgcgaagcatggcaagctcggcttcctcgcgaggcattgcagccatcgtcggtgtgggccccaaccttggcctctccatcgctcgcaagttcgctcacgaaggctacacagttgccatcctcgcgcgtgacttggggaggttgtcaagatttgctgatgaaatacgagggaagagaaggcgcaggtttttgctataagaatagactgttccgattcaagaagcgtgag

SEQ ID NO: 22436 - DNA, 525 bp, Glycine max
gtggtttctctcttgttggggactttacttcagagcgagattgatcccattgcacatccagtagactatcgacgacttgcatttactgccactttctatgctgggattactcaagcaacgctaggggttttaaggttaaggatttttgattgatttcctatctcatgctgcaattgtcggttttatggggggagctgccatcacaattgcccttcaacagctcaagggcttccttgggattgcacagttttcaaagaaaactgatgttatctctgtgatgcattcagtgctggcatcagcccatcatggatggaattggcaaactatagtaattggagcttcctttctggcttttcttctgtttgctaagtatattggatagaagaacccgaaattcttttgggtgccagcaattgccccattgatatctgttattctctctaccctttttgtattcttaatccgtgcagacaagcatggtgttgcaattgtaaaacatatagacaaagggctcaatccttcatc

SEQ ID NO: 22437 - DNA, 544 bp, Glycine max
cattcttttcgcgaacaccacccttgccaccaccaactgcaaaaccagaaatatctaatcaatctcaacctcgaacacagattcaagctcaaacacaaattcaaactgaaacacaaatggaaactgaaaatagtcatgtaggattgaaggagttccttaagcctcctcctgttgtgcatgatatggatgatgaggaattgctatggagagcttcaatgactgcgaagatccctgattacccgtttgatcgtgttccaaaggttgccttcatgttcttgacaaggggtcctgtgttcttggcacctttgtgggagcaattcttcaaagggcatgaagggttctactcaatttacgtgcactccaatccatcatacaatggatcacgcccggagagtccagtgtttaaaggtcggagaattcccagtaaggaagtggaatggggtaatgtgaacatgattgaagctgagcgtcgcttgctggccaatgcacttgttgacatctcaaaccaacgttttgtactcttgtcagaatcctgcataccact

SEQ ID NO: 22438 - DNA, 613 bp, Glycine max
ccggagaatatatttatatatcttgtaccaaggataggaatactgcattcccaaacttacattccagagaataattgtttgatagagatgtaatgcttttatatacgggcaaaaacacataaccctcaagcatgatttaatgattattcttactacattttatcattaactcctccttaggggatggcgataataatcaccaatcactatagtcaccaaaatttcagcatatctgctttccagtaacttagcaaagcagaggttatttactcgagttgctaaacgtataaaacactcattattagagtagcaattaaaaatattggaaaaaaactgcctaaaacaaaaaagggaggggtgttgagaaaagtagtacctccatggagtcttctcaggatgctcctcgttggatgctcaaaactcttcctgcaatgtgcctctgcctttatgatatcttaccaacgtgaacctgcattgctggctcaacaagttacggattttctgtctaggggtaaccaatcgatactgaaccttttgactagtagtacttcaatatctaacgtgagttttatgttgcttgtataccctgtaatttgtaactggtattacttgc

SEQ ID NO: 22439 - DNA, 609 bp, Glycine max
gaagataaaaaaagataattgaaaagctaaataatattcaaagatccaatggccagatcatgattgcaccgtcatacgcttagcatcaaacagttgacgcctcttggaaacaagttcaatggatacaagcgcttatcatagacaatatactgataaacaacagttaaattatgttcattctggttggtaattttatgcctgccctcttcagaagttcaactgaagcctgttttgccttcaaaataacttcttcctcgtccacatatataatcttcttgttcttcattatccataatccattgcacatgacggaaaccacattttctgatcgcatacaatacactaagctagaaatgcagtcatgaacaggaaccatagaccaagacgaaggatccactacaacaatgtcagcctttttcccaacctcaagagaacctagttcatcatcccataatactgactttgcaccattgacagtaaccatcctaagaatagtttcagcaggcaatgcagttggatctgtagttccattagcataaactccccgtcctttgttaattagagaagctaggtacatttcgtcaacgatgctcatgcgattgtttgatg

SEQ ID NO: 22440 - DNA, 498 bp, Glycine max
acttcacaaatttaaaaacagtgttcattcaatcacggaaggtataattattgtttatatgatatttattccccttaactaaacctactttcattgtaggtatactattacaaaaaataattattcaaggataacatgaaaacagacgaatcagaaaccaaacctgattggcactctcagggcaccactctataagtgctttgagaaatatcgaatattaaatgtactatatgaatacccatatttcagacagtcttccacatgtaaatttgatcaaagtcttccactttcacttgtactttcaaaaccttttgcaatgtgacccttgaaaaagtcctgtagtttttgaaatcaacttcacaaaaaatattaactcaaagccattgctggtttcgaggccaagaacgtgaatattagtttaatgaactgggagcacagatctctcaatgaatgctaatgtaggcaacacaaaactcattggtgaggatccacatgttt

SEQ ID NO: 22441 - DNA, 684 bp, Glycine max
  unsure (1)..(684): unsure at all n locations
ggaaaccaccggaagcgccaaaaaatctaatttagtcaattgaacaggatatatgattgttataaatccttaaatactatctttgattcctacctataaaaaaaaaccactagaagctactatgagagttagcaattaagatcttcttcatttactagaagccaccaataggaaaaagaaagacacaacactcttgtggggttcaccaggtgcttctagttactggagaggcaccgaattcgagatttaggaatgggtacaagcttgaccattgccctgacaaaatactaatggtgtatatttagtgtgtgtgtcttagtttaaccgtttcaacaactgttacacacgtttcgagaaattaaccgtgaccgtagaaatttgatggattcacgtttggcggaaattgaacagtttaacaaacacactagttgtccaagggaatctacaaaaatgcttcacgattgtttgtgggcagctctagatcaggttcagattcactcagaggtaagaagtagtgatccaccatatcttgagacaccttttccaaggttggaggatcccactttggtgcaaagtccttgtncaccacgcgtgccctcacttccttacaaaagtccccagatatctgcctatgaattgcttgtaaagtcatacggtactcacgcaacaagcattgatcaagtg

SEQ ID NO: 22442 - DNA, 565 bp, Glycine max
tcgctttatcatcctcacaactccattcagaacgtgagaggatcggattgcgggtttcgtttgtgttgatgtgtgaaggttgcctttgagcttgtggagtcttaggtgacttctagtttggatatgcagatgggcggtgggagtaagatagatttgcaaacattagatgagggtatgcagcctttggcaaatgggactattgaagacaccttgcagagtgagctggagaagatactgcaagagcagcgtaatcagcagtttatcaatcgagagagggatttcaatattagtaggagtggaagtgcgcctccgacagtggagggatcgtttagtgcttttgggagcctaaggaactctgattttggatcgatcaatgataggagtaataacaatggacttttgactgaagatgacatccgatcgcatcctgcgtatctttcctattattactcacatgagagtataaatcctaggttgcctccaccgttgttgtcgaaagaagactggcgtgttgcacaaaggtttcatggtggtgggtcttcttcaattgaaggatttggggact

SEQ ID NO: 22443 - DNA, 493 bp, Glycine max
cgataagacaacagaacggaacgggtgttagaagacgacagaaggggtccctttctttctctctcacataacactgtttatcgatgatgctctgaactctttatctatatatgcctctctgatgccgatgggtgcctccagttttccggcaagcttcaaacttcccttcgccggccccgattttgatcacttttccggtatgaatcgtttgcgacaccccctttgttgatttagaaatgctagatctattcgtcgcgtcacacgttcgatccaaaacctggttccacaagaggaaaaaaataccacccacttcgttcccataaaccctgatgctatttccctcccaattgcgtaacactcgattgtaatttgcgaattgtacagctagaatttcgtttcttttcttttttgattttttttatatttcctttattttccaattttctttgctgggtttgcaaagtttgtacagttagggttgtagatggtgatg

SEQ ID NO: 22444 - DNA, 440 bp, Glycine max
ttccacgcgtccggtgtggtgggacttgtgagagagagagagagagaaagaaaatgattgatagcaataacaatgtcaacatgagccaccacaatcctaatttcacaggaacaaaggaagttgttgttgaagacgaggaatcaccattgttggcgttgccactgctaagaaacagagaggaagatgaacaagggtcagggtcaaaggcatcggttactggttctgtgttcaatctctcaacaaccatcatcggcgccggaatcatggccttacctgcagccatcaaagtcgtcggcgtcggcgtcggtgtcgtcgccatcgttttcctcgcctttctaacacacacctctctggagattctcctcagattcaccagagttgccaaggcttccacctacgccaacctcatgggtgatgcctttgggagttctgggacattg

SEQ ID NO: 22445 - DNA, 358 bp, Glycine max
cttggagaatgatctgtcaagctctgataaatcagttgttgcacaatcttctagtgatcatgatgaaattcagagttctaatgctatccaggttgaatctgcacactgttttggcacttccaatgatgaacttggagaattgcatgatgcagctgacaaatttcctccaagcatttcttctgtgacctctggaaaattggagacccctgaattcgggtcacccactggtgaaccagatttgggagttgataggcacggggttgttgaaaattatgaccagaatgaagttttagaaactacacttccttcaaaagagagcatgtatcacggttctgtctcggatggtaaaggataagat

SEQ ID NO: 22446 - DNA, 627 bp, Glycine max
  unsure (1)..(627): unsure at all n locations
ggaagtgcagagggaaaagcaaagggatgatgatgcagagcaaaagggcagggtggtggttgctcagaaaggcaaaggcaaagctgagtcttaacactgaccgaaacctctcttcttctcaacacctcattctcgacaaccccaatctcaatcaggttttggtcgaaggaaatggtttctccagaatggccattctcaatagaccctctgctctcaatgctctcaacaccaatatggcggctacactgcataaactttataggagctgggaagaggaccctgatattggttttgtgatgctcaagggcagcggccgagcatttgcagctggtggagatattgtagcgctttaccatttgataaacaaagggaacttggaagcctgtaaagaattttttagaacggcatatagttttatgtacctgataggtacatatttgaagccacatgttgctcttctgaatggcattaccatgggtggtggggctggaatttcaatccctgggacatttcgagttgcaacagacaaaactatttttgctacccctgaagttcttattggattccaccctgatgctgcagcatcttnttacctttcacatttacctggtcaattaggagaatact

SEQ ID NO: 22447 - DNA, 501 bp, Glycine max
agataaaatattccgtggataacaaatggaaaagaagaataatgaattcatcatattgaatttgctcaagctagactatcagctttggtaaaaaaaaaaaaaaaaactagcatcaagaagacgtgtaatacaaattacaatatcaaataggctaatccccttttatcattcccatcttacaattatatagtacaacagagagctcttcatggactattttgaaatgggaggcgagaaacagattgaatagagaaaaaaatgaaatgcctattgtagactctaactgtagtaccaaagcttaagtgagaaccagaaaatccaacctatctctcctgctcaagtgacaatgtgggactatatgaacttgcatcaaaagcttgtatgtacctcgtgatgtctctccagctacaaattgataaaacgtgtatctatatcttccttctacattgcatggaatgcaattaaagcaatgaaacaaaggagaacaacaatccaaacaac

SEQ ID NO: 22448 - DNA, 562 bp, Glycine max
  unsure (1)..(562): unsure at all n locations
tgaatagatatctgaaaggaaaattaaatattaatttagaaaacttgcaggtgctgttttgcgagtttacaaaaggacttatagaggacataatgtcagcatgtgcatgatcgctaccaccagttgtaatttctaccatgcccgtcactactagagttgccaaaccttgatgctgaatatctatgatgatttgacctggctgacccttgagacattgaggttcccgtatgaccattccataccttggaagatttgtaacttggagtatgacttccaccgccaaatgaatgaattctatcgtttctagaagatggtgtccctggagacctgtaacccttgctccttgaggacaagggaggaaagaattcttcaggatgctcggatgtccatccacctctactcttggatttcttgggagttgcatagtcttgttgttctgaaggatgctccgttgtgcagccacctctactcttggatttctttggagctgtaaagcctctttctttggtaggatactccgccatccaaccacctntactctttgatttcttgggagttgaaa

SEQ ID NO: 22449 - DNA, 499 bp, Glycine max
ctgtatcaattaaacaaataaaatgttagaagcaacagcctttctgttcagatgtagtgaatcatattcatatggtatgtataaacaagtaaatgaaatgttccttgtctttctgaactaacaaaaaaggtgtctttggacacataacaatgattttatgcctaaagacctaatcgtaaccactgtgacgaaattcttgtgtccaaaatcctctgcaccacatctcctacaaaggaatcaaagcaagatgaacagcaaccttcgattagactcgtttgcccaccagccattagctccatatgggaacaggcagatggcggaggcacagtgcaaacctcactcttcatgtgctcaagatcacaagctgctagtatggtgtgcatagaactccttgcaatatccttgatagtattgtggcctaaatcaatattttgagacaagctcttcaagtggcttttaaccattgactgcaactgctcctttgcaaagtgaaagttac

SEQ ID NO: 22450 - DNA, 636 bp, Glycine max
gacaacacaactgtctccattcccgcactaaccgacgcgcgccgccgccgccgccgccgccgtaacctcaatctccgaacaactcacttgcttcaaatttcaattcctgtctctccgcgcttatcttctactacattccaactgttagtaaaatagggtttgcttcggttagggtttcttcctcagatggataacgcccgatcagcgaacggcgaggagaatgcggcgggaatcccggacgatttgcggggcaagaggtccgacgggaagcagtggcggtgcacggcgatgtcgatgccggacaagaccgtctgcgagaagcactacatccaggcaaagaagcgcgccgtgaattccgttatgagagcgaatctcaagaaagcgaagaggaagtcgcagtcgctgtcgctgaacgagtccgataatgtttatatggagagcaagagcgacgatttcgatgttcctctctcctccattggcctctctcagaagaagctctccaagaaccagttccgctacgagccggagcgcgacgcgccgtgaagaggctcgtccgcgagacgctcttcgaacctcaacgacgatgatgatgatgacgatgacgacgacgtggatggggatgcggatgctgatgtg

SEQ ID NO: 22451 - DNA, 564 bp, Glycine max
gtacgaatgttaatagtatatttataaaaaagataaaaagatattaatactatatatagttcagaaaagaaagataaactcaaaggaagataaaataatatatagttaaacaaaagaaaaagaacaaacaaaggagaaaaacgcacaagataaaagaaaacacaaaggatagataacacctaagtaccaattgatagaaccctaatttgcggatccaatttttagcatcaacaagcttggaaacctatttgaaatcctctgaaattgcaaaaaaataattaaaaaaaagcaagaattataaaaggagatagaaagaataacaccttaatcttgaaagattgataaattaaggatgattcgtcacaaagaataaaattatttgataaaaatctacggtttcacataagaatctcttaactgtgtttaatatgaaatttcataaaaaactatcaattaaggaatttatttataattcctactgtttaatcccaacttaggcccaataactaatctaataattaaaaaaaaatagcaataaaaagataatagcccattacaaatcct

SEQ ID NO: 22452 - DNA, 425 bp, Glycine max
  unsure (1)..(425): unsure at all n locations
tgggaccctctagagcggncgcttttttttttttttttttnttnnnntttttgcatatagcatgtttagctagtgacgggggcagttgagtttgcggggaataagattagttctataatgcagaatacactctttgggcctggagctttaagtgtatcaaataaaaaaaaaaaaaaacttatagcaacatcttttatcatctattttaattcttttttttaattttatcttttctttttttatcttctaaaatcaaacaattcctttatctcaaaaaggttaaaacaattttcatttcaggttggattggtttattaaaaaaacccattttatttatttatttatttattattattattcaaaaaattctttctaatccaatttaataaaataccggttggattggatttgactattaaggtttt

SEQ ID NO: 22453 - DNA, 432 bp, Glycine max
atcttgatacgtattggggggttatttgtacttgcaattatatattttaaatcaaattaaaaataaaaaatttaacacatagacccgtaacaaataatttattagaaggataaaaggtcttgaagagaaaaattattctcttccttaaatatagtacttatgagattatgtttattaataaaaagcatcacaaaatttactgttaacacttacaatatgattaagtgtaaaaagagtatgagatgaaacttagttatcaataataaaaagacttttctaatacattgtaaagagaaagaagatttttggggtgctgccacaccttatatgtgtactgatttatagtttatgcagataatttaatggtggccactaataaaagtactgctaaaaggttggggaaacctttcaaagcactgtttatattgatgc

SEQ ID NO: 22454 - DNA, 385 bp, Glycine max
tttctttttataatcaccgggatccatttcacgctggtgggattcagaaggaaaattatcactatagagtcttgaatggccagttcacaactctattcggattcatttcttttttatcactcataacctccaaactatttttctctttcaaaaatataccagccatcattttaggtcgtcacgtgagaaataataaggtgcggtcggtaaactcttttcaaataaagttcgttaacatttctttttcaaataacatgataaaacataattgttttcatcatctaaaactttccaaaatatgggagtttgcaaaatagcacagtgtcatccaaagcaaaggtaacagctgtggtggcttcagccacaacatatacaatcatcaaaa

SEQ ID NO: 22455 - DNA, 515 bp, Glycine max
ctgggaccctctagggcggccgctttttttttttttttttttttttttttttggaaaatttggctggatttcggagaaggctttggaaaaatttttttttaaaatttaggcgtccccaaacatgaactcaaattcaaaggggggatggccaggcaaacaagattaataactaataagagtggatgcatctattacactggttgtgaatgcagcataggagacttctccatgagaataaagataaatatatgctgtcatactggttggaacaataattgtcatccatgtagcacacttccatatttctctatgagtcagatgactttgatcaagatcaaatatttttgcataattgactccaccttgagcaaaaaaccataagttgattccccacagccaaaccatcaaagccgctagaagaagaggattaaaatacaaccctgcttcatctggtgcaaggttggatgggattctgtcatgagaatgagtgcagacaagcgggagttgttccttta

SEQ ID NO: 22456 - DNA, 367 bp, Glycine max
gcagtaaaataatttgtattataggggggtttaagtaatttttaattaaaactagatttcagttttcaagtaattttttttatttcttagtttgcagtaaaataatttggattataatttttttatttcttacattttactattttgaatttataatgaataattaattaaaatattgtttttgtaggtacatgatgaattcggttataacagtgttgtatttcaatggaagggtatatgaagataatgatggtgttatattccaaggcagtaaaaaaccgattcagattaaacctggaattagtttcaatgctttgaagaaaaaaattggagacaaggtaaagttagaaaataatgaaattatttc

SEQ ID NO: 22457 - DNA, 842 bp, Glycine max
ccaagaacggctagagcggttgacgagaattggtggagatttaaatttagaatatgctgaagatagctgcgaggaagaaaatttggaggaaaaatcagagtgcatgttggtgaatgatagattagaagatagacatgatgacaatccaaggatttctcaatcaagcctaagaaattcctcacctgaaaacattgaggatgatagtaattatcctgagaaacacattgttaatggggatctgcatacatttaaggagagagtcaatgatgacaatgccgtgcctagtgatcctgaaactgatagaaaaactgtcaaagaatctggtcctacaaatgctgaagatagtgatttgtatggggatgcttttgtaacaaacaaacagtctgaagataggcgtttaccaaatgctattctaccactcctgcgctatagccagtatgaaagctctgaatcttcctgcagttttcagggttctccttgtgatgacagaaattttaggagtgatgctgatgatactgagacagaagatgcttcattctctggccaagaggatttaaatgacctaaaggatattcttgaatgggcgaaggcaaataactgtggaccattacagattataagtgagtattatcgcttaacttgccctgcaaggggctcagcacttaggtttcatcctttggaacacctgcatcccttggaatatcacagaccagatgagacaattctacatcttgctggttcaactgttcgattgaaatcttgcagtacgggtctggaatttgcaacgagcctaattctctcttagctgaggaggaggcaactgcattatctatatgggctgt

SEQ ID NO: 22458 - DNA, 350 bp, Glycine max
gattgacgtgttttttaagacgaattcataccttctgctgggtgaacaattcttactggtggaatcatgtcggggacttcattggctgtatctgatataccgtcaacactgtcatcttcgtctaacgactcttcaacatgtgagttagacacaagataatcatcatcatcatgatcatcatcttcgtcaagatttaaattgctcatatttgctggcggctgcgtgtcatcatttgatacataatttgcacatgatgttagggaattcgcagaatgaaacattgaaccaccagccacatacttttctatgtacaaatttttaactgacatttattgctgttgtttaaaact

SEQ ID NO: 22459 - DNA, 1331 bp, Glycine max
gaaattcaaatttaaaaactattcaatagtcatttaacggatatattttcactagtttatcaaacaaaaaaatcaatacttaatcagacaacataatacttcaacaacttctcacacagcaataatacagtataggtcatttaaaagaaaagaaaaaatgaagaaaatgagttgtgttcggctggtagcataagttgaacatttcggttcgcgagtctattcaagtatacctcatttaacagataatttagttaatcacgaatttatttggggaacgctttcatacttgtgatcaactgtaggtaagttgttggttcaataagtttgacaaatcataacctgtagacgcactgaacacaatatccaactttgtgcaccaagttgaaccaaaactcatttctcaaaaaagagaaaaagcttggtatcctcctatgtctgtgctccaaacgacagacatgaattattcttcagacacatgactcttgccctcgtagtatcttttctcactttcacccttcttcttatttcggttctggtatgcctcatgatttgaaacaatccttctaattattgtagtagtagttatatctaaaggactttctaaaactttgaagatgcccatgctaataggaacagcatatggattgcattcttccttctgaaaatcattactttctgcaatggttccatgaacaactaatgagatgttaaatgtagtgagcatatctttggaaatctcccatggggcaccaattataacctcatccacatagcgacatgctaaaacacttagacttctttcatgaagattcatgataggacgatgcgatcctctagttgcactgactgtctgatcagtgtgtattccaacaagaagaaaatctccaagatccctagcaagcctcaagatctcaacatgtccagcatgaaagagatcaaaagcaccatctatatatacaatgcgagaatcaggtcctggacccctcccatttgagaactgaacaattctacgagatgtaggcaaaaaatgagatatacgagttccacttgcagttgcagcagatgcaccagcttcaaacttcggactatggccattgctgaattgtctttgtaaagaagaatgattatgatttttttcagtaatagacctttctcttacacagagaagcatgcgaccaacaatatcagtgctggaaaccccttcagtacgctttatctgcttatatcgaccagccttcttagcatgagcataagcatcagttccatccggaagaacacaaggatcatccccgtgaataatgtaatctatcttgtactcatcaaaaagcttc

SEQ ID NO: 22460 - DNA, 195 bp, Glycine max
gtgacaacatcacaaccaccacgacaatatcatttaaggaagtcaaactacgacaacgatgacaccaccaaaaacaactcttccttccaaagccaaaatgacgacaacacatccacaatcgacaacaattaccacgacaacaacacacccttccaaaccaacaacgactacatcaacctccccttctcacattgg

SEQ ID NO: 22461 - DNA, 1146 bp, Glycine max
ttccacgcgtcctcccacgcgtccgcgtatacagggctttctgggttccactcaatgagatagtggccatcaaggttcttgatctagagaagtgcaataatgacttggatggcattcgtagagaggtacagaccatgaacttgattgatcacccgaatgttttacgggcacattgctcttttactgctggacacaatctatgggttgtgatgccatacatggcaggggggtcttgccttcatataatgaaatctaactatcctgagggttttgaagagcctgttattgctactttattgcatgaagttctcaaagctcttgtctatcttcatgcccatggtcacatacatagagatgtaaaggctgggaatattctgcttgattctaatggtgcggtcaaactagctgactttggagtgtcagcatgtatgtttgatgctggagataggcaacgttcaagaaacacttttgttggaacaccttgctggatggctcctgaagttatgcagcaattacatggatatgattttaaagcagatatatggtcatttggtataacggcacttgaacttgctcatggtcatgccccattttccaagtatccacctatgaaggttttgctcatgactttacaaaatgcccctcctggtcttgactatgaaagagacaaaaaattttcaaaggctttcaaagagttggttgccacctgcttagtaaaagacccaaaaaagcgtccaagttcagaaaagcttttaaaacaccacttctttaaacaagcacgtgccagcaaatatttagctcgcaccattttagaaggccttgctcctttaggagatcgttttagaatgctgaaggctaaagaggcggatttattggtgcagaacaaggctctttacgaggataaggatcaattatctcagaaagaatatattcgaggaattagtgcctggaattttaacctggaggatttgaaaagtcaagctgctcttattcaagatgatgacatacctaatgcagaagagtcacaaagggataagaagcaaaaagacagattggacgacttcaaagtttctgcagagaggctatcagctggagcagctaatcattcagatgatgcacccacgcaggacaaggaggatttacatc

SEQ ID NO: 22462 - DNA, 1128 bp, Glycine max
ctcgagccgaatcggctcgaggggatgtttgactgcttacacatgtgctcagatgcgcatgaatgcgtttagtagaaaatgtcctgttaggtagtcatcagcaactgtcttctctgggttccatgccctcgttggcatgcaccataggatgccgagtaaatgctgatgcagataattgcagtttctcagtattctctcaatctcttgaagaaaatggtgtggtcttgcctctatgcatctgcttaccttctgtgggcctcctgtgtgataataatttctttctttagtacccaattgctttgtccggcctagggcagcacaaaatgctgcagatgaagcaaaagctagtttaggacacattgatggggatcatctcacgctcttgaatgtataccatgcctacaagcaaaataggcattgaaatcagcggacagtgttagacaacaacttgtgcgaatcatggctcggtttaacctgaagttatgcagcactgatttcaatagccgggactactatgtcaacattagaaaggcaatgctagcagggtattttatgcaggtggcccatctggagcggacaggacattacttgacagtgaaagacaaccaggtggtgcacttgcatccatcaaattgcctggaccacaagccggagtgggtaatatataatgaatatgttcttactagtcggaattttattcgaactgtgacagatatacgtggagaatggttagtggatgtagccccacattactatgatttgtcgaattttccacaatgtgaagctaagcgtgttcttgagaggctttacaagaagcgagagaaggaaaaggaggaagccaggagtcgtaaatgaagtcccctaccatccatgcctttttttgcctttagattggaattggatatttagtctcctgtaatttgacatcgtaattttgtcaggagaaggtttccgaatgtgagtgttttattacctctgaagtctgaaggacctattgatagttaattttagtgagaaataggctgtgtttttttttttttttccatatatataacatcggctgtctttcttgcactatttattagtgtattagtaacgttttatatttgtcgactttttgctgttttt

SEQ ID NO: 22463 - DNA, 410 bp, Glycine max
tcagaacctgtgtccttcttgcgtggccactggccatttctagcaacggcatcatttttttgttcttctccaatgtttactcttcgatcctattacctatctacgaatctaacgcctccgacggcccttcgttgacattgaggcagggaaaagtcgtggagaagaacgacacagacgaagaagccactgatactgaaaatggtcgcgattctcgatgacaatcaaaactcatacgccacgcacaactgaaatcgccttctcacttcgacttctcgccgcacctcgccttcgccaacagcatcgtctccttcgactccaccttcgcgtcgtctcatgagcgcgccatgtgcctcaacttcttgtagattaatatgaaatcctaggctacgaatacgcgaataaagcatgaa

SEQ ID NO: 22464 - DNA, 464 bp, Glycine max
atcgagcgattcagcaaggtagcgtcttgaagagtttcaaagccaaaataatgtgttatagggtggactgtaaaacctgtgggaagtatacatgggggggatgtggtgatcacttgaccaccctctacgccagcattgatgagggaatgcactgtacgtgccgctcctggccgggtgttgttacacgcacacgcacaaccaccactcagcaacctactcaatccaataatcccaaccaagggaataggaattctcaaaattaacgaagctgcgttggattctgatacgcagcagttcttttcgggttatatgacacgcagagggatagagatcggtactgtcggggtactagtgtatgttaaaagtgttaagggggttgatattaataatgtaatgtagggctggccatgtgaaactgaccaacgtagacctgcattcttttctatgttaatggatctattaat

SEQ ID NO: 22465 - DNA, 376 bp, Glycine max
cgacaataagcaaaccaaaaccaccgccgccaccgccaccaacaccactaaacctcaaaaggctcgctccacagcgccgccgcagcattcgaaggcggcgcggcggttctataaccaaaacatcaaggaatcctccgccgcgcgcctcagcaaggttctcgccgcctccggagttgcgtccaggagaagctgcgaagagcttatcttcgaagggaaggttacggtgaatggtaccgtgtgtaatacgcctcagactaaagttgatcctgcgaaggatgttatctatgtgaacgggaacaggcttccgaagaggcagcctcagaaagtttatctggcattgaacaaacccaaagggtatatatgttcatctggggag

SEQ ID NO: 22466 - DNA, 389 bp, Glycine max
acggcctcctcgcttctatgtgcacttgctttctcatcttttctactgttgttgctttgatagtaattgcatgaacccacgaaaaggaaggaaaatagtaggaataagggcgcagatttccagatctagagatcccgagggaaatgagagttgagagtgagagtgaggtaatagaagtgctcgtgaatttcccaatctgccctgaacatgtgaagtaaagcaccacaccacacgcactatatcctcctcttaattattatgttctctttctgaatatctagtgccaaggtagattgatctgcaatttgttcacaatttttattttatgtactactagtaagttttatttcgttagtatagaaataaaataaattacaaagatttatgtc

SEQ ID NO: 22467 - DNA, 152 bp, Glycine max
agcagctttagtggtaataatcatggtcgaagggtggtcattacttgtccatgttgaattgctgagatgtatccctcgacacatatggatatgtgattgaagggtgtgtttggattcttgttatgtatcttacatatggtctctttgatttt

SEQ ID NO: 22468 - DNA, 274 bp, Glycine max
aagagaacatgctggtggtgaaggcagagaaggcactcgaagagaatcatgaaggtcgagcaaatggcaatgaagactggcctgccaatagctatggtagatataaccacaggatagccctcccagaaaatattgagtttgataaaattaaggcacaggtcaaagatgggattctttatgtaacaattcctaaatccagcacctctgcaaaaataattggcatagatgtacagtaactataagctcataataaagtttgttcacggctacattt

SEQ ID NO: 22469 - DNA, 479 bp, Glycine max
ttaacagaaatgcagatacattcattttgtaataatttatatacaatattgatattgtttgcatcaaccaaaaacaacaaaccggtacatgatgcaaggcatgaaaaaccggtatacattcaaaatatagaagcaaaaaaacaaaaaactgctaactagagaagtaaaatgccgaggccagtagttttggcctttttcttccttcaaagcaaatcgtgttatgcttcggtattaccaaaacatatcactggaaaatttcctaggatgtcataaacctctatagaaatcaacaacctcatataatgatattttaggcatataaagttcgcattgaaaatagaggcactagagtagcagtatcttttgatagcaatcaccaagggaaccatctccaaacagttgtcatggattttcatgttgtataagggactacctatttcccagagtaccagttttgagcacacttggcatcaacagag

SEQ ID NO: 22470 - DNA, 435 bp, Glycine max
acatgcaacaaaatttattcaaaacaattgacttatccatatacatggggttgcgcaaaacaaactacaagcaacaaaattgattcaataaattacacaaaggagcctgcaagctaatatgattgaaattgggcaaaggcaaatatccttacaggttaccaagattaggatcctatgtgatggaaaggaaagaaacataaattggtagaaataaataagactttagaccttccatccctgtatcagcaacttcctctataaaatggcacaaagaagactttaaaccctcaatttaccacatcactatcccctgcgtcaggtccttcttcaccatccactacaccttcctcctcaccctcttcatatccctcttcttcttcttcttcatcttcatcatcactcccttgataatcacccccatacctctgattcaat

SEQ ID NO: 22471 - DNA, 606 bp, Glycine max
ctgtatggggataatgtggaggtagactatcgtggctatgaagtgacagtggaaaattttttacgggtacttaccggacgtcatgagacatctgttccaaggtccaagcgacttcttagtgatgacggaagtcatattcttctgtatatgacagggcatggaggtgatgagtttttgaagtttcaggattcagaagagcttcaaagtcatgatttagctgatgctgtgaagcaaatgaaagaaaagcgcaggtttaaggagcttctgataatggtggacacctgccaagcctctactctgttctcccagcttcattcaccaggtgttttggcaattggaagtagtaagaaaggagaaaattcatattcacatcatttggattcagatgttggcgtttcagttgttgatcgttttacattttacactcttgctttctttgagaggctgaatatgtatgacaatgcttcgttgagcagccttttcaattcatataatccaaatttgttgatgtcgactgcatattacagaatggatatataccaacgctatttaaaggaggtacctgtgacaaacttctttggttctgtaatgaaaacgatacatact

SEQ ID NO: 22472 - DNA, 911 bp, Glycine max
gaccacgctcaaaacctagttacttcttcagtgtgcgtaccctcctcaacactaaaccctctctgtgtccctctccgttaaacccttgacggcgttcggacctgcttcgacggtggcggcaccatggttctcactaccgagggcgcgacgaactccgtcgaggcggtggcgttcagcttcctaaccgacgacgagatacggcggagcagccgcgtgaagataacgagtcccattctcgtcgattttttgctgcaccccgtgcctgatggactatacgacgccgctttgggccctttcgatgacaagtctctttggtagtcgtgtggtcaaacttctaaacattgcccaggtcattttgggcacattgagctcgtttcccctgtctacaaccctctgatgttcaatattcttagcaatattctgcaaagaacttgtttcacttgccatcattttcgggcccccagcaaagaggttgatattcgtacatcccaattggagctcataatgaaaggggatattatcagggcaaaacgtttggaatctattatccctggaaaaagtgtggattcttttaatccagatgaattcatacatccaggtgatggagatgagagccagtgttatagtgctgagcaactgggagaaaattggacctcccttcaatttagtgaggcaatgtctgttctaaggaaattgctgacgaaaaaacataagaaatgtcaaaaatgtggagctaagaatcctaaaatcagcaaaccgacctttggatggtttcatatgaatgttctctcagctgatgaaactagagcagataccattagatctgtggaaagtgaaacaaccaatgatgatatatctttaggtggtggggatactacagacgtagaagatattacctctgcagggactgc

SEQ ID NO: 22473 - DNA, 153 bp, Glycine max
gttgcaggcaatcaaatgccaaaaattagtttgaaaatttagtgaactagaactgaggtggagtaagcaaataatgatgatatgatgaatagattgttcttcaaacttcaattttggcctgaagagcggttaagataaaagaaaaaaaaacag

SEQ ID NO: 22474 - DNA, 489 bp, Glycine max
agagagagagagagagagagagagagagagagagagagagagagagagagagagagagagagagagagagagagagagagagagagagagagagagagagagactcgtgccgctcagaatgcacgtagcatatggaacaggcctcttaagagcgtttatattagtgattgtggggagctgagagtgacaaagccttccctcacgccttctttgccataatttatttccatgtatgtatagattatccgaggggatttcatgttactggtctatgtaaaatcacactcacatattctttgagagtaaatgatgatgaataaaaccacacgcacgcaacatgaatgacttttgaagttgaaaattaaaaggttttattttagttcattcatttcaaagctgtgaaggacacagtacatacatgcagtgaagttaaacattgatatggtatgccagagtttcttgtaagttagtaatacaacattattattg

SEQ ID NO: 22475 - DNA, 450 bp, Glycine max
ttctctcgtccgcccacgcgtccgcccacgcgtccggttatcttgtcctaatagaattagagcaccccttcagaaaaatggctcatcctcccacacaatcgcagtctagagcagccaataagccaaaacgctcaaaccttcttcgttgcattgccattttcatactagccttgatcatccttgtgggcattgctgtgatcataatttggctagttttgaagcccaaaaggttggaatacactgtggagaatgctgcaatccacaacttcaacttaaccgatgcaaatcacctctatgccaactttgacttcaccataagatcctacaatcccaactctagagtctccatatactatgacactgtggaggtgtcagtgcgttatgaggaccaaactctagcaaccaatgcggttcagccatttttccagtcacataagaatgtgaccaggc

SEQ ID NO: 22476 - DNA, 698 bp, Glycine max
ctgacatgaccgaggcaggctgtttctggtttcaacttgttatgatggtgtcatcttctccattctcattctcattctctgtcgctcacggctagcaatcatgtcttctcgcttagatgagtgcttgttggaggtggatgggtacggtgatggcgatggaaaggcgaaacccaaattcctgataaggaatctcagcagagtttcggaggatggggttcccatcctcaaaggcataaatcttgagatcccagagggtgtgatcgtgggagtgataggccccagtggtagcggcaagtcaacgttcttgagggcccttaaccgcctctgggagccaccctccgcctccgtcttcctcgacgcccaagacatctgccatctcgatgtcctctctctccgccgtaacgttgccatgctctttcagctcccggccctctttgaaggcagcgttgcggacaatgtgaggtacggaccacaactcagagggaaaaagctaagcgatgatgaggtgcgcaagttgcttctaatggccgacctggatgcttctttcatggataagtccggggctgaactctctgtcggtcaagctcaaagagttgcacttgctaggactttagctaattcaccccaggttttgttgctggatgagccaactagtgccttagatccaatatcgacagaaaacatagaggatgccctgg

SEQ ID NO: 22477 - DNA, 629 bp, Glycine max
cggcaacctctccatcttcgacgccgacggctttgtccacctcacgacgctctccgtccaccgcaattccgccatcaatgacctcgccctccacccctccggcgagcgggccctcactgtcggccgcgacgagtgcctcgccgtggtgaacctcgtccgggggcgccggaactgctgcctgcgcctaggcaaggaggcgagtctggtcaagtttgatgcctctggggatcagttcttcatggcggtgaaggagaaggtctccgtccaccagaccgaggatgcgaggattctgttcgaattggaatgcccaaagcctgttctctgtgctacacctgctaagaatggacttctttatactggtggggaggaccgaaatatcacggcatgggacattaagactggaaaagttgcatattgcttggaagaagcacatactgcccgtgtgaaaggtattgttgcgctcacagatagtgatggtgctacaggggatgataacccttacctagtggcatctgcatcatctgatggaattatacgagtctgggatgttcgaatggctgctagagagaagccactaactgaacataacacacggtcaagactgacatgccttgctggatcatctttga

SEQ ID NO: 22478 - DNA, 441 bp, Glycine max
ttctcactttacgaccactgcagcgccatcgcttttcgcggcaccgcgacccgcgccacctcttcagtcttcattcttctcacttcacgaatcacgaccgaaccgtgaaaaacgttcccagcctcccaccgtgccacctcttcaggtgtaaaaatggggttatctgccaagaaatctagaaaaagaggaaaaagggacagtgattcagatgaatacgataatatggagtatgaagaggtggaggatgattacgatgatgatggtgaggaggaggatgaagaggaagaacatggagaggaagtaacagatgatgaagatgggacaggagagcatggtgaatggaagaatgatgagatggaacagcttgagaaagaatatagagatcttcatcaccaggagctagatactttgaagaacttgaagcatcataaggatgaagat

SEQ ID NO: 22479 - DNA, 296 bp, Glycine max
actgcctggcttccctaggttttcttctcagttctcacctcgcttttcgcgccacctcttcagtcttcattcttctcacttcaagaatcacgacccaaccgtgcaaaccttttcaggtgtgtaaatggggttatctgccaagaaatctagaaaaagaggaaaaagtgacagtgattcagatgactacgataatatggagtatgaagaggtggaggatgattatgatgacgatggtgaggaggaggatgaagaagaagaacatggagcggaagtaacagatgatgaagatgggacag

SEQ ID NO: 22480 - DNA, 576 bp, Glycine max
aacaaatttccaaacagagaaggggcaacacaaaaatgaagaagggtctctcctttgtgctgctgctgatccttgtgatcatccactacaaggtagtcaacgccaacaacaacaactgtgttacagaggattgcctcattggtcatagtttggagtcagagttctcgtttggctcccatgtggcaagaatgctctatgatgtgagccaatctgtgtctggccaaacagggaatagcaacaatgctgctgttaattgtccagaaagcaatggttatcgtagctgcttgccatctcaaaacggtggtggccctaaccaaaattgcggtgattacaccaggacttgctaagaaatatattaccagcaggtatttcatttctgatttcaaggttgtcatattattgagattgtcataatctgaagatgcgtgtaataattgttgctgtcggttcatacttgtgttgtggatgtattattgtgtatcacatgtagtcttggttattaaatgttgataagaatagtattccattcgagatggaaaagtttgtgagaaatatattaccagcaggtatttctgg

SEQ ID NO: 22481 - DNA, 462 bp, Glycine max
ggcaatcactgaatctcattctctatctgaatctttttggattattactgattttgttagttgctgtattgatacttgttcatttctttgagaaagcctatacaatccttggagaagggaagaaaaggagagtactggtaacattggaggggaacaacaatacagagccagaggaagagacaaattaagatgttgggaattttcaaggacaagttggtcaatccaccagaagagctaaacagccctgcttctttgaattcatcaaaaaggtctaaacttccaaatgaaatccttcaggaattccagtcctacaatccctccaatgctttctccgttagctttggaaatgatgctttgctagcttattccccttcaaacaaggcctccattcatcactggttttgtgttttggataacatatactgcattttccttgggagcctatgcaacctaagcaagctc

SEQ ID NO: 22482 - DNA, 458 bp, Glycine max
gctcgcacggtactcgggaattgggctcgagttttcacaattttccccaacagaatcagcacccgaatttcccggatccgagatacccagaaggaaaagattaaaactttggtgttttcatcgatctctggggaaagatgtgttgtggggggagaatttgcatgctttgcacgtgtctggttctggtggtgatcgccatcgggttggtattcgggttcggagtgttcaagcatggattccacaagatcaaagacactgttagtttctgcgattcttgcggcggcggaggaaggcctttcatcggttatgcaccgccgccattgttctagttctcagcatcctcttgttccatttcgttcttgttaattgttctggggatttgtttgcttccttttataaattagtattcgttagggttcatatttgtaattacctgcttcttgggattcatgttcgat

SEQ ID NO: 22483 - DNA, 412 bp, Glycine max
gggaggaatcggagtgattgttgaaaaagtggggtttagggtttttggtgggggttgtggaatttgtgattgaattagggttgttgagtgcatgagaggtggaattgtgttgttgtgatggatgtggaggaaactgagaagttggtgtctttggacccagatttgttgctgcttccggaggtgtctccttttgcactgaaatcgagtaccttacgttgttgaggagctattcacacaggggcctttcgcttccagatacttgtcgcctggttaagtcattgcttgctgatgcataggcaggagctcgtttgagtgcacttgagaactcaacagatacaaatgctctgtcaatcaactctctaccttccttgtttcctgctgggagtacaccaccactttcaccacgcagctc

SEQ ID NO: 22484 - DNA, 475 bp, Glycine max
  unsure (1)..(475): unsure at all n locations
tcggcttacccgacaccttccacaaaaccctagtcccccaattccccaaccacttccaattcgtcaagtcccccaacggcgtcgtttcgctcaagctatcccgctggcccgacgaactcgcggtttccgcactgcagaagcacaacgagggtgggacccactaccgcgaattcaagcggggacaatccgcgttggcttttccgatgcggtttccgaggggctacggcgcgcagacaaaagtgaggacgtggatggaggagtttcagaagcttccttatgtttctccttatgtggattccacgaagattgatcctaacagcgatttgatggagaagcgtgtggttggggttctgcacgagattttgagcttgactctgcacaagaaaaccaagaggaactacttgaggggcttgagggaagagttcaaccttccgcataagtttacncgcattttcaccaggtatcctgggatttt

SEQ ID NO: 22485 - DNA, 406 bp, Glycine max
cccaagcttcaatctgtgtcctttcattgcctttgctttccacatacatatagcaattgttaaattatcaatcatcgttactcttttttaacaacgggaatgaagatcagatgaaatgaaagatttaacattgtagccagatccctaacccctccctttacgcacccaaacgtttttgttaattccccccaacccaacgacacgcttcgtatctctctctctctctttcccgcacttcaatatatcctccacccagataccatggtttttctttttcataatcaaccgatggaggtggttctcgttcaaatgctgaggctggcatgggtcgctgccacgttacccatcatcgtcgcttctattcccactcccaagctcaactgcctccgtggcaccttgctgggtt

SEQ ID NO: 22486 - DNA, 617 bp, Glycine max
  unsure (1)..(617): unsure at all n locations
caactttactgaagttgagggtcgggttttacaattgcgtagcaattatggttctgaaccaatgctacgcaattgtggaatctctataagccccaactttactgaagttgagggtcgggttttacaagctccgcggttgaaatttggtaatggggaggacttcaatcctagaaatcggaggtggaacttcaataacaagaaaattgtcaagccaactaaaatagaaagatgggctgtggttaacttctctgcacgctgtgatacacgagggcttgtgagggatctcattaagtgtggtgggatgaaaaggaattgtgatagatcagccattttgatgtgtttgaaggaaaatggtcagtttaggcgtgcaccgcctgtggttcgagtanagaagatgtttgaattggttcagtctaaacttcctggggctcctcagtttcttctttgtctgcttcctgagaggaaaaattctgatctttatggtccatggaagaagaagaatcttgctgagtttggaatcgtgactcagtgtatagctccggacagggtcanatgacaatatttgactaatgttctgttganaatcaatgctaagcttggtggcctgaactcaatac

SEQ ID NO: 22487 - DNA, 613 bp, Glycine max
atgggtcacaacatgttgctgagactactaggaaatgtggaaatggagaaggatcaacaagcccttgcaagaggactcatgaagatcatcaagctagaaagttgagtcctctagaaagccgagcaatggcttgggatgaggccgaacgtgccaaatatatggccaggttcaagcgtgaagaggtgaagattcaagcctgggaaaatcatcagataagaaaagctgaaatggaaatgaagaaaatggaggtgaaggctgagagaatgaaagcattggcacaagaaaggtttacaaataaactagcttcgactaagaggatagctgaagagaaacgagctaatgcacaagtgaagctgaatgacaaagctttgagggctactgaaagggttgagtatatcagaaggacaggacatgtgccttcttctttctctttaagctttaagttgccttccatttgctggtagtagcaattttgcaaccaatatatgtaatatcttgtcgtgtgaaatataaaaccttcagtacaattggtaaaatttatcatgaagctgttgacatatataaggtaatgtttcattaaattacacttgggtgcatttcaaatgtaaattta

SEQ ID NO: 22488 - DNA, 501 bp, Glycine max
cagagaggttgaaccgcggagacaaagtttgatcaatagacaatatgtttcattcaagggaaggagaagaataaatttttttcatgaacagaagatgaggagatgaaaaaacgtgaaaaatggagtctgggtgagatccgttagttagggaattgtgatgggttaaaggaaagttaatagggatttacttttttgggataaataaaatactttaaatgacattaattgtgatattggttaatttttaaaaacatgatattgattgattaatttttagggaagagagagattctaaactatttcattttgatcagttaaaatttggtaataagttagcaataaaaaaatcttaggggcctaaaaattttttttttaggggccttaggctaatgcctaatttgtctaccattatacacggccctaacgttaggacttaataactgaattggctaatttttattgatggtttgttaagtgtctgactcatgaacaagcacggat

SEQ ID NO: 22489 - DNA, 403 bp, Glycine max
  unsure (1)..(403): unsure at all n locations
taacgcttaaaccctttgctctgcgccttgagtctatctctctgttcaccaatggccatgtacgcaatgcttcgccgcgcctcctccgccgcgctgcctcagttggcgcgccgccccgccatggcttcctcgtcttctagaaccttccacagtgttctctctgttctccgcagagagacagcgactactactactatcgcaccctctcttcgcttcgccaacgccttcgctaccaagtccagcgcggacgaacatctagctcaagtgcttcagtctgagatccaatgcgccctcgaagacgatcatgcccagcaccaagtcgaagttcctgttgattttccttttgacattgaggacaatcctggagatagaacgatacaactaaaaggganattcagagatg

SEQ ID NO: 22490 - DNA, 396 bp, Glycine max
ggagtttctgcagtttgacacatcaagagtccctgtcatagttacactgactaaggttgggaggcactatattgtagatgcaacatcagaagaggaatcacaaatgagctctgctgtttctatttctgttaataggcaagggcacatctgcggcataaccaaacgtggaggtgtagggctggatccaagcatcattcttgatatgatatctgtggctaagcatgtaagcgagcaattaataaacaaattggattcagaaatagcttctgctgaagctgaagaggagtcatgacagagaagcacttagtgataactagggtgtaccgaatacttcaattattttggacaaaattttgtaactgaatagagggattaaagatattaaatgtatgtttc

SEQ ID NO: 22491 - DNA, 368 bp, Glycine max
caacgggatgattagtttataagcatcacacagacacttggaagactaggttctaagttctaattcgatgagactcgaatcttcagcgccagagcaagagagagaatagacatctatatcagcttcttgacgatgaatgcagaatccaatttctaaactcccgatgaattgtcctattcaaatgataacttcactttgaaggctcaagcatttcctagcaacatcagtgtcttttcccttgaatatgtagcaagtttgtctttatggagacatttgatttgactttgaaggtgacccttgctgtgaaattttgaccttcttgactatttccttcttaagagttgacgtaattaagaggagcttacaat

SEQ ID NO: 22492 - DNA, 560 bp, Glycine max
cccacgcgtccgcggacgcgtgggaaaacgtacttcacttcgtgccttcagaaaccctaattcccaaatctcaaacgaaccatggaattcaccaagaagcgcaaaaccgaagagaacggcgacaccaccgattatccgccgcagcaatccaccgaagaatccccaatcgccgccgtagcccccgcccccctcgccgccgaagacatccgcaagatcctacaaccgttctcccaggagcagctcctcgacctccttcaatcggcatcgctccgccaccccgacgtcctcgatgccgtgcgcgccgttgcggacctcgattccaccctccggaagctcttcgtgcgcggtctcgccggcgagaccacgacggagaccctccgcggcgtgttctcggcgttcggcgaattggacgaggctatcgtgatcatggacaaggccaccggaaggtccaagggctacggcttcgtcgtgttccgccatgtggacggcgcaattctcgccctcaaggaccccagcaagaagatcgacggccgcatgacagtcacgcagctcgccgccgc

SEQ ID NO: 22493 - DNA, 490 bp, Glycine max
tgctgtggcacaagaagcaggatatgaaaaatccttggtggcaaggctagctataaaacctgggaagattgcaagccttgcaaacaacatgcgaattattgccaacatggaagatccaattggtcaagtattaaaacgaactgagctatcagatgggctaattttagagaagacatcatctcctttgggagtgctccttattgtttttgagtcacgccctgatgctcttgtacagatagcttcactggcaatccgaagtgggaatggacttctcttgaaaggtggcaaagaagctaggcggtcaaatgcaattttgcacaaagtaattactgaggccataccagatactgttggtggaaaacttataggacttgtgacctcaagggaagaaatccctgagctacttaagctggatgacgtaattgatctggtgattccaagaggcagcaacaaacttgtttctcaaatcaagagttccactaaaattcct

SEQ ID NO: 22494 - DNA, 460 bp, Glycine max
aaaaaaaaaaaaaaatgagaatgagaagttcctggtttataaacgcatgacaaatggggacttgtctaattgcttgtactacaaaaacacatctgaagatggtactttgcaatcattagactggataactaggttaaaaattgctactggagcagcagaggcactatcatatctacatcatgaatgtgttccgccgattgttcacagagatattcaagcaagcagtatacttctagacgacaaatatgaagttcggttagggagcctaagtgaagcctgtgctcaagaagctgatattcatcaaagtaaaatcacccggtttctgcggttgcctcagtcttctgaacaaggcacatctggttcatcaacatcaatttgtgcctatgacgtttattgttttggaaaagttttacttgagctggtgacgggtaagctgggaatgagtgcagctagtgaggcc

SEQ ID NO: 22495 - DNA, 585 bp, Glycine max
tgaatatcgtgataagaccaatagttgcactcaatgtactcaatcagaaacagaagccactagaagtccagaagagctgttattacttgttagattagagcagatgcttctttctgcatcaacaataaagaatgacaacatagaatctggaattcctctcataaaacagaaagctgatgatgactcgtggagccatattatagaggctcttctagttggcagtggaacgtcgactggtactgttgattggcttcttgaagagcttctaaaggataagcttcaacagtggctttcttgcagatctcaggaaaaagatgaagagacaggctgctctttgtccaagaaagagcaagggattattcacatggttgctgggttaggttttgagtgggccttgaaccctattctcacttgtggagtcaatataaatttccgtgacatcaatgggtggactgcccttcattgggctgcacgttttggaagggaaaaaatggttgcttcacttatagcttctggagcatctgctggagctgtgacagatccaaatgcacaagattcaaccggtaaaactgctgcatctattgc

SEQ ID NO: 22496 - DNA, 313 bp, Glycine max
aaaaaaagaaacttcttcaagaaaggattgcttgaaaagcgcatacaaagaatgctgcaccgtggggttgatcttgagatgattaattcaaaattagaaaaaactgtttcggaggaagtggatattttctcttttcagcctatgcattttcgggattgttcacagattcaacgattagcagcaatatatcaaatgcagagtaacagccaaggctcaggcaaaaaaagattcgtgacagtgctgcgaacacagtctacatccatgccatcttcaagtggtagacagcgcctggaaaagttgttgggagttgatg

SEQ ID NO: 22497 - DNA, 648 bp, Glycine max
aaagcattgaataagcattgaagtattaaaaaaaataaaactctatgatttattggtttacatagttggataaggaaaaggataacagaacatatctgtgtaagcctactaggtaatctcaaaagcaaataaaaaatatggatcatgaaagagagaaacacatccaaataagatgtcaaaagtagaaacccaaattcttatcaagggagatggacaattaacttggtaaatgagatgaatcaacagggaagcacccctcaaagctatgtcagattgtagataccagcaaatcttctgctgagtcaatctaaaagcacctcaccggaccatcccataacagcacaattgtacacaaacaccccaacatgctccttcacaccaagtactttccaatctatggttccattcctgaaccctgtcctaggacgccatgaattcagcacaacagcttcaccttctggacccctttgtccactcacaaccagaagtttctccccacaagccttgaaagccaggccccatccattagaagaatcagcccgtactggaagtcttcccaattcactccaggtgttcctttccttgtcatatttattcaccatgttggttagatgctcaacggcatacaactggttatccacaactgcc

SEQ ID NO: 22498 - DNA, 399 bp, Glycine max
tagattgcctaattcaactaataatttagtaaaaatactaaattgatgtgtcttttacagtcaggggctggaattcaaagaataaaatctatcaacaaaaatgatacaccatctatggcgagtatatttccaagaattaaattacctttatagagaagaaagtgttttaaatgaaaacggagaagcagcaatcagagctccaatgctgaaccatcccacgagtcaatggagtgacttcaagtggaatatctggcatttcggaacatatgaactcttggttgaagcctgttcaaacttcttaacagcagcttcattctcctctaagttaatctggaggaaaaacttgacccaccaggatgaactcctcatcttggccgctcttccaaatttagaaacatc

SEQ ID NO: 22499 - DNA, 462 bp, Glycine max
gaaagtcttccacttcataatataacaccaccacaactatcaatacaaagcagcatgtaatcatgaaaggaccataaaaatataagcaggaatgatcctcgcaacataaaaaaaaaaaaacaaactttttcacagaatccttcccttcagatgtgaaatcttttttttcccacatattccaaacccactgaacaacccatgctatactatttataaattgatcagagaagtcagtttgcattgtttgccagcagcttacattgcataaactatttctccactgctatcaatgtcgaggtcgggatccgtctctaggtcctcatccatgtcgtcatcatcaatgtccaagctaccggtaagatactggttgagagactgagttccggctgcaggaattgtagcctcactgattatctgcatgatttcttcaatgctctgcattggttgatcaggctcctcaac

SEQ ID NO: 22500 - DNA, 341 bp, Glycine max
tttttggaaaagggaaaggcaaccacttcataatataacaatgacacactatcaatacaaagcagcatgtaatcatgaaaggaccattgactataagcaggaatgatcctcacaacataaactttttcacagaatccttcccttcagatgtgaaatcttttccttccagatattccacaccctttgaacaacccatggcatactatatatataaattgatcagagaagtcagtttgcattgtctgccagcagctcatattgcataaactatttctccactgctatcaatgtcgaggtcgggatccgtctctacgtcctcgtccatgtcgtcgtcatcaatg

SEQ ID NO: 22501 - DNA, 420 bp, Glycine max
ggtcctacattcacgggtcgacccacgcgtccgaaggacctggacacaaatgcagacaagcagctgagcttcgaggagttcatcatgctgatggcgaggctaacctgggcctcccacgagaagatgcacgagggtgacgagggccctggccaccagcataagccaggcctcggggagggcaccccctaagaccacagtggccaagatcacagtggccacggccacggccacagtcatggtggccacggccacagccactaatcaggcggccaggccaccctgcctctacccaaccagggccccggggcctgttatgtcaaactgtcttggctgtggggctctgggctggggccaaataaagtctcttcctccaaaaaacacgaagacaagaagttttcagcctcagccaaccaggtattg

SEQ ID NO: 22502 - DNA, 425 bp, Glycine max
ttttttttttttttgatacaaatgaccctattttatttaattgcccaattttataccgttctcaactgtcaaaataaatgaaaaggctacaaaaggaagtatagcaattagaccattcaaattaagttgcaatgtctttgtgggtatagacaatccctttatcaccatccactacttgtccacttccttttagtatccatcttgttgttaacaatccctcaactcctactggacctcgagcatgaatcctgctcgtactaattccaacctctgcgcctagtccaaatcttgccccatcactgaatctggtgcttgcattgtgaaaaacagcagcactgtctacttggcgtagaaacacattagcaacttctttatcttctgcaacgatggagtcagtatgtgcacttccataaagatctatatga

SEQ ID NO: 22503 - DNA, 370 bp, Glycine max
ggtcgacccacgcgtccgaacctaagtcgcggcgacatggccaaacgtaccaagaaagtcgggatcgtcggtaaatacgggacccgctatggggcctccctccggaaaatggtgaagaaaattgaaatcagccagcacgccaagtacacttgctctttctgtggcaaaaccaagatgaagagacgagctgtggggatctggcactgtggttcctgcatgaagacagtggctggcggtgcctggacgtacaataccacttccgctgtcacggtaaagtccgccatcagaagactgaacgagttgacagaccagtagacgctcctctactctttgagacatcactggcctataataaatgggttaatttatg

SEQ ID NO: 22504 - DNA, 655 bp, Glycine max
aattccaattgtacatcatgttatttagataatagatttgggagtgcataatacccgaaccataaaaaaaatacagctactcaaaatgctgtgtcttgtaaataaattacataaatttatgagacttgtttgtcttaactcttgttgtacaatagttatcttaaatgttaagtgctagatcagataattgcattgactatccaaacaagaaaacaaaaatgcttcactattttctcagacaatcttctctctggtaccaacaaagtttgtaagattttcccttgaagattggggttgaagaccacaaaaatcataggagagggacttgaccactgcctttgaaatcaagctggaaccctgatggttgctatgaccttaaacaagcaaaacagcatttatacaaccatcattttctgggttatttgtgacctgagcgtatttaccccacacaactttcccagcaggtgtgacaagaccaagttcactgacattcacctcaattatagttcccctggtaatgacaccaagagaggtgtacatagggccattggggtttttcttcactccaattaattctagattgaatgtgcatttaagttctgggtgagtgacatgagctttagtgaaccgcaatcctgtaggacgaatgaatcgc

SEQ ID NO: 22505 - DNA, 445 bp, Glycine max
  unsure (1)..(445): unsure at all n locations
naacttcaatgaattataatcattaacaacaacaataatagaattccgatatagcatctcaaaagttaatagataacagaattatttattgtaagtatatcaatacaatctcaaatgagaaagagagaggttatatacgtaattaacaaacataatgaacataatgagcaagaggtcggactcggagctaaacaaatcgacaaaacttaaattcctaatatagttcttatctgattaggtggatgccttgccaacgacctggggtccggataaccattcttgggatccataatagccttataaataaggtcataagcttcggccagtgacctggccacgccaatagtagcttcagaacgcaaccttggaacctgcatctgctcaaattccggcagggaactttcacttcccaagataaggccaaacagagctttcaaacactccg

SEQ ID NO: 22506 - DNA, 561 bp, Glycine max
ggacaaatgaaacggacacggattcagtaactttgagaaacgaaaacggtgacttccctcattttttgttaagcggtccgtaacttaaattttgtttaatgaaaaaaataaggaaaagtatgattccatgtggtcatccaagagctggccacattcaacataattacatgtcctctttaggactgagttttcttagttcttcctaaaaaaagtaaaaacaaataactaggagctagaaatatagcattttaaccgagtgatttcagagatggtcatcccatggttaagctaaactacgagagaatcataagatttactaagccatcatacaattacttataaattaacttttggcacctagtcctcgcgactttggaagcctaacagcactcaacggagtggtaatgccttgtgattctctacctaatcccgtgccttccacaaagcccatctttgccatcatctttgatccaaagcctttagtgtgtttttcaaaagcaccaacattagaagatttgtttggagctggcttagccgggctgttggagaattctacaccca

SEQ ID NO: 22507 - DNA, 505 bp, Glycine max
  unsure (1)..(505): unsure at all n locations
ctcagcctctcaccaagggtactcgcactcttccaatttctctctcatccattttattactatttgtgctgtttcactctgaacatatcgaagacttgcaggcgctctattacagcctgtgagttcaaaacatgtgcgaaatcgcataccatcctcttttcagttcagatcctcatgatgtgcatgtcntgagggttctttttgcagaatgatgaacattctcaataatgatctatttgcattgtttcgggcgtttccctttttttttatatctagtttgtaaagggaaccatttgtgcaagtgaaacttgttttctcatttgaggattttgtctagtatacctgctgtgcttatggacggtcttgtactgactcgttatgtcatcagcacataacataaacctaagctacatctaatgttgccaccatgaattttttgtgtgttccaattcatatgggaataacacttctgcattgtggcaaaagttataattactttctaata

SEQ ID NO: 22508 - DNA, 703 bp, Glycine max
acgagcagaggaaggaacctgaaaagcctctttatcaagtccttgaagagaaggaggaaaaaattgctccaggaactttgcttggaactacacacacttatgtggttaacactggcacccaggacaagtcaggggctaaaagggttgatttacttagaggacaaaagtcagataaagtggatgtcactttacttgccagagagttggatgccatggaaaatgttttacccgcgaagtatgaagaagcaagggaggaagagaaagatgcaagaaaaggagggcaagtccaagaggaataaggagtttaagttctaaaggtggtttcgtgtctttttctttcgcagaaaaaatgggggacccggaagttatccattcatcagattgtcattttccaccaagggaggattggttgtctagctttgttgtatggcatttctgtcacttgttgttgtctgcaagtagctttcattgttttggttaggaacatactactcgtaattgaaacaccttatacagcgctgattgtttagttggaaacccaatacagttaatcattattaatgttggtattcggaaaccattgttgaggcagatatttcgatgatcccgcctgataattcttcctgaaaaatgctacagtaacactttctaacacatttgttattactagttgaaatttattgaaaatcataaaatttagtgt

SEQ ID NO: 22509 - DNA, 661 bp, Glycine max
gctgaagacaagaaagatgctataacaaagcatcaatctgatggcagcttgaagagcgcaaggagtactgaaggatctttgtccaacttagaatccgaagctgttgtaaatgatggatgtatatctaattctaaaggggacgattcacattctgtgcaaaatcaacgtcagagccaaagtctttctaccatagcaaaaacttttattggcaatgaaatgtttgatgggaagacggtgaatgtggttgatggactaaagttgtatgacgatttatttgatagcactgaagttgcaaatcttgtttcactggtcaatgatctaagggtttctggaaaaaaaggacagttacaaggaagtcaggcatatatagtttcaagaaggcccatgaaagggcatggaagggagatgattcagttgggtgttcgaattgctgatgccccagcagaaggggaaaatatgacaggagcctccaaagatatgaatgtagaatctattccttccttgtttcaagatattattgagcgtatggtttcctcgcaagtgatgactgtgaagcctgattgctgcattgtggatttctataatgagggtgatcactcacaaccccacaggtggccatcatggtatggaaggcctgtttatgtgctttttctgactgaat

SEQ ID NO: 22510 - DNA, 204 bp, Glycine max
gttcgatgttgttgaccttcgagagcgatgattgattgattcataaatcatcatatgagtgtgggctctctgatgaaagcagtgatttactttgcatcttttctaccagacgcgatatttaaaattgcattggtataggtggattcttttgtatttatgaatggagagaattactaattgccaattcctcgattttgtactaga

SEQ ID NO: 22511 - DNA, 390 bp, Glycine max
aaggaatagaacgtgcgcgaagcaaacatggatcttctgtgcaacgcttattcgaatgcctcagaccacgaagatgaagaagaagaaccaccaaaacgacagagagtatccctctcttcccctaacccgccaaaacgacaccttcctttgtcttctcctccttcgttcaaccaccaaacgcaagctcccatgcccggaagatacatttccaaacgacagcgcgcattgatggcctccacccctgcccctcttcctgacccggttcctgttccgtctccgttcacgctatctgggagtatcttggatgctgatatacaccataatattttatcattgttgaaaagtaaagcaaagggtcatcaaagcccaaacctgaaatctgaaaagcta

SEQ ID NO: 22512 - DNA, 371 bp, Glycine max
gccatcggcgcaacgaccccgtttttcacagctatcttcgctttcttaatcacatgcaagaaagagaccggggaggtttacctcgcgctgttgccggtggtgttcggcatcgttgtcgcgagcaacagtgaacctttgtttcatttgttcgggtttttggtctgtgtcggttccaccgctggtcgtgctttgaaatccgttgttcaggggattttgttgacttcggaggccgagaagcttcactccatgaacttgcttctctacatggctcccttggcggcgttgattttgtggccgttcacgctctacattgaaggaaatgtgctggctttgactattgagaatgcgaaaagtgacccctttattgtgtt

SEQ ID NO: 22513 - DNA, 398 bp, Glycine max
aattcatctcagttggcgactgcttcacgtgataagtctgtgcggttatgggacacaaccaatccaagccgttgtgtgcaagaatatagtgggcattcatcagctataatgtctcttgatttccatcctaagaagactgaagttttctgcttctgtgatggtgaaaatgaaattcggtattggaatattaattcagccacctgcacccgtgtaactaagggagctagtgcacaagtgaggtttcagcctagactagggcgtttcctggcagcagcttctgatcaaggagcgtcaatttttgatgttgaatctgacacacatatttacaccctccacggacatcctgaaccggcgagctatatcatgctgggatgggaatggtgatgccttggcatctg

SEQ ID NO: 22514 - DNA, 478 bp, Glycine max
caaaggggatgccatgtggtgtttgctcatgagtgatcttcatgtcgggagggccagtgctatggagattccggtgccggacaatgggagcactgtgccggctaccggtgacggtggtgccaattcggctggtgttatggcgccggctttgtgtaggtttcatggggggtggggatttggaaatgggggaggcttggaatttcctgtgaacgggatattctcatgtggtgcagagatgaatttgcagctgcaacgagacattgagtttccgaagaggtttaatctttctccttcgatcaagtccttgttgaagagaaatgttgctatgtttgctgctggttttagggcaaactccaagcaattgcaggcacaggtgaaggtcgttcccggccggagtacagtgcctagtttggattcttcggctgtatctgggacagaagtcccggctgagcagtccggaggaaattcacagcatctt

SEQ ID NO: 22515 - DNA, 676 bp, Glycine max
ctcttgcgtccgcgacgagagaagaatgctgcattgctgcataaaataaaaatccatgacagagtcattcttgaatttcatcagttttctactcgcccgtcaaataccagtactcaaggacaggcggtagaaaccaccaccaagctggagtacgatagagacataggtaatttcaggtggagcagtgatatgcttaaagatcagaaagaacaccaagaaagaacaccaatcggattagcaatccacgctttaatgcactcagtcatttctccccaaaaactctaaaccagttgcatgcagagatgccaacagctaacaggcacagctatgagcttctcctactccaccgacttctgctttactttgtcgtctcatgctcattatcgttatcttgggcagtgcaagatggtgaacgggttatggtgcgcaacaccccacagaagaactggtggaaaccaagtttaacaaatgcagaagatgatgatcctcctccaaggcccttgaaggttacttttgctgaacctgcaactcactggaccgatgccatccccattggtaatggccgtctcggtgccatggtttggggtgccgtaccctcagaagctctccagctcaatgaggacacactttggactgggattcctggagactacaccaacaaaagtgctccgcaagc

SEQ ID NO: 22516 - DNA, 473 bp, Glycine max
cgaggatgatgatgactcagaggatgattcggacgaggacgaagatgattcgggagaaggtggttcaaggggtcatgtggggcatggacatgaagatattgaggatgagaatgatggaaggtcaatgagaaagagggcaaggaaagtaggaggggtttctatgtcaccacagttgatgcaacagctgagtgctgaggtgagtggcgtgttccaagatgtacgtaagagtgcttgggacaagaagcaatggatgatgagcaggataatgcagttggaggagcagcaaataagctaccatacgcaagcttttgagttggagaaacaaagattaaaatgggcaacgtttagcaccaagaaggagagggaaatggagacagccaaacttgaaaatgaacgcacgacgcttgagaatgacagaatggttttgctcattcgccagaaggaaatttgaatgatgagtcttcaacaccaac

SEQ ID NO: 22517 - DNA, 202 bp, Glycine max
tgcagattccacaaccacgcaatcgcaattttgagagaaaataaaaaaaaaaaaagcaaaaacgaagaagaaactgaatgctgtgtagtactcgcgcgtgactgctacagattgagggattacgtcaagatagaatacagtattgattaaaatgctgctagtatttagtaatactcaaaaaaaattaaatgaaaagggcggc

SEQ ID NO: 22518 - DNA, 631 bp, Glycine max
cgttgatgggattcagattaaacaatcatcaaaattcattattattaatgacttacggggtaaagtagttcatatggatgtagtgaaaagaaagggaaaggaacatgagaaattgctgatttctgatgatgatgctccacaagataagtagacagaaagtagctggaattctaacttactgaaatgggcttctggtttcattagtagtaatggaacaacctaaaaatgctgaaaccaattcaccagagaaaggaaggggtggacgccatggaaaaacgattaatatcttttctattgcttctgggcacctatatgaacgctttctaaagattatgattctaagtgttctaaagaatacacaccgtccagttaaattctggttcataaagaactacctgtctcctccttttaaggatctgattcctcacatggctcaagaatatggttttgaatgcgaactaatcacctacaagtggcccacatggttgcataagcagaatgaatagcagcgaagaatttgggcatataaaatcttatcccttgatgtcattttccccctttctttggagaaggtcatttttgtggatgctgatcaagttgttacggcagacatgggagtactctatgacat

SEQ ID NO: 22519 - DNA, 497 bp, Glycine max
gtggctctaagaaacataacataaatttcaaatgaaatttacaatgtaaagctccatctgaactatgatagaagcaacatgaataaaattgaaacttacaattgagggaagtacgttaacatagtgtagattttgcgtagataattttaacttttcatctatagtgccatctacaagcagcagtttcttggtatcctccatttgactgtaataattcacaatgttcttggttttatgtgtgggaacctccagatcctcaaaaacaagaagctttccttctgctgcacgagctgataaagcaatcttcagccctagacgccgaaccttcttattgactttgaaagcatggcttcggggcttagggccatgcatggtggcaccacccctgaactgaggcccacgcaatgaaccatgcccttgctctaccagttcccttttgattccaaggttttctcccagtgccactgacctcactgatagtttttgttgagtgagtc

SEQ ID NO: 22520 - DNA, 783 bp, Glycine max
cgcctgcttagaggacttgatcattgacatttgacaatatgaaataaaacaaacggaatttgtatacaaaagaaagagatttatggtcctttccgaacagcaataagtagtacgacaaaaataggagaaacaagaaaaagaatatacggcaaaacctgattcattgcactttcttgaaccgggccatctcctccgggatagttagatttattttcaacaaatgcatcaaaataattctggtagtctgagttctttaaataaaattgagatcctgttgtcatcttcatcatttccatagcctgaaagctgtacatgaactgtcttgctttcttgcttactttaggatttggatgagatttaagcttctcatacatacctcgagtctcattggacctgtcaatcatcacaatatgttttgaaatcttgaaaaaagaaaaacaggccaattaataataagcaccagcactttccagtctcatgctgtagttgttagacaaagtcccagttgtagcagactaacaaatgtagaatctaaatgttcaccaagactgctgggcacggcaataaaaacctacaacttattttcaacagaaagaaaacaaggtctcatcatcaaaactatccgagtttcagcataccacggtgacaaggatttcattcccatattttccccacagattgcaatgtcaccacttttgaacagttaaattagttaaaggccgtctaaaaaattaaattgcaacttcactttgagctagttatatcttgtcctttgtatcaggc

SEQ ID NO: 22521 - DNA, 395 bp, Glycine max
tacaggcaaatatgtcttatagctgaactaggagtttgtaaagaagccttgtgaaggaagaaaggtgaaaataacaggaagaatcttatcctcaaatccctattccctgacagactttaaagtgaatgcaaagttcttactatgtggtacaaatatcaataacagtggtcttcaattccaaaatacacactactacttatttagtaacatgtaacaaccaaatgcatgcccttcttcaaacattcagagcttggaaaaaactggctttcgtttctgcttctgtgccatcactgcttcagttaagtcagaggatagcaatctggcagaattcaaggttgcaacataatccaacccctgatccacagttaagtccctacttttaagcaacactgttt

SEQ ID NO: 22522 - DNA, 559 bp, Glycine max
  unsure (1)..(559): unsure at all n locations
nnnnnnnnnnnnnnnnnnnnnnngaaacaaattatatgaattaaaattcagggaaaaaaaaattcatgacaaaaagcgtattttaagccttagtatcgttcttcacgcatcaattgctccaaacatcgtacttgccgaatgcagatgcgacagtactcccaaaaggtagaatattatcccacaaaataaatcagaattcaatatattttttttacaggaagccatgggtaaatatgaagacccggcagaaaaaaagataatctacagtaacgaattcttgatctaacctaacaagtcaacaatacatatgatcatcatattaaccagtgaacctggctcccggcaggtaagacaactgtaagaaactcgaatgaatgtgacgccaaatccaagcgctcattgtgttgctcagtttagccactatgcctacacctggagaataaacatgtattacaatacaattagagaccgaaagaagacaaagcaaagtaaatattgaatgcatttgatgaacaaggaacttggttaagtgttctacagcagaagacatcattcgtgc

SEQ ID NO: 22523 - DNA, 595 bp, Glycine max
aacaatccaaataaaatatattaaccatataaataaaaattgcattgcagattggtgcaatgtctaagttgacagtgcctaggattctaaaagcaaaattgtatttatatttatgtactagaagtctagtataccttattgcaacatcaacggtgggagaaaccaactaagattaagctaatgatgacgggtttggataggattcaaacctcatttccacaatgaaatataaaataaaaaataaaaccaagtttggagaccccctttttgctttcaagacctctctctgaactcttttagataaagtactactgacaacgaatatatgtgatgttagaacctaaatcaggaattttatttccacagctttacatagttgtcatgacttgcagaggcaaccattccagtgacagaagactgagccaaagcagatattacattttcatgtgtagtaattgtcatgcttttgttctctgtcatgttccataactccaaggatgaaattcctccaaccaccaacaaagttgaataacttggatggaaaacacaggaatgaaattggttcccaggggagctgaactcatgaatgcattct

SEQ ID NO: 22524 - DNA, 1100 bp, Glycine max
gattctgatgccaggacttagttttgatgtactgatattagctaaataacaataataattcctgaccatgctcgcaactcacagcatgtaatgtgagatttagtgagagaagtagtcccatgattaagggcacaaaattatgtaaaaatttacagggtataccctgcccaagtcccattgcaacataactttttaaataagctaggaacttgccccaaatacacggattctctgttggatttgaaccctgcagcaaggacaagtagccttgccttttcttccatactcatcactgcaactagcacacataacttggtgcgcgcacggcaagaaaacaatggagacttcatctttcatacatacaatgcattctctgttgctatttatttctttctcagaaaagtcctccacgattatctaattcttgaagcagcctagcaatggtctctctttggggctttgcacccttgcagtcgcttgtaggtgaagtgcttgactggttatgcaactcagcagactgagcagatgctttaagccgtgaaagctcctgctcgagtcttagtagatcatccttgtggcgctggaaatctatctctatcttcagacgcaatgcctcgagcttcctcttattgttagactcggctgcttccttacagtgtcgttcctcctcaactagtgctagggcttcctctttagccttcagctcctccttccacttaacctcagcttccttttgacattgtctaatctgaaccaatatttcttttgtctttaatatcttctctttttcatcagaaatctcttgctgcagcttagctttctgtttttcccaagctagaagttttttcaagcattttttctccctttttgcaacttctaagcaagctgtcgccgattctgatgcacttaatttggaagcctccatctctgctttcatttctgcattctcagtttctagtctcctcacagctgcattcccaaggtccagttgaccactggcctttctcaaagcattctccatctctgagagtctcttcatggttgtgtcctcaagcactggttttcctttcttcaatttttgagtctcctctctttctggt

SEQ ID NO: 22525 - DNA, 571 bp, Glycine max
gtcaacaacataatctctaacagactttctattattgactaaaatttattaaaaattacaaaattttgtgggtctcactttttaattatttagtgagtcttaaggttgtttttgtaatttccaattacagagagtctgttaaaagaagtatgtaacaaaatgtgtggccaacacttctcttcagggaaaatgccatcctcttgattaagtattgcttcaatatttgaagtaatagtgatcttacctgatgcattacccataagctttgtgtctctaaaaccaatagttacagccaaacacaagagcatcaacaaccagttgatctcagggatatatacttgtccatggattttggatgtagtgtgaaccactttaactctaggaaagcaacttaatgcagagcattgcctgatgattgagaaagttccagtgatgatggattggcttcccacaaccgcagcaagtatggctatcacaagaacaggccatctcaacttctctggtacagatacataaagcgcgaagtggtactcttgctcaacatcatgatgtgtagactcgagccgccgag

SEQ ID NO: 22526 - DNA, 776 bp, Glycine max
aaaataaagggatctatataatccatggaactttatatacacaattgaattagaatttgtgattcaggtttccatttacaaagatgagtatcattccaacactcaaacttagaatcatcggtacaactacagtaagacatacaaaaatttgctcaaatgatggttcctttcctcctacctagggaatgaaccaacacgcctacttgaagggggcatcgcacaaaacactcggattgaaattttatcttcaggggggaaagcagacccataaccttttaaatccggaactcttgcatcattgtttagtgagtcatgattcaactatatgcatttgtaattgacctggttcatcaaatccatatttgtacagttcagactgcatacacttccagttcctttcatttcaataaaggtgcatagggagcggggcatggagatatggtgtggtctggaagctggttaatgaagtcggtggttgcctgcaaacaggcatggagcattttcttttccagcctaacatattgggtagcaactcgcttctttggattcagattatcatctgtcagcatagattcatcttcagccaatgttgtagggtagccagccagccgtgccttgaaataatcagccaactgatccaacgcagcccgttccatacaagggcttacaggacaaactggaccttgagggcagatgacagattccatctcagaaggatctgaaacatagcccaaacgcttgaataacgaagcatatctaagacagcttccctttcc

SEQ ID NO: 22527 - DNA, 401 bp, Glycine max
ttttagaaacattatggaaattgatctcacaatatgcattaaactgttatcactctacatcccccgcaagggaaaacagggcaatagatccaaataaatcgagttttttcggcccaagttccaaataaattgatgactactgaaaattctgcagctacttgtggattgtaaatagtgtgtttcccgacacaaacgatatttcctcttttctttttcgttaagaaaaatctccaacaaggaaaaggatgcaagaaagcttgctaagctggctacagcaatgaaaacacagctctagtccggcttattcattctccaacggtcaaaccaaacccaaatttgtagtcttttttcctgtggtcaagctctgcagaaagaataaaattcagacccatatttaaccg

SEQ ID NO: 22528 - DNA, 655 bp, Glycine max
gcctcgctctggtagacaggctaaattgggtgagaaaaacaagttctattatgatgagaagctgaagagatgggtggaggaaggtgctgaacttccagctgaagaagctgctgctctgccaccgcctccaacaactgctgctttccacaatggttcatctgaatacaacttgagatctgcattgaagactgaaagttcacctcctattgagggctctaacataagaactgctagccctgaacttagtccagggatgccaccgataccacccagcgcaaatcaattcttggcccggggtcggttgggtgttaggtcaaggtatgttgacaccttcaaccaaggtggtggaacctctgcaaacttgtttcagtccccttctgttccttctgtgaaaccggctcttgctgccaatgcgaagttttttgttcctactcctgcaccatcgtcaaatgagcaggcaatggatgctatagcagaaggcaagcaagaagacagtgcaacaaatgaatatccttcaacatctgccacaaatgactggtcataccgatccccaaaacatgtatcatcaacagccatacaaaggtttccaagtatgggtaacatctcaaagcagggagcaacagaaggaagtaactctcatttacctcattcacgc

SEQ ID NO: 22529 - DNA, 412 bp, Glycine max
gccatatttagtctcttctatgtgtgcttcaaattctgtgcggaaagttgaggacttggagatgttggtttctcaatcgaagcatcttaaagtatctttggaagaaagaggaacgcttgaattagttttgaagaattgcagaatatgggagtatgaagcatgttctgtactagatgatgctcggtgcttattggataattctttgcctgaaataaacagtggtttaacttgtaaagtggaagatttgattgaaagaatccaatctgccatagcatccggtgtatcacttggttttgacttcaatgagatttcaaaactccaagcatcttgttctacactgcaatggtgcaaaagagccttgtctttctgcaattgctctccttctttagaggacgtgttggaggttgcagaa

SEQ ID NO: 22530 - DNA, 432 bp, Glycine max
  unsure (1)..(432): unsure at all n locations
agcagtagtctggggtctgggaggtgaaggagagagaatggatcctttgtcggctctcagagagtttacgatgagaggcgaggtggaaaagatagtgcgtgtgaacgcagagttccgattcggggaggagtacaccttcccatgctgggtggagactgcttaccgttccaccaagggcaaccgttacacccttgaaaccctagtccactacatacaaaaccaccacctcaagcacaccgagtacatccagaacaccttcgccgtcggcatcccctccgtcaccctccccgaccgcaagcccctcctccaatacctccagggcaccctctcctcctccgattccatcgagttacgcccccacgacgaaccttcttcctttccaggccccanatccaaccccaaccccccttccctgccccctgaggacctcaa

SEQ ID NO: 22531 - DNA, 397 bp, Glycine max
  unsure (1)..(397): unsure at all n locations
cttcctaacatagaatataaagatttggcacctctcttcctactatcttcgccctcctaacaatgctttcaccaatggtaaactctactccatctccatgcatcaccatgaatttcacatttgctgtgtcaatcagccctaaggctttatcatcagatagtatttcttcagaactcagtgtagcctaggattcatctctatagatgcatgcacaactccacgataaatcgtcgaattagacaacattcaacgacaactctgattgaggccttgttcgtggagaaattaagatggagataatttaccagtctcacatcgacagggagattgaatcgctcatnagaagaatccatccaaccagggtctgtatagacaacgattccagcagagactgcac

SEQ ID NO: 22532 - DNA, 271 bp, Glycine max
caccaatggaaaactctactccatctccatgcatcaccatgaatttcacatttgctgtgtcaatcaaccctaaggctttatcatcagataatatttcttaagaactcagtgtagatgcatgcacaactccacgataaatcgtcgaattaaacaacattcaacgacaactctgattgaggccttgttcgtggagaaattaagatggagataatttaccagtctcacatcgacagggagattgaatcgctcatagaaagaatccatccaccca

SEQ ID NO: 22533 - DNA, 428 bp, Glycine max
cgcattcgcaccaatcacttggtgtttacattcacaaatcacaatcccacacttccttcctcattgtcctcttctctcctcacatttcaacgcgccgccactctgcgatccgcgatgaattctcgtgaacagcctcagccacaacagccaccgcaaccacaaccgccaaacatgacggtgggacccaccatgtacccttcgatgttgtcccccgtcaccgccagattcccattcagcagcagcagcaacaacaatcctcctccttcggagcctctcaacaacgacaccaacgacaatgataacagcgcgttcgaggcgttgaagccttgcgcgctggccgcctcggaatcgtcgaagaaggagcggggccgcccaagaaaatactcgcccgatggcaacattgcgttgggcctcggcccaacccatgc

SEQ ID NO: 22534 - DNA, 430 bp, Glycine max
  unsure (1)..(430): unsure at all n locations
gaaaagggctataacttcgagcaaatcgaaactctctctctggaggtaacatagacccttatcatcccttgacacctctcttctaaaaaatacgctcttgcccagtgacaggcagacagcagagctaggtgctaaaaggtcgaagatgtatatgaacccaacccaaatgaaataaacgccgtttttgtgttcaggcaattggaatttgtcaccccatttggcaagttgaattttttccacaaagaaatgacaaattccgctggttccaaggttctgaatgacaatgcaacaggcacatttttaattcctacttctgaataatggactgcacagtgtcgtttccttgtgtgcattttattccggtgggaagaactttgtgcaactacagcagagtcactttagtagcacattcaanaaggagaaaaccatc

SEQ ID NO: 22535 - DNA, 427 bp, Glycine max
acttcatgaccatcatgtcgaatggtgctgttgacacattaatatctggcaccatcataactttgggtgccacacaaatttttaagaggttggatgttggtccactggaattaggggatttcctagcaattggtgcaatatttgctgcaacggattctgtttgcacattgcaggtgctaaatcaggatgagacacctttgctgtacagtcttgtatttggggagggtgttgtgaatgatgctacatcagtggtgcttttcaatgcaatccaaagctttgacctcaaccaaatcgacccttcaattgctgggcactttttgggaaatttcttgtatctatttattgcaagcacaatgcttggagtgttgacaggtctacttagtgcttacattattaaaaagctgtacattggcaggcactctacaga

SEQ ID NO: 22536 - DNA, 341 bp, Glycine max
gtttgatccatatgcaagaattggggttggtttccgtcggaggaatggaagatatcgtaaaagctaaagtgcgaacggtggttcctgcggccacttcttttcgtgaggattgtgctcggattctacgtgcaattagaattgctgctcgcttggggtttagtatttcaagggaaacagctcaatctgttaaaagtctttcatattcagtgttaagactagatagggcttctgatggaaataaattatatgctaacttatggatctggtgaagcttctctgaggctactatggagatttggacttctagatatacttctcccatttcaggctgcttattttgt

SEQ ID NO: 22537 - DNA, 453 bp, Glycine max
gacaaaataaaaaatattcatgtaaatgaatcaatgacttttttgaaaaccattaactacaatcaataatgtttactcaatgtagattacaatttgcgtgtttcaccatcagaactctccaaattccaacattgccaggaaaaaaggaaagacaaaaaaaactatatatttaaagagacccaaggagaaagacaatggaacccgcatctaaattcatgcacgcagatatacaaaatacacaacaatgaatagacaacacccaaaagccacaattttttttcttccccatgaacctgctagtcttgaacggcatcaattgctttgcctgtcctggcttgtgagattcgatttgcataaatggtgaccaacttcaactgtgtgctgttaagcccttgcaaatatggcaagaatgctctcccaagcatgatatacataaccacgagacagaaaaca

SEQ ID NO: 22538 - DNA, 327 bp, Glycine max
aaaacttgaattaaaattaattttacaaaattgttttttaacaaacacaagttttcatacgctgtcgccgacctatgcacagacttatatagtctctatgtgctagcttactggttttcctttcgtactttaaaacgaagcaaagaaaaatgtcccaatgatatctgaacacgtcaccgttttgactccttcttttggaaccactctgcctagatgctctgcaagtattgggccgtgacgcgttgtccatcaccgacgcgtcagcctaacaaacccgccactgaggcatatttcgttgaatgaatcttagagagagtgagtggcctt

SEQ ID NO: 22539 - DNA, 410 bp, Glycine max
tcgccctttttttttttttttttttaaaccacaactaaagggagacaatttatttgttagaaaataaatgtaaacatcatcttatttacagacactgaagatttaatccaacaatggatgaatgattgttaccactgttttatctaatttccaccataaaaagttaaaaactaactgaattctattaaaaaaaaaatcctacctacttttggcagctggataaaactaatgcttcctacgttaatttacgccatctttatcctaataactcaagccttcaaatggtgaaatgcgaacaagaaattaaaaatggaattttcgcattaagatggattaaaaatgaccgagatgacaccataaaaatcatttgaatcaatttaatgaccaatgatttctcctatgtttagcta

SEQ ID NO: 22540 - DNA, 346 bp, Glycine max
tgttagaaactaaatgtaaacattatcttatttacagaaaccaaacatttaatccaaaaaaaaaaatggatgaatgattcttaccactgttttatctactttcccccataaaaattaactaaatcctataaaataaaataaaaaaatcctacctacttttgtcagctgtataaaactaatgcttcctacgttaattcacgccatctttatcctaataacttaagacttcaaatggtgaaatgcaaacgacacgatattaacaatgaaattttcacattaagatggattacaaatgaccgaaatgacaccattagaatcaattgaatcaatttaatgaccaatgatt

SEQ ID NO: 22541 - DNA, 547 bp, Glycine max
gagttcacattgtggtcaaacccctcaaggaattttatctatctttagaattcaatttcaacagattggcaatcttaacaatctaccctcctgggaaaaattttaagaaaccgataatgcttctataaaatatttctgagaacacaaggtttcagaattaagtcccaaaattgcaaaggcttgacaatagttaaatgctaatactaagtcctaaaacagcagtagcagttttactctaacacatctaagggaagaaaggtaacaaaacaacctcactttgattaagttctctagtacctttcaggatatgcagaaaaatcatcttttaaagatgatgagacaggttacccactcagtcttcaaactttattttctttggagcaggttggatgttacccacaatctcagggcattcataatcaatcccagcagcctctatccttttacgtcgtttttggtcatgtttcagaaccttctccaccaacttcccgtgctcttccaatgttctatccttgtcatgacgcttccgttcaatctagacagaata

SEQ ID NO: 22542 - DNA, 523 bp, Glycine max
gtaacaagcatgggaatgtaatattctcaagtgcacattactgagaatcttccttcataacttacgacaaacggcttgtaacaaatattttatatcccacgtcaaggaatatgctgctgctcggttaagggactcatatctaatgaacgcaaccaaacgctataaccgctatcactgtttcaattatagtttgaaaatcctaatccacgggaaaataaaggtatgtaaataaatttagaccttaagatagattctcctaaaatcagtcccaaccaaaaccaatgatgcatgttatattttgggatttgacctctagctactgctttgaagaatcatcatgccaataccctgcttctgcagagttggacttaaaaacgcatcatcactgctgagtatggccagcccataattgatgttggtacatcggcatggtatgaatcggctggctagcattattatcgtatagtccagggcctcctggcccctgactaaaatgactattctcattatcttcagatgactc

SEQ ID NO: 22543 - DNA, 438 bp, Glycine max
gccctccttttttttatttttttttttttttttttttacaagcaaatttcttgatatatcatatactaatatgtatattttacaacaacaaaaaaagagagtaagcataaattcataaacacaaacttatttaaagacccaaaaaaaaactaaaagaaaaaacaagccagtttctaagagctctatggctatacacagaagaaaatattgggaagtgaaaatcatttcccctttcttgtttaaccgtcattgctgcattcccatttagaagtagggacacatgttaagtagcgacaccaatggcagtggtcataccctttctcaccccgaaatagcatcaccaatgcagtcgataaccctgcaatcaacagaataagagacacaacccctagaacatattggtgagtcttgtactttgacttcatctgaacaccggca

SEQ ID NO: 22544 - DNA, 271 bp, Glycine max
tttctttttttttttttgaagaagggtaggggtcacactttattcatcatcgaggactacatctacatacacacttaacaagtttttagtgttgatactccaaaccagcatcaaggaaattgcatacatgaattcagataacgacaagagaaagcaaatacacacaaacataggcataggtacatttcataatacccaaattaactagtaatctacaccagctaaaggttgattatgaggaggctcaattgggaccataacgtattcatac

SEQ ID NO: 22545 - DNA, 373 bp, Glycine max
agatagtaataaatatcacgaccgaattcatattcagaacatcgataatttacaacaacttaactcgtgctcattctttattgagaaagaaattcagttcttatactgaatctcatgcacatttctaaatcattctctcattctcaagttctataccattaatgctccctccatatttctaccaacctattcaatgcaactactgaggatccaccttcagtcattgcttcggtggcactgtttttcattttgaaaatcctctgtctaatctcttttcccctatccgagttcatgagctccttgactcgggcacccaactcgggggaactcactaacccgttattgttttggtccaccggcaaccccaccttta

SEQ ID NO: 22546 - DNA, 487 bp, Glycine max
gattaatagaatgcaaaaaactaacatttatatattactactaccaagtattacaatgagtaattttactgtgtatatatcgtgtattaaaaaatcactattcccattgaaaagcacatcaatcattcagggagcagttgagttgcttgctcctacaacaaaattggtgatccattctctttttaccccgtgcattcctctcttcatatttacatgtagaattagcctaatagtaaaatgtgttgtctttgtgattgggagcatccttgcatagcatggaacgaacttccatgatggatctaggtggctccaggtctttctcatgcaatgcatttcctagaagctgttgcatgtgtgaagcaaatgtatcatccagaatagaaacagcaacccttgaacctttgtaccacgatctattctcttttctgttctccaagaaacttaaaatttcctgtcccatacgatcccaataacctcggcatatggc

SEQ ID NO: 22547 - DNA, 383 bp, Glycine max
gaaaagaaaagggtatatagatcgtcctcaacaaaaccacaactctgctatctcttgctaataattcttcaaaattatctagaatgcatgtaatcaagtcttgttcaagattctccagctgggaaaaaatggacaggaaattatccagtggcctttacatacaaactagagaaaattatcaagctcattttgcagatcctgtatggatttcagattaatgatctggatctcttcactcgtgtattctgattgtactagggattgaacttgggtatgggcttcaataatatttgtctttattggcttgaaaagtattgttcatgttgattaattctgttaataaagcttcatcctatcaatcagtcccggcagttgctcctgaa

SEQ ID NO: 22548 - DNA, 507 bp, Glycine max
gtgaaagatttttatctatcttcaaatggtaatcacagtaattactaattagcatccttggctcaacaagttaatacgttctgcaggtattcagttaaagacaagtaagaaacaagttccgggaaacaagttgtgggaaacaagtctgatatccttctaacaaattaatcaacctcctcgcatatgtgcaccaagctcgccaaactgatcatcagcctccactgtatcttcagatagcctcacagcatccagcttctgcttgagaatttctatggcatttagaaccaattgagaagctttaaccgctccagtagactccacagtgaatatgaagctatcctgcctcgcaatgatttctacaagcccaggcttgcccatagcttctgctttcttaagcacctcatcatcatatgtgtatgcctcagcatcaaccaccatcacctgttgtgtcactggatcaatttcaaagacacgggttggactactgtcaacccattctcttttctc

SEQ ID NO: 22549 - DNA, 393 bp, Glycine max
gaaccagtaaattcaactgtattaaacattccaaattattaacctcagtgtaaaaagaattcgttatgtttgtcaatgtacaaaaggaagccaagccatttcataagaaagagggatttagaattgatacaagcaaggacaatgcttgcaggattctaaagtctatagtttttcatctatctaactgtgacacaagatatttatctagcttgaaaccagacatctcagcttccttgcagagctctttgcactttgctatcctcccagaggccatgtagatatgaagcatgtccttgtacaagccaaaagagggagaaaatccaccctctttaagttttgaaaaatatctcgtggccctagatagatcattcaaagcaacaaacagttttatta

SEQ ID NO: 22550 - DNA, 535 bp, Glycine max
gatcaaatactgaaaatcttcccacaaggatgaaggatccatacagctaccataagcttgaattggaaatgaagatagttgactaataaaatacgcaagctctacaataacaaaatcttatccactaggggaagtctattgcataataaaatatgcaggcgctagccaaataaaatttaggcattaacaacgaacccccaaccaatcagtcaacgagatcatgggtcacaaatactgaattggaagaattataccagctaaaggcgcggttggaccaggaatttttttccaagtttgagaatattcagtgtcaacgatcattaatgtttcagaaaaatctatgccacagcttatatgcaatgctcgatactacaggcccacagtgaatggctcacgaccttctctctaccctcctttcactagatcttttctcctcagcctcccgctttttttgttgcgcaaattgcatgtatccaccaccggcattagcagcagataaaattgctgcatgagccccaatagtagatacagaatc

SEQ ID NO: 22551 - DNA, 984 bp, Glycine max
ttttatcaatttgtaagattgattgataaattaaaagaattattaaagtaaaaaataaaaaacactgataacaaaaagaaaatggcaaaaatattttttgcgggtggaaacagtttatcccttttttatccgctgcctatttagcctgtcacgggctgatgacaaagttaatgataattcctgcaagtacccctcaaatgtcaaatgctggcaccagaccttcaccacacattattccaattttcaacgactattacccttgatagaatgcctactccagcatcaattttctcacaacttctaataaaacttcaaactagcctcttgaaaatccagtgctcttttttaactgatctttgcctgggtgtagtggatatacggtatcaaatacaatccttgcaaacacgtgccgtacttctagcaagtctccacgagctaaggactcataatcaatttgtctaccttgctttgacaaaaaattcttactagcacttactctcacacagtcaaaaaagttgagagctcttaggtacattggtattgggatgagcccaagatctgaatgaggagcttgaggatagtcagccatagccccagatacgaaatgcctatctttcatctgcaataatgaccctttaacagactctgcaagatccagaatctcagcttccaaatcctcttcatccagacctgaaggatctaataattcaggaaatctggcatcatgtgttttgttgatcctcctagctatgcttattgcttctgacaaatttccaccattatggagtgcaaggctaaatgcagcaaccaccgaggaatccctaggtttatcgctcaatgctttatgtaatgcaaggataacaaccctgaaagcatagattccttatgagccttgctttgatgaccgaagtagttatcagcctgtaaaagattaatatatagaggattctgcggcaaccatgggaactggaaatgtttactcgt

SEQ ID NO: 22552 - DNA, 235 bp, Glycine max
  unsure (1)..(235): unsure at all n locations
ccttcaggaactagttaacgatttgtggagtcgattacattgtttggttggatattgtttctggtcaggttatccttgtgttatgtaccatgtttaacctttgtttcatcatatagctccaaagtaacatgtaaactttggtgaattggtgttgatacaaagcaattatcaaatcattttaaattcttatttttggtannnnnnnnnnnnnnnnnnnnnnnnnnnnnnnnnnnnn

SEQ ID NO: 22553 - DNA, 576 bp, Glycine max
cggaaaatgtacctccagcaactctccttctgagtcacatcaacacaaacatgtatctatgataaaatatgtcacaccccactaactagtaagtgcatccttcgtcaactgcccaatcaatccaaagcagagcctccacgtttctttctttcttattaaagctgatgctttctgtgacttcattcattcagctgaaaggaaatgaggggtaaaacagcactactaacagcagacaagaaaaatggagattgaggacacatcaagtagagtatctattgcatttcctcttggcttagctcttcttgttgccttgttattgttcttttgttgcttcttttgttgctgcttgcactgggaaaaactccaacctttgtttccattttgtatggttatcgtcgatactcagcctctgacacaagcagacttcactccccctcctcacaagccaggctttcctgtcttgatgatgcagcataaccgaggtgagagcttgccagtgctgatgccaggagatgaggttccaaaattcatagcactagcatgcccatgtcagcctccaacaaatgaaatgatcac

SEQ ID NO: 22554 - DNA, 947 bp, Glycine max
ataacaacaatcctcacatgatgtctactgaaatggttgcatgtattgcaattgaggctatctccatattagagaagatgcattctagaggatatgtgcaccgtgatgtaaaacctgagaactttttgctgggaccccctggcactcctgatgaaaagaagttgtctctggttgatcttggattagcaactcggtggcgtgatagttctactggccttcatgttgactatgatcaacgtccagatgtttttaggggcacagttcgttatgctagtgtgcatgctcatcttggtcgaacaggtagcaggagagatgacttggaatctcttgcttacactcttgtctttcttcttcgtggtcggctaccttggcaaggatatcagggagaaaataaagggtttcttgtctgcaagataaagatggccacgtctccagaaactttgtgttgcttttgtccccaaccatttcggcaatttgtggaatatgtggtgaatttgaagtttgatgaagaaccaaattatgcaagatatatatcccttttcgatggaattgtgggcccaaatccagatatcaggccaataaacactgaaggtgctcagaagcttatatgtcaggttggacataagacggggcgattgaccatagaagaagatgatgatgaacaaccaaataagaaggttcgaatgggaatgcctgctacacaatggattagtgtttacaatgctcgtcgaccaatgaagcaaaggtatcattataatgttgctgatgtgcggctggcccaacacattgataaaggaaatgaagatggtttatttatcagcagtgtggcttcttgttctaatctttgggcactcattatggatgctggcactggtttcaccgcacaagtttatgaactctctcccctcttccttcacaaggaatggattatggaacagtgggagaag

SEQ ID NO: 22555 - DNA, 348 bp, Glycine max
ctcgagccgctagtttctctaccctgctattcttcattcttcaaaatcaaaattttcactcgcaccacactgcacaatttcggagtgtggctggctccatggctgaactctacaggctcagctccgtcgagtggagcccttctccggtcatcgctttagccaccagcttcgacggctcccgagtagccgccgctcgcaaagacggctccctcgaaatctggctcgtctctcccggctccatcggctggcactgtcagctgactatacacggaaaccctaacggatgagtgacgtcgcttacttggtgccccggtggccccgactgaagccgcttgatttcgtccaaca

SEQ ID NO: 22556 - DNA, 1146 bp, Glycine max
gtaagacacctaacactgttggatatacttgaagtatcagcagcagcaccacaaaaattattcagaagacagcactttgattgtggatagttcagatgtgcaaaatgatcttatgcctgcaatcatggtcaagggaaaagatgaattttctaaccattttacatcatcttttgatggaaatgcaagcttattgattgacaaggcacaacaggaaaaggctaatagtcatatgcagcctattggtggaccaaagctctctagctcaagcaagaaaagaacaagagttggtaacaaccaaaagtcaaggccaagagatagacagctgatcatggacaggatgaaggagttgagagaacttgtcccagaaggtggtaggtgtagtattgacaacctcttggaacgtaccataaagcacatgctgtacttgagaaagataacaagccaggctgagaaactgaaacgaattgctaatcgggcggttcccgagtgcaaaagacagaaagtcaatgctagccacccaggaaggagctgtgcatttgactttgaaagtgaagtatcctggcctatagtcatagaagatctggaatgctcagggcacatgctcatagagatgatatgcaacgagcatggactcttcttggagattgctcaggtgatccggaagctggatgtcatcatcttgaaagggatcttggaaaactgttccagcaacagttgggcttgtttcattgttgaggttccaagaggttttcacagaatggatgttctatgtcctttactgcatcttctgcagcttaggagaaaccctgtctcttgtaaaagctgaccctaccatgccagttctcagtttcaaacggctacttctatttagagaagttaacatacaataatattcatgagggccttcttctgtgtactgctgtaaatgattgtgttcatgccctcgttagtgtacttgctgcatttttggtgcgttcattataagctagtacctaaatatatatgtaaacaaacaaggacgctttaggggtgctactggctgcggaacaatatgtgcatacaagctagctttgaactcatttctagtgtggcattattatgacctaaatagagaacgagaactgtttgctaaaaaaaaaaaaaaaa

SEQ ID NO: 22557 - DNA, 300 bp, Glycine max
cttttagatgctgttgttggcaatttttgtggtgctgctgctggtacttcaagtatatccaacagtgtcaggtctcttacaaccatgccaacagagtttaccggttccgttcagcctgaaaattattcagaagaaagcactttgattgtggatagctcagatgtgaaaaatgatcttatgcctgcagtcatggtcaagggaaaagatcaattttctaaccattttacatcatcttttgatggaaatgcatgcttattgattgatgaagcgcggcaggaaaaggctaatagtcatatgcag

SEQ ID NO: 22558 - DNA, 670 bp, Glycine max
  unsure (1)..(670): unsure at all n locations
gtcgagccgattcggctcgagtggagagggagtgagaggtgaagcgataaatcacagatctacatgaacaacacaacaactgcagcatttatccgatatctcaacctcctccgatcttggagctctggttgcttctgtttcatgagttaaggccccatggcaagcaatcctggaaatcatgccccttcaaatgggtctgtctatgtatgcaacttgccctatgggactgacgatattatgctggctgaatattttggtaccatcggattaataaagaaagataaacgtacagggagaccaaaaatatggttatatcgagacaaagaaactaatgaaccaaaaggagatgctaccgtaacatatgaggatccgcatgctgctgtagctgctgttgaatggtttaacaacaaagattttcatggcaatacaattggagtttttatagcagagtcaaaaaacaaggatgagcaagcatataatgcagcagttgaacctgtagttgctgatgatgttggtggactagaggaaactaccaaggatgttaatggtggtagtggaagagggnnagtgtcaaaatgattcttcaggcaaagcatggcaacaagatggcgattggttgtgtctgaatacaagttgctccaatgtgaactttgcttttcgtggtgcttgt

SEQ ID NO: 22559 - DNA, 322 bp, Glycine max
gtagggagtggaatttaaatggagaagacacgtgttcgacagagagcttgagatgacagattgcttccttactgaagttgctggcagcagtatccagattcacagaaaagatgagtggatctggaaagcagagcctactggacaatattcggtaacaagcgcctataatatgctcaatggagtggatgttgacgacgataatgggtgggtgtttgacgagttatggaagattcgagtcccaactaaaatcactacttttgcatggaggttattaaaggagagactacaaacgaaggcaaatttgaggaggagaagggtggca

SEQ ID NO: 22560 - DNA, 537 bp, Glycine max
agttgccggatttcgcacttgtggttggcacgaatgattgtcacagagagtgttttagcaatgattctcgtactgcgtatgctaatgtcaatggattagggtgcatggtgtggcatggggacttggttgatattcaacatttggaaagtggaggaaatacattgtacatacgcctcgctcattctgatttagatgatggtggaaaaacgaacagaattgtgataatatcaactgttgtggcggggttaatctgcctaggaatctttgtatggctggtgtggtgattcaatgcaaaactgaaagttctgcctacagtttcctcagtttcttgttgcaagagtagtaatgtactaccagtttttgatgaaaacaagagcagagagatgtcagcagaattttcatgatcagctgaccttactttggaggggaaccaattaagtggaccagaatttccagttttcaattttagttgcatttctatagccacaaacaatttctctgaagaaaataagcttgggcaaaggggttttgggcctg

SEQ ID NO: 22561 - DNA, 673 bp, Glycine max
tgctcctccttcatctttctttgtcaatatcaacaccatcatctccaacaccaacaaaatctttccaatttaggaaactcttctctcagccttccttccccttctctcttttccaaaactaatggaaggttctgtccttgaacgtcttgattttgggaagatgggatacgggtgcaagcattatagaagaagatgcaggattagagcaccatgttgcaatgagctctacttttgccgtcattgtcataacgaggcaacgagcatgctgagcaacccttttgatcggcacgaactcgtccgccaggacgttcaacatgttgtttgttcagtttgtgacacagagcagccagttgctcaagtttgcacaaattgtggtgtcagaatgggagaatatttctgcaatatctgcaaattcttcgatgatgataccgggaaaaaacagtttcattgtgatgattgtgggatttgtagacttggtggtcgtgagaattattcccactgcagtaagtgtgggtgttgctactcaaatactctgcgtggtaatcatttgtgtgtggagaactccatgaggcatcattgtcccatttgttatgagtatctttttgactcattgaaagacattgctgttatgaaatgtggtcacacaatgcatagtgtctgctacctacagatg

SEQ ID NO: 22562 - DNA, 418 bp, Glycine max
ctcgagccgctcgaaccctttactctagcatctcactctctcgttgccactgcgccgccacctatcaaccaccgtgtcaccgcctgtccgccgccgcctttccatcattgccttcttccgcgtgagccaaattgccctcttttcctcaccttcttctctcgtttcacatcaccgttcagctactggtttctgcgctcgcgcgcatttcaagcgttaagcagctgataagaattggcggctagtcgcagcaacaacaacgataccattaccattaccatgtcgtgcgaacccttaccattaatggcaaccccactccagtttcagagggcagccattgatgatggtgatgctcaaaagcaacacaatcccatggaattccagattctcacttcgtcacattttcggcttcccgatggct

SEQ ID NO: 22563 - DNA, 351 bp, Glycine max
ctgtttcttgctgcttgtgctctatgtgggtcgcgtgaagggaacttcatcagcacaggatggatttccagggattcctaaacgacttgcaggattgggaactttctagaaaggataaaacacgagcacaaaaggaaaatgttggcttcatcttcacagcttactggatccgtgggtgtggagaaggcatcataaggagataccatttcttttgatcgtgcaagaaattctccaggacagtatgatttgtcaagaattaatgatcctttcaatcgtgtgcatagtagttttgttcctgaagatgttcctgatgctgtttctgagaaagatctgggtaatgagtttttcaag

SEQ ID NO: 22564 - DNA, 246 bp, Glycine max
ttggggttgcagaagtagtgtttcactgtttcttgctgcttgtgctctatgtgggtcgcgtgaagggaacttcatcagcacaggatggatttccagggattcctaaacgacttgcaggattgggaactttctagaaaggataaaacacgagcacaaaaggaaaatcttactggatccgtgggtgtggagaaggcatcaaaaggagataccatttcttttgatcgtgcaacaaattctccaggacag

SEQ ID NO: 22565 - DNA, 340 bp, Glycine max
aaaccatcatctttctttcttctttttctcactcccacctctcttttttctctcacccccaatcccaaacccaaacccaaaccctagctagcttcaccatgcggttccaatcgctctaaccctatctccttttctccaccaacgatcttcgatccgcatcgccgttcattcgaatcgtctcagattctccgctgcttccaccaccaccacaaggaggaggagttcctcgcgattcccgcttgaagcttttccgtcgccgccgacgatcgaagagattcgctccgattcccaacgcgccgtcgtcgaagttttcatcgaatgaacaaatcctgttgttcct

SEQ ID NO: 22566 - DNA, 543 bp, Glycine max
  unsure (1)..(543): unsure at all n locations
ttttgactataatttgacatcattcaatatagctgaccaaaaaaataatactattatcagaattataacccctcgtactacttctagaatgtttgctatcataaaaaataacccctattacatttacagttctatcattgaactaaactgaattcacttgtgatggggggggggggggggccctaatagaaaacaaaaccaacccaaagagttttcctccatgattttttttctagacagtcagtgtcccttcaagcatcctcggcactattttccactcattgtatcatcaaaatctttttcgggaccctcttgaaatccatggncacatataataatcaatgatgccactaccatggacccatggtaattcacatggttgccttggcaaaattctaatggcaaaaaacaaaaacacctttctccgcacccaccatccttttggctggagtagttccaacaattctttccagccgaagcttgtcaaggtaggaaaaaaggacagtgcatgtcatattgtccgacccatcaagcatattcaca

SEQ ID NO: 22567 - DNA, 534 bp, Glycine max
tctttcctttttttttttaaaccaaaccgttataaattttttggactgaaccaaatgaaccggcatagtgttgcttaactacaaagaaacattatttttgtaaccaagggtctgaaccccgactaaacacagacatatatcgtactttgccaataaaactgtgcaaatttaactcttgcacagcctataatcatcgtttgatctaagtacaacctttcactttcttgtgtatgaaaaactaacattgaaaatcattttcaaggaaagagaacggcaagcaaaaggacgaaaaagtaattcctcgtgactaactctcgcttctatcacagtaccatgagcatgctgactaattaacaaggattcatctagtgctgaaaactgacccaaaacaaaatttaacattggacctgatccagtagttcaatcagcgtatctgggaaggtgaacaaaccagaccagaagcatctgctccaatcactgcaagatcgcaaacattacagagttgtccctcctggctaggcacataacgtgaag

SEQ ID NO: 22568 - DNA, 704 bp, Glycine max
catacaatacacgtaggtatcaattaatcaaaagaaaggaaaacgcgcgcgcactaaaaaacaaaccatgatttgctgccttgctggtatgcgtcattgcgatagagacacgcatgtacatctcaaaaacagctgtctggtctctgcattacatcaacgataatggcttacacgttccaaatcacaactcagatctctatacagcagctttcaaccctaaaccgcattatctatttaattatctataaggtccaaacaagaaatatgaacatggaaggttttatggaaaaagcactgttatgagtcttcaaaatgatgatctgtctcatcaaagatctcctcctgcaaaagctcttcaatgacatcttccatggtaataattccaacagcttcttcttcttcagggagctttggaagtggacttccatctatctctaaaatatccgagtacatattttttgaccattttctgctccgagaacccctatttgatgactcgtctgtatttggaaagcttttccacttgtggagtggcatcttgggtttcaaagctttctctttgggaggcttttcaccatcaatatccaccttaacatctctcaccgagtcatttgcattattttgggaagattgttggttagtcttgtcacaccgtctgacaacaacagccatgtgactatggcccttctgaaactcattcaaaa

SEQ ID NO: 22569 - DNA, 361 bp, Glycine max
atgcactacacacagtacaagtagctatcatttaatcaaaagaaagggaaacgcgcgcacgcacaaaaacaaaccatgatttgctgccttgattgcatgcgtcattgtgataaagacaacacgcccatgtacatctcaaaaggtttggtttatataacagctgtctggtctctgcattacatcaacgataatggcttacacgttccaaatcacaactcagatctctatacagcagctttcaaccctaaaccgcattatctatttaattatctataagggccaaaccagaaatatgaacctggaaggttttatggaaaaagcactggtatgagtcttcaaaatgatgatccgtctcatcaaa

SEQ ID NO: 22570 - DNA, 308 bp, Glycine max
gtcaacttaattacacccatataacatactcagtttaatatccagcggcggtaaggctctacttttctagctaacacccccatagttatctatttaggtcatgatgataatgccacaccagaaatgagttcaaagatagctactgcctgctaggcatattgttccgcagccagtagcacccctaaagtgtcctttttttggttacataaatttaaggtcctaccttataatccaccccaaaatggcaccagttcccctaccaagggcataacaacatccatttaaagaattcaccaaaaaaaggcccc

SEQ ID NO: 22571 - DNA, 337 bp, Glycine max
gtctttaggccgcgggccccccttttttttgtgttttgtcagccttcaagagcatcatcgtcttgtaatactatcattcacgctctagcaattattccattcaaacaacacaagaaattagctgacgacaactaatagttcaaactattgcgacattctcaaacaaaaacttgtccttgtgatatagaaaaaacattaataccataggttgtacaaaaggtccatgccaagtaaaatgggcattaatcagattgcaggaagttgatcccccaaacttaaggattgaattcaaagcaattgaaatccttccacaaaaggccaacacagcatggtagtc

SEQ ID NO: 22572 - DNA, 435 bp, Glycine max
actgaaactctaattctgatacgagaatagtaccaaaaatacttaaaaaaactatatcatagtttcacccttgaaaaaagaaataagtataacaagtctttttttttttatgctaagaatgaaagaaagaaaaaagaaaaaggaaaatatgaaggaaactaaaacactgtatcaaccagaaggtggtggctggctactggtatccgaccatgtggacgttggaaactccggcacgccgccagcgggattgcggctttccggtggctggaaatagcccatttgttgacttgaaaacaaggggaaagaagcagaggttgtgaataatgggaatggtgctggagacacagaagaagaaaatgaaggagatgatgatagcattgaaggtgattgaagtgaagcaaattgtgcattatagtacaactgctgaagcaaact

SEQ ID NO: 22573 - DNA, 500 bp, Glycine max
tctgttgtgttgattaaattcaataatggcaaagacaagccaatccatgcaacctccaacatcaacacgtcactagcaaacatgattactagcagctcatgatggctaaaccacattaccctatattacaatatacacatgtttatatcaactcatttagtggctcataacaacaccactagtcctactccatctggtggaggaagagtaaccctagaaaagtttcagggcacagtacatcattaatcttgatgatgaatcaaatataggctctgcataattgagtcataattttaattttctgccctaaaaaatctgtctcgaaaaccgcacgagtctagtcattgagaaagaactggatgagctaaatcacgagtattatatgaactggagtgaccacatttttgtccacaaatgttgaagtaaacttcagttgtgtcatgacagtcattacataatatccaaacctttctcgtacgataatcatcacgcatgacagt

SEQ ID NO: 22574 - DNA, 550 bp, Glycine max
aatctatgatacagaataattgtttcagaattataaaaatataataataggaataaacatattattatgaaactcaatcaacaacttgtttgattttatctgttggattctttattgatatatggtactgtctttttgaggtcaagttaagcagcagtacaaggcaacataacttttttacgatattcactcaaagcccacattggaaaataatttctatagagcgggtagtgtaatgcgcctgtcttcaagaataatcctgtgacttcctgttgaggccaatcaccatcttcaagctgagaattgatgagtaactttgctgcattgtgaataggagttggatctttctcagcctgcccagcatgaattagagccattagagcccaagctgtttgtacgacatttgatcgatttccttcaagaggtacgtacgtattttttgcgcctgaaagataactctctccccaaccaccatcttcagtctgtattgaaagtagaaatttcacagctttgcgaatggtaacacaatttgtataagtcttgccagctg

SEQ ID NO: 22575 - DNA, 352 bp, Glycine max
ggaccgaattgagtgaatatttattactccccgaaaaaaaaaagcctaaaattacaccaagaacgaggaccaagcagttggtgaaatcaaattaagtaatctaaatagtaatttttatgtaaaacaaaaaaaaaactcattggtattatttttcaattagttactcgtcgttaccgcttaggtgattgaccttgttaccgcgcggcgcgttgggggcatcgacgacggtggcggcggacatctccatctggcaaaccctaaccgctccgatgagcctctccggcagctcctcctcgctctgcgcctccaaaacaaaccccataacgatggtgacgctggtaacataccccag

SEQ ID NO: 22576 - DNA, 575 bp, Glycine max
ctcattggactagcactttattaaaagaaagagtacatatcattttcatttctccatcttgtgatcatcatcaatcacgaaagagtggacctgagttattcattggttgtaccatttgctgtaatgagggttggtgcaacctatccttttggacttacaatggtgcagatattgagattcaaatgctccaagcttctctaggtgatggatgcagtggaggaaccatttgaaggggtccatgcatatatgagtaatcctatgatcagaatgatggcccctgcaacaaagcctgctggaagagaagaggcaacaccgaggtatggcaatggcagcgtgaacacatagattgctattgggactgaaaatgtggaggctagacaagagacaacggccgaagagatcttgaggagatgaagcaatgagatattgaagcccatgttgacaattaataaacaacaagggcagcaggggagctccatcacatcctcttgacagagtcccaacattcagaaagcaggcagcaccgtctttaagatagtttggtagaagaccaaaggggacgccccataattttg

SEQ ID NO: 22577 - DNA, 421 bp, Glycine max
aacaaaattctccctccctgtattttgttaaaaaaaatacagggagggagaattttcctccctcgccaaaatacacataaaaggtttctcgttcttcgaacgtttttatgtatgttgccaaagggcatagagcgtttcatatataagcttacacaacggccaagagaatttcaggaacccaacaacaacacaaaagtaataataatccctcccaccccttttttctgcttctccttccttccttccttaatccttatacagtccaattgctgtaattaattcgacccaattccacggaaatataatgataaaattaaatcaaactaaattgtgcaatatcaataaaaacaaagaaagaaagaaaaatacccgaagaataaggtgttatgataaaagccaaaaaagaaaccaaaacggggtt

SEQ ID NO: 22578 - DNA, 386 bp, Glycine max
  unsure (1)..(386): unsure at all n locations
tttttttttttgagaactcctactgagtgcatgccttggatttgagtagcataatatgctatcattattttacaagcaaaactgaatggattttatgttgatccactgtcaagccttttacactgatctaatcatgcattaacacattgtaaaatgagctttgactatgataacaactacttgaaaactttatgtattaagaacatgatttaattgtacaaaaaagccatatactgacaaatgatcaaaaattgaactcaacaaaattcctggcttaaagggcatgntggtcatgattcattcatctaagcgagggccatattcccatctgatgcagcaaacccttgtccaaccccattcccacactataactggtggtggcaact

SEQ ID NO: 22579 - DNA, 490 bp, Glycine max
  unsure (1)..(490): unsure at all n locations
ttnnnnnngnttttnncattttctcctttatagtaaataatcgacaagtaagccaaggggaaggagagaggagaaaattatgaacaaaacgatttaagcaaaaaacaaaaaaaaaaaagaaaatcctacatctcaaaatgcagggttaatcttttacccaaattatcaacatgactgtagcaaaacaggaccaactgataaactaagcatatcgctgagagcaacctggagatcctttgacccatgttcacaacgtaccaagctggagatgagagggaagaaatgagacaggttcttctcaaaagaagtatctcccaaactacaaatagcctgaatagtagccacaatgagaggncgatcgtgctgccaattctctcctcttcccagtgcctaagggaattgaccaatgttgctgtctaccatgagaagattcagatttttgtccaaaacctgcaacttcaatataaaactccaaaacctcctgacaaag

SEQ ID NO: 22580 - DNA, 847 bp, Glycine max
cgaatcaaagggaacttaaatttttaatatctttcagctgagaagtaatgttcaagtcatcagcccagtcggacatgataactgtaagcatcatatacacgaggggttctataatcaataataatcagataaaatcaaactacataaacatgtatatacccttggaaaaactttttccatcaattagtatttgtgcctccaaaagctgcaccaacatactgaagtgaaaagctgcagaacatcaatgagattgactctccccgtttgatagatgataaattaccgaaagaaaatgtcaattctaagcaacagtgccaaaatattcttgcaagaactgataaagctcttttctgccaccaaagcaggatactcctcttggggaagaagagcacctggcacttccacaaacttgctaacccctttagctcccttgagagcttccatctcagccttagacctcttgggagatcctttggttgatacaaccagcacaggtgtctttccctccaaagccgcgaagagctcaaggaactcctcgcgagatgtaacaggatctaattgaccagtcaggaacgcggcaggcaagtaacgtgctccctttcttttggtcaatgcatatctgctttccacaattcctggaggcacattgtcagggttggcatatacatgggatttgtactgtgattggatagcattctcgttgctaacaagcatgttatacatcatccagccaactgcaggggcctttaatgtgcctcttagaagaccatatcttgtttccatgctagagtctcgaccaaacacgatagggagtggaccagcccaagttggtgcaacactcgagccg

SEQ ID NO: 22581 - DNA, 569 bp, Glycine max
aaatcaaaatttgaaacaccaataatcatactgttttatgtaatctaattcttatcttatacttgtattaattttaattctaagcaaatcccatttgtacccccaacaaataggcattgcattattgcttcatgaggccggcccacacaaatgatacgctcctcatcttcaagtcaatcaatgtgtactatgcattagcattgccctattcacactttatatatggtcaaaatctgaggagtttaccagcagcagttcaagcaaatatcttgcaaagttgttcagttctctaccttgcatgagtgatcttactgaaccacagaaagtcttcgaaaccgcaccagttatacgtgggaatcaatgaaatcttcaaaaaagagtgagaagggtaagagggtattatagaataatgtgatggcaccaacctagatcaagaaccatgagcatggcatttagcatgcatcatggcttgtgtttgaggcatgaatgggatcatatgattcagagaaacttggtagtataacatgagcaatgttcgctgctatttaaccgaatgagtggtgtttaag

SEQ ID NO: 22582 - DNA, 454 bp, Glycine max
ttttctcagggggaaaactgattttattggacaaaacatgcttacaaaaatatgatttagaataaaggtcaatggatcttgaaattacaaagcatctgccatcaaccagaaatcctctcctgactgtaaaatacaagtatttacatcctaataacaaaaggatagagcaattctatgatatctagcaagctataagaacaaatgcatagatgtatttacaactaagagaaaccataacttatctctatgaaggaacagaatatttttttggctgcattcatgggcacaatgtacaatagtaactgaaacttcatgttcttcacaaccttacctgtatttggtttcctcgtttcctaaccatgaaccattttaggacattgcatacctttctccatctcctttgtgcaccaccattggctgtgggacgtgccaacatgaagctatcaatagcact

SEQ ID NO: 22583 - DNA, 483 bp, Glycine max
gaaaggtcaagtagtaaacgtaatacatttttatgaaaaatcgtgtaataaatttcattggacaataattgtatgcacactcttacgacttgaacacactagcacaagatcaaatcagctgggagtaatcttctcttctaaattttgcacacctcctaagattaacaatgaaaacctcaagtaaattaatttcctcctcccaaaaaaatgcaagaggttgtttaacttaggaactaatggttgccactttaggcacatgaacaggaaactcgtgaatctcatccatccaaggatttttctcctttgctggattaatggtcctcaatgcacgccacacagcactgttgcacttgaaccctgaaccaaatgcaatctgccaagtcctgtcaccctttctgatccttcctttagcttcagtgtaggccaattcataccacaaggaactgctagaagtattgccgaacctgtttagtgtcattcttg

SEQ ID NO: 22584 - DNA, 315 bp, Glycine max
ccccccttgaacttttttgttctccgatgttttttttttttgaaaaatcgtgtaataaatgttctcattggacaataattggatgcacactcttacaacttgaacacactagcagaagatcaaatcagctgggagtaatcttcctcttctaaattttgcacaccttcctaagattaaccatgaaaacctcaattaatttaaattcctaatgcaagagggttttaacttaggaaccaatggttgccactttgggcacatgaacaggaaactcgtgaatctcatccatccaaggatttttctcctttgctggattaa

SEQ ID NO: 22585 - DNA, 532 bp, Glycine max
caaaacttgtgtttgtctctacatttttttttattttggggaaggaataaaagacaacattagtggttatttctaccaaagttctctaacggcttatgtaattttccatttggaaatggaggacaacttcatttcaagaaagctataattttatttgttgaccatcattaaaagaaaagaaaaattaaggcatactaaatttacaatttaattaaggaaaaactcaagaatgcccttccaatgaaataaagcacttggatgcctgcagggtcaattagttgttgaaatcagaagaacattctgaaagcatcaacaactttctcaggccagtcctcttgtggcatatgaccagctccttctatcaatttaagctggatttgtgctggatttcctttctgaaactgctctgccacagactggggcaagtacttgtctgataatccccaagcaagtagtattggtttatcccatctctcagttgtaaatcctgctgatatttcactgaaagtacctttgaagttagcttctcgct

SEQ ID NO: 22586 - DNA, 436 bp, Glycine max
ttcgcaatggataaaagcaccaaaatgcaattatagaagcacaaattttttagggtaatgaattacagaaaatgtcatgctgtgtattttgaccaaaaattgtgcgtgctcctacaaatcattttactatttagtcatataagggagaaagggaaacagtatgtggtggataatatcagggccatcataacctacacaactctgaacaactcttcataaatatcactgacttaaaatgcaattaggccttcgatttcttccctttggcttcattagatggttggctcttgaaaggcaggaaagtctttccacccatgaatggtctgaggacttctggtatctctaccccatcttccttctggttgttctccagtatgcaccaaatgctcctctcagtacccgttagagtagagtttaacaagtgaacatattgctt

SEQ ID NO: 22587 - DNA, 352 bp, Glycine max
  unsure (1)..(352): unsure at all n locations
cccccaaaagggaaggggggaaagggtttactaaagagcccagttaaaatttaattccctatggtaaaaaattacaaactcgggagtaaattggcccacgagacccgcaaactagcaggcaaagaagcagaaatactttgttatagaacagctctcaaaaacaacatgtgagtaaagagggcccaattgaatgcaacgtattccgtatcacaaaaacgtgtagagcctgagcctcctcctgtctgtctacgaacccagttagacaggcaatttatgatcaacgtaattatttgcgacgtctgttggttactaaatctggtttgcctttcctcatcatggctacanactcatc

SEQ ID NO: 22588 - DNA, 434 bp, Glycine max
tttgatgctaactagctaagcaatataagattaagattagtccataaaaaaggagaacaataatcaaggacaatcctgtttagcacaagcactcaataaaatctaaaacaatactaatctagagaatttcaacgaaggtttatctaacagtcacctgggtggctctgttcctaatttctaagaccttcttgtgagagtttgagtgcagtgatgctacaaaagtggggctagatgcaggccggtattcagcaaagagccggccagaccggtatcgaaccccacaggcattgcatagggtcttaggacccattggtccttctctccattgcggcgtctttgtcacctcacaatgcaagcattttctgggtgcaactgactcctgtgatgaggatctcttcatctcaattttgttagtcggcaggggaatatccgct

SEQ ID NO: 22589 - DNA, 815 bp, Glycine max
  unsure (1)..(815): unsure at all n locations
attggttacagtcatgtggttatgggcactaggtttcaagggagactgaggacctattaaattatgaattttgttaaataaccgtgcgcgaaaggatgctgacactacgccacggctgtttcttgaactgttactgggactatgcctacgtgaatcatctcctggtccagcgtctcctctgggacagctttgcccttgtgaatgaacttgaacatcttgctcatgcaaattttgtacaaaggcgtgtgtaagaagcactgctgctgatggtcgttctgctggattccttctgaaacactgctgaaggaaatcctgtccctctgaagacaaactttcaggtagatccggggatttgtgcagtaccttgaacatggcttgaggcccttcaaattcgctccaaggaggttttcctgtcagcatttcgatgatagtgcaccctaagctccatatatcaatggccatggcaatgtcaggactggattctttctttatggcagccttcatgagctcaggagccatccagtagggacttcccttcaatgaaagttcatatgatttctctgtcagaatttttgacaccccaaaatctgcaagcttaacactgcctgatgcatcgaccaacaagtttgcacctttgatatccctgtgaatagtcttggtaccatgtaagtatgccaatccagagagaatatgtcgtgtgaaattgcgaaccacggactctgtcatagctccacaatgttcatgcataaacttatgaagtgatccaggatgaacatactccatatatatgtacaatcgatcacaaacctaaaacn

SEQ ID NO: 22590 - DNA, 570 bp, Glycine max
gaaatacttgctgaaattagagatgcggttttttcatttattcgtaaaatggaacctaggcgattaatggataccatgcttgtttcccgtgttagaatcttgcatataagatctttgcttgctagatccccagagttgcaatccattaaggtattgccagttgagtgctttcttgaaaaggccaacactggacccagtagaagttccagccgagcaagcagtcctggaagatcttccatgcaatatgttgatgagcagatccagggatttaaagtgagtctaaagccagaaaagacatccaaatttgcatctgttgtgttgaagatacgtgggattgatgaggaaacctggagacagcatgtaactgggggaaagcttagggacattagtgaggaagcataagattttgcaattggaaacaaggctcttgcggcactatttgtacatactccagcaggagagctgcagcgccaaattagattctggcttgcagagaagtttgattttctatctgttatgggaaatgatgcaccaggggggacaactggtcagttggaacttagttcaact

SEQ ID NO: 22591 - DNA, 310 bp, Glycine max
cagcttgtacatggaaattgataggatgaaagaagatattcgagcagctagggagaagaatggtgtctatatttctcatgaaagatttgccaaggaagaagctgaaaagaaggcaaggaatgagaagatagagcaattagagaatgacctcagtcttagtgagaagcaagtggccagcttccgtgaactctatttaacagagcaagaacagaaactggaattagaaagtgagcttaaggattgcaaggtgaatttggaaaaaaccagcaacaccttgcatggcctccaagagaattacaagctattagtt

SEQ ID NO: 22592 - DNA, 542 bp, Glycine max
ctcttctagtgtttctgaaagcgcatcaatgaagatgaaggttctatgcagctttggcggtaaaatattgccacggcctagtgatggaaagcttagatatgttgggggtgaaacgcgtattattagtttaagacgggacatacgttttcatgagcttatgcttaaaacatcatccatctataatgaaactcatgtgataaagtatcagctccctggagaagatcttgatgcattggtttcagtatcttctgatgaggatctgcggaatatgatggaggaatgtcatgatctacaaggcggccgagaatcaaataagcttaggatttttctgttatctatgaatgatttggatgatactcagttcggtataggtagcatggatggtgattctgaaatccagtatgtcgttgctgctaatggtatgggcatgggttcaagaaacaactcaatccttcgtggtgaaagtggctctactaataacttacatgaattgaatggacacaataatgagagggagaccaacagagttctcatggacacat

SEQ ID NO: 22593 - DNA, 441 bp, Glycine max
aatctttagcaactctcttctctgtttttgctactccattctgaaactttctgataccgacacaccgcaggaccatgatgcggtttgtgatgtcttcaagctccaaacgtgtgtctaagtgcttcatttttgtgttcctggcttccctacactttggatccaacgctcaactcttaccacaagatgaaggtacttaattattttccattttatttttatcttatgggtttttatgtgttaattatgtgcgtgttggaaatttcacttttgtaacttccaaaactataaactgaaactgtctttttggttttaacaccaacttcacaaagtttcaactttatccgttttagtgcaaacccatcttccagaatttagttcttcaacttgcattgctgcttctgtcacaagatccataaggaaatcgccaatgtcgtttttttt

SEQ ID NO: 22594 - DNA, 459 bp, Glycine max
cctcttttaaattctacaaaaataatctttagcaactctcttctctgtttttgctactccattctgaaactttctgataccgacacaccgcaggaccatgatgcggtttgtgatgtcttcaagctccaaacgtgtgtctaagtgcttcatttttgtgttcctggcttccctacactttggatccaacgctcaactcttaccacaagatgaagtgaaattgctacaagcaatatcagacaaggtagagaacctgaattggaaagttacacaacgttcttgcaacggggatagaggatttgataacaggaacatttcaagggataataagtctcaaatcataaggaatgtcacgtgtgattgctctttcaacaataacactacttgccatgtgacatcaattgcgctcaagggtctcaatatatctggacctatacccgatgaatttggaaatttaactcg

SEQ ID NO: 22595 - DNA, 335 bp, Glycine max
ctcgagccgttcggtaactgcagagagaaagaaagaacaaacgaagaaaagggaagaaggagaagaagcggtgaagcgtagaacgaagaaacacgcggaaggaggaatcggcggtgctccaccggcgatcgctcatcgtcgccggcgaacttcagatcgctgctcttgcttctccgaagtttgtgccttgcggtttttttcagaggcatttgttgttggaatcttgtagtacgggtttttttggctcactggtggaaaattgttatagatgggctgaagtgtgcttttcatgggaggtgtggaggatgaagcaccagctctgaaacgcatgaaat

SEQ ID NO: 22596 - DNA, 840 bp, Glycine max
caagtctgtatgcgatagtaatacaggatctgtcaccatcctcacctaatttcaggggcgttaaagttgtcacttcatctattcccattaaacaccccaagtttgctatcactaagagtgtgaactatcttccaaatgtgctctcaaaggtggaagctgaagaagctggtgcttttgtaggcatttggcttgatggtgaaggttttgttgctgaagggcctaatatgaatgtggcctttgtcactaaagataaggaacttataatgccacactttgacaaaattctaagtggctgcacagctaagagagttttaacccttgctgagagcttgttaagggagggtaagcttaaagggataagggtgaaaactgtgactgtcgaggaaggtaagcaagcagatgaaatgatgcttcttggcagcggagttcttgtttgccctgtagtgcaatgggatgagcaggttattggtgatggcaaagaaggccctataacgcaggctctcttaaatctaattgttgaggacatgaaatcaggtccctccactgttcgtatacctgttccttattgacacaactttatttccttctcttcattttgtaatgaagattaatcagtagttgtgatgcccctacttctacagggaggaatgactattaataacttcattgtctaatggtttttagagcttgtagtgttataagaaactctattccatggagcttagttttcaaatgtttttgtggtctcatgaactttttttttgagacttgctagttgttagtgaaaaatttgactcattcttctttccgtatcttatgaagggacaacttgctgctgct

SEQ ID NO: 22597 - DNA, 451 bp, Glycine max
gcgagagtcgcgacaaaagttacaatagactcggttgcagttcttcctaaggtgcacccagctgcacacgatcctccctccttcgctctctacttcgttcgtccttctccaccctctcctcttctctgtttctgctctgttccactcgcgactcagagatcaaccacagctcgcttaaccgactatccgaactcttcgttgtaaccgaaatccggtgcaccgagagagatccgaatgagggatccgaatctggagttgcaggaatcgggttgggaggagctgcgcaaggaagcgcgcaagatcgagggcgatctcgacgtcaagctctcctcctacgccaaactcggcgctcgcttcacccaaggaggttcacgttatgtggacagtggttcaccacctattgggtccagtaggtgttggaagtccatggaaatggaaatccagtctttac

SEQ ID NO: 22598 - DNA, 699 bp, Glycine max
taaagagcccatgtctctgtaatcgaatcagggaatagtttcgtttcagaagagtgacaaccctttttgctccacaacaaggttttctccaggggcaagaggctggtttggtgtttctttcatttcactttatatgaatacatagaatagaagtttgaagggttttagggatttgcatcatgttaggttcattacctatattgccactccctgctcctccctctgatggaaatctaggtcctctccctgagtctcaagtgattgataatgaggaggagcagaacaaatcaaattctgtttctgttccagcgccggcaacagttgccacccacaccagaacgattggaattatacatccgcctccggacattaggaccattgttgataaaacctcccagttcgtcgccaagaatggtccagaatttgaaaagaggatcattgcaaataacacaggaaatgtcaagttcaatttcttgaactcatcagatccctatcacgcttattatcaacaccggttgtccgaatttcgcgctcagaatcagtcttcagggctgcaacctccttcccagcctgcagactcggctgtccctgaatcagccccgtctgatagcaacggcgtagcagcagcagcagaaaagatcgacgtttctgcccagtttaaagctgtaagtcaagtgcttgaaccccctgaagctgaac

SEQ ID NO: 22599 - DNA, 502 bp, Glycine max
attctttctctgaaaaccaaaacaagaggaattaaagttcattcatttaaaaaagaaagtaaagataaaaataacatgcacaacaacatgagcactctctctttcttcatccttctttcaacactactaactgttggttacggtggtcgcgacttaggagataaaaacccgttcaccccgaaggcttacgtggcacgttactgggaccaacacgtccgcaacaacttgccaaagccatcgtttcttctctcaaaagcatccccaatgagcgcttccgacacggcgtcgttcgccaagctcgccgccgccaactccctctccacgcggctgccggagttctgctccgcggcgcacctcctctgcttcccggaggtccggcccagcctcgagaaacacaccggagactccgatttccagacctacaacgacgaccagaacttcaccaactacggcaccgacttcgccggcggcctcgacaccttcaagaactactccaacgacc

SEQ ID NO: 22600 - DNA, 382 bp, Glycine max
  unsure (1)..(382): unsure at all n locations
gctggctcttcttatggaaacgaagagtttgtgagcatggcagaaatcatggaggcagaagatcatgaccgggacagagttcatatagtgtttggtttgtcgaatgagctctctgttccaggtttagaaggtgggtgttatctactcttataatgacaatgtcgtggctgcttctagcaaattggcaaggttctccactgtttctgccccaacccaaagattgctcatctccatgctctcagatacaagttttgtgcaaaattttattgaggttaacagattgaggctgcggaaaatgtataatacatttgttgcagggctgaagcagttggggattgagtgcactangagcagtggtggtttttgctgctgggctgacatg

SEQ ID NO: 22601 - DNA, 658 bp, Glycine max
agctcagataaaggaagaagattgtattaagtttgtcagcagtcaacataaaatttgtagatacaacactcacctagtgggataaggcttttgttgttgtattaaattatagggtacatcaaacagtgaaaactagtatataagagaatttaaatataatgatgaatttgacaacatagcaataccaacacaatcattaacaccaaacatggtcttaagatatggctaaggctatttgatacctagctaatccaataccaaacatgggatataggcgctccggcctcatagccgtgcaacttgatcacatgccgaacacgtgcaacctgattttcgactacaccccgagggaggccgtcacctccagatataaagaattcctttaaacctccagatcttcctctaataattttgcatcaccggggaagaaaactctcgatggacccccatctaagataacacggagtaagccatccaatgatgcctgaagaagacttgtcactatgcgatccctgagaggctccacaacaatatcacaaagttggctaagttccatatcaagtggttctataagtgcatccaacctacatccagagacactgagtttatataagttgtcggctcgagcggctcgagactagttctagatcgcgagcgg

SEQ ID NO: 22602 - DNA, 687 bp, Glycine max
agccatccaatgatgcctgaagaagacttgtcactatgcgatccctgagaggctccacaacaatatcacaaagttggctaagttccatatcaagtggttctataagtgcatccaacctacagccactgacactgggtttatataagttgtccataaatggaactctcagatcacagaagacaattttagttcctgtgtactcacaaatgcggtccatggcagcatttatgacttttctacttccctcaaaggtatccttttgggaaaaacttttggacttgtcatcaaaggatttctttatgagtttttcttgggaccttttacttgtccatcgctcccagatgttgtcttccaatttattcagatgactaattgcatagtataatgtatttaattgaacacaaaggcagattgaagccacaggtctgctccttttctttggcttcaatttgtaaaggtttgattttgaagaggaagcatacagtggtattatagtggagatctgggacttgttttgcctcttatgccctatgaggactttcttcaccgcagaatcgtgtaaagaagcacaccatagtgctttgaatccacagtcctggctccaagttgaaagagggaagcttcccagattgtcatcacagtcctcttctgcatcaatagaatccctaatcaaggtcccacagtcat

SEQ ID NO: 22603 - DNA, 564 bp, Glycine max
cggcgaaaggtcgtttctctctcttactctctctctttctctgcgtgtgttcgtgcgtggagtgccgtgtgtgtagccgcgttctctattgccggcgttctcgtcggaatttcctttattgatttttccgatcaccggattcgatccaatccctaatccctaattctgcgattccatcaattgaaattgaatagccattgaatcgtttcgtttcggaggtggcggatatggacgattacgcgagcagcgacgaggattaccattacgactccgatcaggaggactccgtcgaggcctacgaaaacgacgagaattacgccttgctctcttccaagggcaccactactaaggtgattacaaaggaatcactgctagctgcacagaaggaggatttgcgcagagtgatggacatgctatcggtgagagagcaacatgctcggacgctgcttatttttcatcgttgggatgtggagaatctgttggaagtgttagtagacaaggggaaatcatttttctttgctgaagctggtgttagtgtggatgaacatcgcaactctgactcac

SEQ ID NO: 22604 - DNA, 559 bp, Glycine max
ggttcagtccactgaggatccttctgaggttttcaagcgcaacgctattaacaagcttgtggagatggttcatggcgacgttgccgctttgaggaagaccagagaagatgaaatggaggggctgtttagtttgcagggcgtgctgaaacagcgcgaggagagtctcaataggggtgtgaaggagatgcagcaggagatggaggctttggagcagcagttacagatggtgttgatgaatactgatgttttggacgggtggttgagggataatcaggggaagaagatggccggtttggagaatcccgaggatgcttttgagtgtgcggatgtgctctccaagcagatgcttgactgtactgctgctgatttggcgattgaggacacgctttacgcgttggataaggcacttcaggttggaggtgtgccatttgatcagtacttgaggagcgtgagggccctgtccagggagcagttctttcaccgcgccactgccgccaaagttagggctgctcagctgcaggctcaggttgccaatatggctgctcggagtcagcattat

SEQ ID NO: 22605 - DNA, 540 bp, Glycine max
  unsure (1)..(540): unsure at all n locations
caaaacatgaaaaagttgtaagtcacaaacaacgaaaggtcacgttcaatcttcgttttgctgctgaggcaaactacgtaaaagagctttcataagcaaagacaacccaagaagggtatctgatctgatacaacacttagtgccaaaaatccaccttcacccacaaaacaaaacacaaatctaaagcttcaaactttggcaccaatccagcgacccagttgccggaagtcccattttccggcgaagaatggcggtggagagtgacaaagtgggttctgatgggaaagtttggagcttttgcagcatgccattttggcaaacaactcatgcttcttcatcttcttcttcaacaacaacaacaataccaacaacttcttctatgcatcatagtgttcaccatcagagccagattcttcagtctcttgatagatccactcatcaaccttccaccactgtctcttctgtggctaaatctcttctccccacaaggagaaggctccgtcttgatcctcccaacaagctctactttncttatgaacc

SEQ ID NO: 22606 - DNA, 573 bp, Glycine max
cagcaatagctattgacaggatgatgggttatcggcttgtttcaaatctggctattgtgagatgggtcttctcagcagagaatattgagcaatttcatatgtcagatcgtccttgggagattcttagaaatgcagtaagcaagacacacaatcgtatttctgatctaaggaaagaaatattatctcttaaaaagaatatttcatcatctgaagaagctgccaaggaagcaaaagcagagttagatgctgcagagtcaaaacttacactagtggatggtgaaccagttattggcgacaatcctgctaggttgaatagattgaaatcacatgctgaaaagacaaaggaggaggtggtgtctcttcaagaatctttagaagccaaggaagctcttctttcccgagcaattgaggaaaatgaggcattgtttctcttgttgtacaaaagcttctcaaacgtgttgacagagcgccttcctgaaggatctagaacactgcatgagttgaagtctgcacaagttgatgtggtgatggcagtggaccctgaatagccattgtcaatggaattagacaacc

SEQ ID NO: 22607 - DNA, 347 bp, Glycine max
tgcagaatgcatatggctaattcctgagatggtaacagttgattttcgtttaattggggcttgtgtatattttgcactgttgcggaacatgaacgaaaagaagaatactgcctctactctcaagcgcattttagtgaattgttcatctcaggcaaaagcatacgggagctgtgttgcagcgaaggttccagacattgagcgtgatatgtgtgtgaaggaatttgaggcactaaaaagttgtatgcagaatatgctaaaaaagaaggtttaagtgaactcgctcttgtgttcttgttctgggagctgctgataaagcaaactagaacgcttgacggttatgaataata

SEQ ID NO: 22608 - DNA, 378 bp, Glycine max
  unsure (1)..(378): unsure at all n locations
aggctcccgcaaggaagaaaccttctaagccaagcaaatctcctaagaaccctaagaagatccaacccaagcacgattccagctccgaatccgaagaagacacgccgccgcagcaactgcaaccggagcaactcgaactaggcgacaactccgattccgcgtcggagctctcttctgtcggtgacgatcctttagccgacgatttcctccaaggaagcgatgacgacgaagagaaagcctcaggttcggagtcaggtttggagtcaggttcggattccgattcggatgacgatgacattgaaaagaagtcgagagctattgatgaagagaaggcgagagaggaaaagatgcngatgccgaatgcagctcaacatcaac

SEQ ID NO: 22609 - DNA, 641 bp, Glycine max
cacacaacaaattctactttttttgacaaagcttctctccaaaaactcaagtggtgattccatttccaccatgtccaattctgaacacaacatcatcactggacatgctggctatgtccttgaagatgtccctcatctatctgactacatccctcacctcactacatatcctaatccgttgcaagataatccttcgtattcagttgttaaggagcattctgttgatgtggatgatactattgctcaaaaggcaagttgttgttgttgttgttctctctttcattacagtgttcctgaattgttgattcaattttctgtttctctgtctaggtagttgtacataagaatagcccaagagagactcattttcgccgtgctgggccgcgtcagaaggtatattttgagtccgaggatgtgtatgcttgtattgtcacatgtggaggtctttgtcctggtgtcaatacagtgatcacggaaatagtttgtgggttataccatatgtatggggtgcacaaagtactgggaatagagggagggtatagaggtttttattcttgcaatactattccattgacgccaaaggttgtgaatgacatccacaaacgtggtggaaccatccttggtcactctcaaggagagga

SEQ ID NO: 22610 - DNA, 452 bp, Glycine max
  unsure (1)..(452): unsure at all n locations
cttccatttcatcttctgtttcaaccagattcgtttgctctgagttctctccaacacacaacaaattctactttctctgattccatttccaccatcatcaccatgtccaattctgaacacaacatcatcactggaaatgctggctatgtccttgaagatgtccctcatctatcgaactacatccctcacctcactacatatcgtaatccattgcaagacaatccttcctattcagttgttgaggagcattctgttgatgtggatgatactattgcgcaaaaggcaagttgttgttgttgttgttctctctttcattacagtgttcctgaattgttaattcagtgtccaagtagttgtacataagaatagcccaagagagactcattttcgccgtgctgggccgcgtcagaaggtatatttcgagtccgaggatgtgtatgcttgtantgtca

SEQ ID NO: 22611 - DNA, 528 bp, Glycine max
cttgacgcgtgggcggacgcgtgggctcagatggctaaagcgcctgttcagaagtttgctgatcgcatttccaaatactttgtgcctctggtgattatcatctcgttcactacttggctagcctggtttttggctggaaaatatcatgcttaccccaagtcttggataccgtcttctatggacagttttgagcttgctctgcagtttggaatatcggtcatggtcatagcctgcccttgtgctttgggtttagcgactccaactgctgttatggttgggaccggagttggtgcatctcagggtgtgctcatcaaaggaggccaagcattagagagtgcacataaggtggactgcattgtttttgataagacgggtactctcactgttgggaaacctgtgatagtgagaacagaactattgacaaaaatggtgctccaggagttctatgaacttgtggctgcagctgaggtgaatagtgagcatccactggccaaggccgttgttgagtatgctaaaagatttagagat

SEQ ID NO: 22612 - DNA, 612 bp, Glycine max
gtcttgtagcgtgggacaccggtggttccatcccccaccaccgtttatcaacaatgccttcctcactctccctctcactcacacccctctctgtgttccctccccgcagagtccccactccttctccaaaaccctatcgcctctccgtcaaatcctccatcaacaaaccccctgacgccggcaccaccaagcccagctcctggctcagccccgactggctcacttccctctcccgctccctcaccgccggcaacgacgtctccggcatccccgtcgcctccgccaagctcgacgacgtctccgatctcctcggcggcgccctcttcctcccgctcttcaagtggatgcaggactacggccccatctaccgcctggccgccggcccccgaaacttcgttgtggttagcgaccctgccattgccaagcacgtgctcaggaactacggtaaatatgccaagggtctcgttgccgaggtctccgagttcctgttcgggtccggtttcgccatcgccgaaggtcctctctggacggcaaggcgcaaggctgtggttccatctcttcataaacggtacttgtctgttatagtggatagggtgttctgtagatgtgctg

SEQ ID NO: 22613 - DNA, 562 bp, Glycine max
agtttatctgagcaatcttaaggaacaaaactcatggacacttctcttggtgtctacatcaagaaagagacggaaataaaggagatataagtgagtgatatgatcggtgatgtgatttatataattggtgatgaatatgatagaagaaagagagagaaaaattgagagtgtcaattagctgttttgactgtttaagtgttcataaatcagcatcccaagaaaaaagatctttggacacctctactggagtcgtacaccaagaaagagatgagagatatgattggtaatgtgatgtaattgaagagagatagagggaaattaggagtatcaatcaggttttagactgtttaggtgtttataaattaacactccttaaggaaaaaaaaagcatggacaccaagagagaaataggaagagaggagatacaatgatttatgatgtaatgtgatagaagagagacatggagagaaattgaaattgggagtgtcaattaggcatttggattgtttaggtgttcataaatcagcactccaatcttgtatggtctgtacatttactaatt

SEQ ID NO: 22614 - DNA, 551 bp, Glycine max
cacacacctccatttccccaactcgctccgagttgactcactcctttccctttcgagatcaaccgccaccgctacgcctccgcgctccgccgccactgcaacccccgcctcccttctccgtcaatgcaaaattcggcgtcgattctcgccggaaccttctcccgctcttccttcccctccgggctttgacttttgctttcttgcgattgcgatgagtccctttcgccctttgttgctcttcgccgccgtattcttcctcctccgccccctcgccgccaccgacggcgacgccgatccgctttacataggttgtgtggagcagtgtaagaaaactggatgtgtaggggatagatgctttcaacattgtaaattttcatcagatggaaaaccaattgatggtccatggtatatgcatgaacccctctatctgaggtggaaacaatgggactgttgcactgactgtagatattactgtatgctatctagagaggaagaaagaacaaaacttggtgacaagcctgtcaagtatcatggaaaatggccattccatc

SEQ ID NO: 22615 - DNA, 294 bp, Glycine max
tgtccaatggattgccatcataatccaatgatgtagaatcgaaataacagaagacttcaataaatggatagcacctttttgtacaaatgaattattctaatagtctcacaacaaagttgggtatttagcatctagaaaatctcttagagtccgagctgctttatgaccacccattaattccgctagcttctctacaggacgaagtgcaagttctgccaagctcttacacccaacccatccattatggccctgtagtttgagtctgtaacacctggacatcgtcttagaaactcc

SEQ ID NO: 22616 - DNA, 783 bp, Glycine max
  unsure (1)..(783): unsure at all n locations
ccagtctgatgtaaagcggccgaggagcgggtaacactcaataagggggatgggccggcccccttcagttttttttttttttnttttttttcaanaaccatgttccccacaaaatccagaaatcatcacgnatctatcattcataaagatcatatgctcatgataggcaagattacacaccttctngaatgaacgcaagcaatatgtcatctctttctaccaccacgctctcttaaggtgagggtaagtgtttcacctccaccaacattgtaatgggcaagtgacatattatccttgagaaagccaggctttccactcaatttctgcttattagcagggagctggatctccccagcaattttttccttcagactaccaacagtttcagacaaagattgcactgtaatttccagaacttgtcccttaagatttccttcatcaacattaggaacagatacacaaatgcaaacaggcccaggatgttgagccagaaattgatcttcagggatcagagcagaatcatcaagtttctgcctctttggttctggttcttctgggagtggaggaggagcctcctctggtggcggtggcggtggcaatccttgaggcaaaggtggtggatgcatcataggcataactgatggtggaacagaaagaggaacataaggtcgcggaactggaacaggagtgaactgagatcccggtggtgggggtatgggaattccttggttattcataggaattgatggatgcattgggggtggttggccagctataattgac

SEQ ID NO: 22617 - DNA, 510 bp, Glycine max
ccagaattaacatcagccttcatgacagcagtaaatacctcaaaatgtctcagtacaataaatctaatgtattcaacataaaattccggatataacgtcatgtagtctatcaataccataagaatccatatgcctcataataaggcaaagattacaacaaccttcttgaacggaaacgcaagcaatatgctcatctctttctaccaccacgctctcttaacgtgagggtaagtgtttcacctccaccaacattgtaatgggcaagtgacatattatccttgagaaagccaggctttccactcaatttctgcttattagcagggagctggatctccccagcaattttttccttcagactaccaacagtttcagacaaagatagcactgtaatttccagaacttgtcccttgagatttccttcatcaacattaggaacagatacactaatgcgaacaggtccaggatgttgagccagaaattgatcttcggggatcagagcggacgcgtggg

SEQ ID NO: 22618 - DNA, 446 bp, Glycine max
ggttgtatattcgtttccctattttaatttattaattatataagaggcctaattttagaaaacacattaataaaattaaggtatacacaccaaattaagctaaatgagaaattaccatgttatattacataaattaaagaaacagatcaagaataaagtaactaagcttctagcttatacgggcagacatcttattaactaataaagttttgatgtaatccttcattaaccctcctgcatttgtataattatcttcatctttgtgaagcacgtcaatcatgcgcacaaggttgacaacacgcaaaagaaaattcattggcacttcagtaggattaaggcatgcctcattgatgtccttccaagcactcttaaccatctcaagtagtttattaatggcatcttgccttgaggtgttatgttgcttcatatagctttcaatgcttgat

SEQ ID NO: 22619 - DNA, 243 bp, Glycine max
ttttctttgtgtttctaaaaaaaatatatatccatggtaatatccattgttttaaaatacagggtggaacaatctatgatccataagcatgtatactcctaaacaatggatttttcaaaagaaaaaagaagctggagctaacaaaccctcaaaccaaaattttcaagaaaatgatattattaagtttgtataagaacaatggtacagcccctgattaacaatttcaaaagctgttgaaggctg

SEQ ID NO: 22620 - DNA, 306 bp, Glycine max
ttgcatgaaagtaaaacatcaactatccacagatcaattacatttgtagatgtctatctaaaaattatagagctgatgcaaaagtataatttaagtaccaccaatcattgactcaatcgcatctaaacaccacacacatgctacctaaatagaacaaagaaatgctttcacaacatctaatttaaagcacttttactaagtcactaaaccaaattttgataaatcagtggccaaagaattcaatttctggacatacaaattggggaatatttaaggcccaacccaaaaaattaaaaggaatatttt

SEQ ID NO: 22621 - DNA, 1057 bp, Glycine max
gcagaagagaggaagtataaatttttaaaggaaagaaaagaacccttttcagttttcacacctttgtacactaaactaaaatcatcacaagacgacacttataaacatgattacatacaaaattggcttaaagcaaaaccatcaatcgtgatgcgtcatatatcactggatgactcaacccttatgccacgtatctcaaggttgtctagcttcctgggtctcctgtaatatttcaacaacagagaacagcaaacaacgctgacagaggaggcagccatagcagccccagcaatccagggtggcaatctgaaccttgtagaagggaaaagagctccagcagcaattgggatgccaagcaagttataacccaaagcccaaaagtaattcaggcgtatacgggaaaatgttcttctggaaaggtcaatggcagttatgacatcctccaagttgctcttcatgaggacaatatcagcagcctcaatagcaatgtctgtaccagctcctattgccattcccacatccgctgccacaagtgcaggtgaatcattgatgccatcccccaccatagccacagtgtacccagaagcctgcaagtctttcactttctctgctttttgatccggtttggcctcagcaataacattttcaattcctacttccctggcaatagaactagcagttccgaagttgtccccagtcaccatgatgctcttgattttcattgacttcagaatggaaatgacttcttgagcacctggtttcaatggatcggatactgctaaaaccccagctactttcccatttatagatactacaattcctgtttgagccatcttttcggcttcagcaagtatatattcagcatcatcaggaattgcaatgttatggtcagcaaacaagctcttattacccacaattatttccttattatgaacagaggcctttactccatgtcctgtgatggaaacaaaatctcgtgcttctggccaagaagggttctcttcatctctaaatcttttagcatactcaacaacggccttggccagtgaatgctaac

SEQ ID NO: 22622 - DNA, 594 bp, Glycine max
ttttatcattgaattgctgcatgcatatagatttgtacaatgaatgaaggataggaagttaatacacaagtcaagaacgcaagtaatcgaattattactacaccacactagatacagatagatagatattgatatataatagatagggaaattgtgcaggtccaacttaaaaacctcaacgacctagcaactctcacgaaaatgacataatgcacccaaacaatatactgagagctgcatttgccattagagatgcttcaatcccatctagcatcaaaatcagaaaatatagtctggaagctggagcgggaaacgagccactgtagctagaaaaggatctccttttgggtctgccaatctgccgggtataaatgtaaaagaaccttcaatggaacctgatggtgttggtagatgcatgcgactctgatagacaaattcttgagcacctggacgcaaaagtggatactgtcctataacagcttctccattgacatcagatataacaatatcattagctcggatgatccagtgcctccaatggagctggcaggagctgaaggacattccattaatagtgcacccttgaggttcaag

SEQ ID NO: 22623 - DNA, 373 bp, Glycine max
tttttatgttaatgttaccatgctaactaattttcataacaagcataaactatcacaggtctagacctgtcatacacaaaagatgatacaaatattttccatctcaaatatatgttcttactataaatcattatactgagaaacattgcaacctacgggaggatgtggatagagacggagtgactcaataatgcagcgtgtcaagaacttaagatttttaatatcctcataggtaggtccccttccctggtaaactctgtccacctcctcctgtgcctttgccaatgaggaagaatccttgcctagaagataaagtgtccaggtcagcactgaaccggtggtctcaagaccaacaactaataatgacaaaaga

SEQ ID NO: 22624 - DNA, 370 bp, Glycine max
tcgaactctcaagatagcaaaatactttttactttcgttacttttaaaggaattagaagagttgtgttataaacacacataacatgatagtattgcttagaaatgcatcatagttcatcatggattctttgttctaaaggagcctctgcattattaggaacacgattgcctctgacttgatgaagattcacgtcatctgcaacagcttggggccttagctctgcctgtcccaccataccagcttttatggcctcagtaacctttctttgcaacgtaagtagtccaattcgcttggaaacaacataaaaaacagcaagggagaacaacaaaaaaccaaccccgattatttacctgtctatgacatcttgac

SEQ ID NO: 22625 - DNA, 1342 bp, Glycine max
cataccaacttgctaactttcttcattttctctttaattgtgtttcacaaaatgcaaaatgcaaaatcaaaatacatcacctaactagatcgattggcaactaaatgaaatatttgctcttgtccaaactgtcccaaatagcaacaaaaactaaaaaaaaaaaaatcaatgatctaagagctttattactggactttgaaatttgatgcttttattgctttgtatgattttcgtgtgtgcctggtacctgtcttccaccagagaagtaaccatgctgctgatgagaaaagaaactgcatgccaagaagaaaccacaaaatagcatgcataatagctaacatcttaggccgatcagaagtgcaacaaaatgcgagggttaatggtctacgtctgtcccaaggtcaccccatcgcacgttgtgtctggctgcaagatagtgagcaccaacaggacccctactaccataaggatagtactctggaattatcttcttctcttcaagctccttcagtacaggtgtaaagagtgaccaagcagcatccagttcatcactacgaatgaagagtcttctttctccttcaatggcatccagaagtagcctctcatatgcatctggaatctcctttgaatatcttgctgcgtagtgaagattcagattactgcggtccaacttcattcccagacccggaactttgttgtttatcttcagatatatagcctcgtcaggctgaactcttataacaagttcatttgtagcccgatcaagatcagtaccaaaattccgattgtacagattacctggtacatgcctgaactgtacccgtatctcagctcttttgttgtgtaatgctttcccagccttcatcaggaaaggtaccccatcccatcttgcattatctatgaagagggcagctgcagcaaatgttggagttaagctgccgcttggtacagttttatcatcaacgtatgctggatatgtaactcctcctctagtgtggctcttatactgacctataaccacatcctcaagtcgtaggggtctcatcgaacgaagaaccttgacctgacatccatcaggtaattgaaattctggtaaaaaaaaaaaacatgactatttagaacagttgagttcaaggtatataatcatgtgagaccttttcatttctaatatcctctgcatccaaactaacaggggtttccatcgcaaagagtgctagtatttgaagtaaatgattctgcataatgtctcttatgataccataatggtcaaagtacccgccacgtccttcagtgccaaaatcttctgagaatatcaactgtccatgtcttatatactgcctgg

SEQ ID NO: 22626 - DNA, 519 bp, Glycine max
cacaaaatgcaatgagtacataaattcaaaatcaaaatacattacctaactagattgactgccaactaaatgaaatatttgctcctgtccaaactgtcccaaatcccacatcccaagtagcaacaaaaactcaaaaaaatatcaatgatgtaagagctttattactctactttgaaacttgatgctttaattgctttacatgattttcatgtgtgcctggtagtcttccaccagagaagtaaccatctgctgataatatgatgagaaaagaaactgcaagccaagaagaaaccacaaaatagcatgcatcatagctaacatcagtgaggattattggtctacgtctgtcccaaggtcaccccaccgcacattgtgtctggctgcaagatagtgagcaccaacaggacccctactaccataaggatagtactctggaattatcttcttctcttcaagctccttcagtacaggtgtaaagagtgaccaagcagcatccagttcatcgctacgtataaagag

SEQ ID NO: 22627 - DNA, 293 bp, Glycine max
atcagaaaagtaccccatcccatcttgcattatctatgaagagggcagcttactgacctataaccacatcctcaagtcgcaggggtctcatcgaacgaagaaccttgaccttttcatttctaatatcctcggcatccaaactaacaggggtttccatcgcaaagagtgctagtatttgaagtaaatgattctgcataatgtctcttatgataccataatggtcaaagtacccgccacgcccttcagtgccaaaatcttctgagaatatcaactgtacatttcttatatattac

SEQ ID NO: 22628 - DNA, 467 bp, Glycine max
aaaatgatcaagcattttcatttccgagttcttaaaagagcagtgttctaatgttggacatcaacataatatctaaaaataaagcgaggttttacaaaaattttacagtttgcaatcataatcataatcatcatcaaaatacaaggcgaaacatgacagcagcagcaagccaacatcaccaatggctaccagaataaactgcaccaaggcaaaagcaatagctaacagaatacagctgataggcaacaactatgaagctgctctaccagtagtttgcgtcccacatattatgcagccaaataatctgctttttcgggtgaaattgcatttcaagcaacggtgccatctagcagcatcaaagaaatgtgtctgctctgctaacaaacttacggaatatttccccaatctttactttgacagccatgtggaaaatatcagcaaaggaagcattaaaagcagtccatagc

SEQ ID NO: 22629 - DNA, 530 bp, Glycine max
cgaaagtaaagttcttcatcgtgatttaatataaaaaatataaagtaagtaaaaactctaattaatcataaccatcaaaggctataacaaagcatgcatgctgcacctttcactaaagtgttcagtatttgtacacatcggtggacactagacaagaaaacgaatggtcattagagagtggaatctttgaggcttttctccttattgcaacccttgtgtaacttgtttcatggaacaacttttttccataatatatttctatctataccttcgctggtgttctttatataaaggggactatgcgggaaacttaaaagataagaataagatcgattgattacaaaaaggacatatgagactaagagtagcaaaagagctaccgaaagacaagtaatttaccagagaaaaagcaaaggcaaaagttcaatcccagtactgtgcacatattatattctttatttaccacctttgtgcttttcgcagaccttggacaagaaggaaaggaaaacgatgatcagagcaacccccgc

SEQ ID NO: 22630 - DNA, 751 bp, Glycine max
ttgttccataccaatttacctttgcatgcactgaaatcggatatacagctagccaaaatctgattcagccacattccaaatatctaatcaacaaagaatcatcaatgcatcctcctacgtgggatcaaggcttgaatggtgaaattttaactttaaaaccattcaaaagtgctacagcgcatatctacatttgctaaacaaaagagatctacataaataaaaaaagaaaaacaattgcattcatcactacactactgcttcgaatccaaagaagatccgccctcatcatccaaaaaggcaccaccacctgaatcgttggaatttttcactgcttccaaattcccatagttttcacatagctccgaatagactccactgtctaccttggataccccagacagtgatactaatcccatagcagcaatgctgtttgcaatagcattaatatctctggttccagtgtaaagaccacgacttccagccacaaggatattgttttgattttcgtctggattagttaaaattgcaggcagagtgtccctcatcatctgttggttaccctggcttgaaccactaagtagcaatcttagagtctctcttgcacccttcaccacagcatcagattcaggaatcaatggcttcacaaggtttggatgcaatggtggaatgctaggtgacattgcagggccagcactcacaagatagccctgacctgaagagcacacgtcaatcactgggacatgaacaattg

SEQ ID NO: 22631 - DNA, 313 bp, Glycine max
agccaaaatctgattcagccacattccaaatatctaatcaagaaagaatcatcaaggctttgaatggtgaaattttaacttaaaaaccattcaaaagtgccacagcacatatctacatttgctggacaaaagagatctacatcaaaaaaaaaaaaaaaaaacataattgcactcatcactacactactgcttagaatcaaaagacccgccctcatcatccaaaatggcaccacctgaatcattagaatttttcactgcttccaaattcccatagttttcacatagctctcgagccgattcggctcgagctcaa

SEQ ID NO: 22632 - DNA, 771 bp, Glycine max
  unsure (1)..(771): unsure at all n locations
gaacaaatgagaataatattattaacaattaacaaaattttatcatgtaaatatgcacctggacaacataatttctatggccagatatttaacgcacaattcaaatttacaatgttattattgtcatctctaaatcaactacctgattcctgaaaaacaccccactgtgccagtatgattcccactaattctcaacagagtcaattaaaaaccttcatcatcatgctagaggcagccgattccgccatttccagcagaagtatgcaccccagctagatatggttcaaaatttacagtgacagctctccactaaagaaaaaactatccaagcaggtttggagaatgtcactaaatttggcgataaatgacggctcagaatttacaattcctataattccaccgatcaatgcaggcaacacaagaagaatcggcgctcagaagtattttacataatcacaagaaaacctctgatgcatatgcaatttgtagtcacctgctttgaagtagttggtaatttaaaaccaagtcatctgatttcttccatatataagctcgcacagtggctaagctcatttcaggagacagcactttgtgaactcttaatatacgtggggcacttagcttcccttgtgtgaggatctggactgaagagccttcacatggttgcaaatagaaactgcatttagtattttctctgggaggtaaccgattattcaaaacacagtccaggcaccaccaggggaagtctttctcatcctaaaatcctataan

SEQ ID NO: 22633 - DNA, 519 bp, Glycine max
ttccaaaaaaaaaaaaaaaaaacaaattggactactagaaggggttctataaatggaagcttagtaactttcttcactatacaagctatatgccgctgttagaatcaatctcattttcattttcactttattgtggtactcacacaggctcttgattgccacaaatggttaaaaaaaacaaatacacatttctgaagattagaaatagctcaagcgagactctattgaacgtccattggtttgacgccgaggtgttccaatctcacaagcattgactcttgatgcaaacctgagtgagcatagtgactcaccaactgaagaaggatcaggtgatatgttcacaaacattagtgtcttggagtctccacctagacaaggctgaagcagatatgtaagctttgagtttctgaatggcacatggtcctccttcttggctaaggcaaatatatcatcactcagtgatgataaacttttgttgattgctagagtttctttcaaccggtccccggttgatccact

SEQ ID NO: 22634 - DNA, 565 bp, Glycine max
ttaactccaaatgtagcagattcattaagattttatacaacattacagcaaactatatatatagaacacatacaattcatgatttcattaaataaataagaacaacgcaaaatttataacataccaagatgatagttttacaaaatcaaccattgcaccaagaaaaacatcaagcattcttatttttaacccctgaaggagaggacttgaaccaaggtatccacacagaagttgtattctgatacaccctaaatgcttctgctctactttcttgtttcaacattcggtcctccacaagcctagtcacataagccaaacacatagtattaacaaaagctccaatgaaggtccatcccactcccaggctccatgcaaacacaaccagcccccaccaccacagctgctcgccaaagtaattcggatgtcggcagtaataccacaagccactgtcaaggaccgaaaccacgggtttaccaagccccttcagcttgttgtttctactcacaaactcatagagctgtgtatcagcaaaatatgctataacaatgccacatgtgggacttgg

SEQ ID NO: 22635 - DNA, 430 bp, Glycine max
accacaaacacttcatattcataacatcaaagggaatgttgatgagtgtctagtgattacatgacgagaagatcctaagcctaaactgtcattagtctagataaattacatacaactaggaagctatatgagcagttaacaagggtgaagggtcaatttcttcttaagatatctttcgaaatttactagttttctgtgctgttttgccaaaaggttacatccctactttatattgccaaagcttcggccattagttaatcacttcggagagatgtcttctataatgcccttcccatcaaaagcatcaaaaaagaaaaaattctttagggggtctcctttcccagaaattgctttgataacctcctgtccaaggattccccctataatagcacaaacagggggaaattctgttgcaattgtcctcgaaccg

SEQ ID NO: 22636 - DNA, 564 bp, Glycine max
tttgtttttttttttttccatataaatcacttactatatagtgtggatggattcagttacattcatagatagatgtgaattgaatggataccaatggattcacttactatatcgttttaccaccccctagtatgtacatgtacataacgttacagctgcgaaagttaagagtcaaaatgcacggcatttcaacaaagccttcttaatattcattcatacataaaaaataaaaataaaaaagcatacaaattattagacttgttcctggggtacagtgggtgatcctggtgctattgcaaactgtaaacctctacgctgcccagattgtagaacgaaagcaacttgggttgctgctagtgctgcagcctcttgtctttgtcgccgacgctgcagaatactgattgcccaagccatgatgtagcaaggtaatagaaatccagcggcacgaagcaagaaaagggagaaaaaattggatggatcatcatcagaattatcaccttctgtctcagatggtgataatttctgatgatgatccatccaattatcaccatctgagacagaaag

SEQ ID NO: 22637 - DNA, 382 bp, Glycine max
gacagtaagaggcattatcatattgaattgacggtgacaatgaactcaaaattgaagcagttaataaatgtgtacaaaacaatgaaatgtttgtatttgtaaatgaccttgttcctataatttacctaggcctagttctataccacctgaagaaactaaatatgatttccttttctttcttctgtgtatatcacttaccaccaatgggaaccccccccaaaaaaaaaagaagaaaaaatcaacctcaagaattgccatgtttataggtgttttcctatacacaactttcaccccccaacaagatgttaaacatcagcacactttattggtgcatatccaagtcttgatttctttaaatcatacaagatgtggaaattctgct

SEQ ID NO: 22638 - DNA, 440 bp, Glycine max
tattcctttatcctccttgcttattagtactactcctactcctcttaagttttttattctgagggcagatcaagctatcacgtatggaaattccaattccgtccctctcatttatgttactcttactacttgtaccttcctgcatttgctcttccccacttcaagatcctgaactagtggttgaagatgtacaacagagcattaatgcctcaaggaggaacttagcatttctttcttgtggaacggggaacccattgatgattgttggagatgtgaccccaattgggagaagaatcggaagcgtctagcagattgttccattgagtatggtaagcatgccgttgggggaagggatggtaaaatatatgtggtgactgaacccggtgattaacctgtgaaccccaagccaagaacactaagataatgtggtgatcaagaag

SEQ ID NO: 22639 - DNA, 560 bp, Glycine max
cccatgttgtgggtttgaactcttacagaagttttgaagcaggggtgcaacctgcaacaaccacaggggaggttcaaacagttaaacagggttatctgttaaaacgatcatcaagctcacgtggagattggaaacggaggttctttgtacttgataaccaagggaatttatattattacagagtgaagggtgtcaaacccatgggctctcagtcatataattattctcgctcgtctgaaccaaaacagtggcatgtttggtagattccgttcaagacacaatagggcttcgtctctaaatgaggatattttaggttcttgtacagttgatctgtgcacatccactataaagatggatgcagacgatacagatctacgtctttgcttccgaataatttctccctcaaaatcatacacactacaggctgaaaatgaagctgataggatggactgggtaaacaaaattactggagctatcacatcgctttttaattctcagtttcttcaacagcctcaatttggtagagtgcattcccagaatagaaactcagcaactggtgc

SEQ ID NO: 22640 - DNA, 415 bp, Glycine max
gtcatcacctggaattgctgcaagtttcatacaagaattctgctactgctcttgtaaaggaggttagaggtttctggcccgatcttcttattacagttctttgcaatgagtggagaaaatgcaaaaaagcaatggagtcatcataccctcctaaagaaccaaagtgcatactttttccttctcagatgctatcttcagaagaagatatacctgagggctcatcatttgctgctggagaaaaaatgcatgaactagtgaaggtatttgtagttctgcaccagcttcaaatattcactctacgtacacctttgcctgagaaacctcttatttatcctcctggtgatctcccagcaaattctcgtgcccaaacttctggacttgatgtttcaggcccaaaaccaggaactgaagtcag

SEQ ID NO: 22641 - DNA, 446 bp, Glycine max
catccgtaagccaagaaccacatgatgataatattgccaagtgcaatgcagaatgcttgacagtgaatgtcccacagtcgtctagttcttcaggtttagacacagacagtattatgtcagaagataattgtagcagttcaaatttggctttaagggaggttttgcttgcatatgttactaaaggggatgatgtacaagttttgggttctttgagtgttcttgccactctactgcaaactaaagaacttgatgaatcaatgctagataggcttggaattcttccacaacgcacacagcaccagaaacagttattgcaagctttggttggtgaggcgtcaggtgaagagcaacttttttcttctgaaaattgcttgatgagggatggcagtggatgtgagcctggtgtccatcgtgaaaagattaaggagcagttccggttaaccttt

SEQ ID NO: 22642 - DNA, 438 bp, Glycine max
acataacatagctttcacttgcaaagcttgggggattcgagcaactgatctgaaccaaggagttgtatatggggtcagaacagatgagactgcaatgcatgaagagctgtataacaggtttgattacgatggaatatttggaactgcattgaatcggttctgtgttcaggctgctgttggtcatccacttactgtatatggtaaaggaggccagactaggggcttccttgacataagagatacagttcaatgtgtcgagcttgccatcgcaaaccctgcaaagcctggggagttccgagtcttcaaccaattcactgagcagttttcagtgaatcaacttgccaaccttgttacaaaagcgggtgagaagctgggcattgaggtgaaaactatcaatgttcctaacccgaagagtcgaggcagaagaacattactaca

SEQ ID NO: 22643 - DNA, 462 bp, Glycine max
cggacgagagaaggatgaaattcacttgggaaagaaggagggacatatccatatgtgtggctcggggacttgactttcttcatgagcagcttaagcctcatatcgtatatagagacatcaaagcagcagacatacttcttgatagtaatttcataccaaaggtttctgattttggtttggcaaaattgctgagagatgaaacatctcacattagcactcgggttgcagggacattgggttatctagctccagaatatgcaaattctggccaggtttcgcgaaaatcagatgtttatagcttcggagtgttacttttacaaattgtgagtggcctagcagtggtggatgcctatcaagacatagaacgtttcatagtggagaaggtatgaaactgaagtcaaacctcataattaatgcagctatctagctagtagatttagcctcacttggtgggggaaacaa

SEQ ID NO: 22644 - DNA, 622 bp, Glycine max
  unsure (1)..(622): unsure at all n locations
gtttctggctgctcaaaacttggttgcttaccagagggtttaaaggaaatcaagtctttggaggaacttgatgcaagtggaactgctattcaagagctaccttcatctgtcttttatttggaaaacctaaaaagtatctcatttgctgggtgcaaaaagccagtatctaactcagtaagtggatttcttctcncctttcagtgggtatttgggaatcaacaaactcctactgcattcagatgtaccaccttctaaactgaatctaccctctttgatgagaataaatttaagttactgcaatctatctgaagagtcattcccagatggttttcgtcacttatcttcattgcagattctagatctcactggcaacaattttgtgaccctaccaagctgcatttcgaacctcacaaagcttgaaattcttctcctaaacttgtgcaaaaaacttaaaaggttgccagagctcccttgaagaatgaaacatttggatgcaagcaattgcacttcattggagacttccaaattcaatccatccaagccatgcagtctctttgcatcatcaccttcaaattttcattgttcgagagaattgatacgctatcttgaggaactccctctt

SEQ ID NO: 22645 - DNA, 305 bp, Glycine max
tgtgaagactcaaccgacgactctctctctctaactcgcattgtgttccgttgtgttctgtttcagatcgtggttcgtcacttcgttgttcgtgaagttggttcagattctaactgttctattccctcatcaagagtcatgagcttgttctgaggtctgattagcttgctaattgggttggagaaatcattgagttaaaagagagaaatgggagctattgctggacaagagctgctgacatgggacaagatgcaaggagtgagcagtcgcgaagagaagattctggtgtcaataccactgacgcc

SEQ ID NO: 22646 - DNA, 501 bp, Glycine max
ttattttcttcttcttcttcttcttcttcttcttctgcttcttcttcttcttcttcttcttcttcttcttctatatatatatatatatataccatgtatagccccattagcagaaaaaaaccaccaatggagtctcacgtagacaccattctctctgcaatttttgttctactcctttcttcgttaacccatttcagcatcaccgcaaatgcaacaagaacaccccaagaaaacagcctccatttccaagtagcaaactccacatgcgagggaacactctactccgacctctgtgtctcaacccttgcctcattcccagatctcacctcaaaaaccctcccacaaatgatacgctctgtcgtgaaccacacaatatacgaggtcacattgtcggcctccaactgcagcggcctccgaaggaacctcccgaaactcgacaaactcgaacagagagccctcgacgactgtctcaatctcttcgacgacaccgtttcggagctc

SEQ ID NO: 22647 - DNA, 537 bp, Glycine max
ctttcattttttcgtctcaacttctctctttctttctctggctcttaaaaatgggcacaccaaacccaactcaaccaaacgatgggccctgacccactccgccggcaatgggaaagcccggagaagaccacctctctctgccctccgccgaggatccgcggcggaatgcggcggcggcgtctggatgcgccgtgggactccgatgcctcgtcgtcttgcttttctcggtcgcggttttcctctccgcactcttctggctacccccgttcgctcacttcgcagatcccaaggatctgtatttaaactcaaagtacaaagggaaagggattcagactaatccggagttcggttgggagaagccagtttctttgctagaagacaacatcttgcagctttctaatgacatttttgaagagataggagctccctctaccaaagtgatcatcttgtctctagattccttaccacggtcaaacacgacaaaagtggtgtttgcagtttgatctgatggtaaatattcagaaatgtctgcagctg

SEQ ID NO: 22648 - DNA, 1497 bp, Glycine max
gctcgaggcgctttactcgtcttggtggtaagcttccgaaaggagttttacttgttggtccacctggcactgggaaaacaatgttagctagagctattgctggagaggctggggttccattcttctcctgcagtggaagtgaatttgaagagatgtatgttggtgttggtgcacgaagggtgagggatcttttttctgctgcaaggaagcgagcacctgctataatattcattgatgagatagatgctattggaggaaaacgaaatgcaaaggaccaaatgtacatgaagatgacattaaatcagttactggttgagctagatggattcaagcaaaatgagggcataattgtgattggcgctactaattttccacaatcattggataacgcattggtgagacctgggcggtttgatcgccatgttgttgttcccaatcctgatgtaaaaggaagacagcagattttggaatcacacatgtcaaaggttctgaaggctgatgatgttgatctaatgatcattgcccgagtaacacctgggttctctggtgctgaccttgcaaacttgattaacattgctgctatcaaggcggcaatggatggtgctaaagctgtgagcatggctgatttagagcatgcaaaagacaagatccggatgggaagtgaacgcaagtcagctgtcatatctgaggagtcacggaagttgactgctttccacgagggtggccatgcccttgtggccatacatactgatggggccctccctgttcacaaggcaactatagttccccgtggaatggctcttggcatggttactcaattgcctgaccaggaccagaccagcatttcccgtaaacagatgcttgctacgcttgatgtttgcatgggaggtcgtgtcgctgaagagctaattttcggagagaacgaagtcacttctggtgcatcctcagatctcaggcaagcaaccagtctggcaagggaaatggttaccaaatatggcatgggcaatgaagttggactagtcactcacgattacaaagatgatggtaggagcatgagctcagagactaggcttcttattgagaaagaggtgaagcaattcctggagagggcctacaacaatgcaaaaactattctgaccactcacaacaaggagcttcatgcacttgcaaatgcccttctggagcacgagacactttcaggaactcagataaagacattgcttgcccaagttagatctcagatgctgcagcagcagcagcagcagccaccccaaacaattgaagctcagagcagtttacaatccaacacggtgcctccatcatccagcaacccggcatctgctgctgccgctgctgctgctgccgccgccaccacagccgcagctacagctactgctgccgccgccaaggcttacagtgcctccagtgggatcttagcaggacaagatgccggagatgggtagcaaacataactttgtacggccagattgaaatgtg

SEQ ID NO: 22649 - DNA, 464 bp, Glycine max
caatatattgatcatttcccagctggtgcaagccaagttgcctggtggattatggaaaatcgacgagagtactttgatcgttcaaaggatatattgcacagagtaaagatgttggttttcctttctgaatcacaatctaaacagtggcaaaaatggtgtgaagaggaaagcataacactgagatccctccctgaaattgttgcattgtctgttaatgaagaactggcatttgtagctggtattccttcaacacttaacactccatcctttagtaccgagaaaatggttgagaaaaagcagttattgagggaatcagtccgaaaagaaatgggcctaactgataatgaaatgcttgtgatatctctaagcagcatcaaacctgggaaagggcagctattgcctcttgaatcagttagctcagtacttgaacaaggacagttgcaagatgataagaaaattaaaaa

SEQ ID NO: 22650 - DNA, 343 bp, Glycine max
cgacgactcttccccgccatccctcgcgcttcggagaattccctttctcggtctcagattatcgaccccaccaatgtcgcctccgccaagttcctctctcgctctttcactcgcaccttccacgccacttacccctccctccgctccgccgcaagctctcacgtggcgcagacggacttcacccatatggcatgcgaggggattgtcggtgctgttgatgcggcgccagttagtatacaacaaattgtggagtctgagcacttaatgacagctcttttggacgaacaggatggcttggctagaaggatatttaccaaggcagggatggacaacacgtccgttc

SEQ ID NO: 22651 - DNA, 506 bp, Glycine max
cggctcgagtgatggcagagccgttcgctggagctgctgcgggagagttgttgaaaggggctcttgaaatcattcgcagcggttacgagttccgacccaccctcgaaagaagcagagaaaccttcgactctttatcttctcgagtacaaaagattaaacagttgaacaggaacctggatagctccacagaggagatagataagttggaggctcttgtgcgagatggtaaagagcttactgacaagtactccaaagttacttggtggagatttctctgcttcccttgttaccagtgcaagcttaaggccagtgaggatgctctgacgagacacacaactacgattgagccggttcacattacgctcggaatgatggagatccagtccggcatcaatatcagtctccagactctgctcatgtcagggaaggagaatattggcggagcaatcgaagaaccagagtgcattggaatggaacaacatttgaacaagttgaaaattgaactg

SEQ ID NO: 22652 - DNA, 641 bp, Glycine max
tgaataatgaatattgaatctaacccagaagccatggaattgtaacccaattccaaagcaaaagcacgatgaggatattgaaggttgccacatgcaatctgaaccaatgggcgatggacttcgattgcaacgcgaagcaaatcaaggagtccatagcgaaggccaaagaagccggcgctgccattaggctcggacccgaactcgagattcctggttatggctgcgaagaccacttcttagagctcgacacagttaaccattcatgggagtgcctgaaagatttactgcttggagattggactgatggcattgtgtgtagctttggcatgcccgttatcaaaggctccgagcgctacaattgtcaggttttctgtctcaatcgaaagattattatgatacgacccaagatgtctcttgccaatgatggtaattatagagaactgagatggttcactgcttggaagcagagggatcaactcgtcgattttcagttgccacctgaattttcccaggcaataggccaaaattctgttccattcggttatggcttcattaagtttcaagacacagctattgcggctgaagtttgtgaagagctttttactccaactccccctcattctgaacttgcattgaatggg

SEQ ID NO: 22653 - DNA, 439 bp, Glycine max
caactacttccaccgatctgtcttccattgttacctttgacgtgttgtcgggttcgtcggctccacagcacacggatctcacgacgttgagagtgatccatggcaccgttaacgccatatcgtggggcattttgttaccaatgggagccatcaccgcacgctaccttaggcacattcaagcactcggccctgcatggttctatgctcatgcaggaatgcaactgtttggtttcgttctgggaacagtggggtttgtgatcggaatcaggctggggcaactgtcgccgggagtggagtataggctccaccggaagcttggaatggcggtgttttgtctggggggtctgcagactctggccttgttatttaagccaaacacaaagaacaagttcagaaaatactggaagtcctaccatcactttgtaaggtactcctgtgt

SEQ ID NO: 22654 - DNA, 1436 bp, Glycine max
gtactatttgcacttgaaagggggattcctgctatatctgctgtgatgggcacaaagaggcttcccttccctgggaaagtatttgatgtagtccactgtgcacgatgtagagttccgtggcatatagaaggtggtaaacttcctttggaagctaaatagagtattgagacctggaggtttttttgtatggtctgctactccaatttatcagaagcttcctgaagatgttgaaatatggaaggccatgaagacactaacaaaagccatgtgctgggaagttgtgtcgatcagcaaggatccagtaaatggagtaggtgtagctgtatacaggaagccaacttctaatgagtgttacgagcaacgctcaaagaatgagccaccgctgtgtccagactctgatgatcctaatgcagcatggaacattcaattgcaagcttgcttgcacaaagcgccagttagttcaaaggaacgaggctcaaaattgcctgagctgtggccagccagactgatcaaagtgccttattggttgtcgagttcccaagttggagtttatggaaagccagcccctcaagatttcactgctgattatgaacactggaaacgtgtagtatccaagtcttatctagacgggatgggaattaaatggtcaaatgtacgcaatgtcatggatatgagatctatctatggaggatttgctgcagctttgagagatttgaatgtttgggtcatgaatgtggttacaatagactccccagatactcttcctattatttatgaacgaggtctttttggtatatatcatgattggtgtgaatcatttagcacctatcctaggacctatgatctcctccatgctgatcatttgttttcaaagcttaagaaaaggtgcaatttggctgctgtagtggctgaggctgatcggattcttaggcctgaaggaaaacttattgttcgcgatactgttgagatcattgaagagcttgagagcatggctaggtctatgcagtggaaggttcgcatgacttactccaaggataaggagggtttgttatgtgtggagaagtccaagtggcgacctaaggagcaggaaaagctcgagtatgctattgcttaagcatggagatgagatgccaaaattcttgggttttttggctactcgaaattcctgtttaactgtacttccactgagtcatatgtatcatgttagttaggaatatctatgtattcttttttcctgttgggtattaattttgatatcctttatttatatttattaaattggtgacctctgttgtaacatggtgccatagcgtgaaggaaatttgatcacattcttgcaaataagagtagaggccattgggttatatttataagcgtgtaatagttgagaattttgaatattcaattcaccagaaatggtaatattaatctatata

SEQ ID NO: 22655 - DNA, 531 bp, Glycine max
caaacttctaatggatacatcaagctaaagattgatagagcaagagagtgtgaaagtgcttgctctagaaattgttcgtgcgttgcttatgcttattatttgaacagtagtatctgccagttgtggcatggtcaggtattgagtctaaagaacatctcaacatatttggacaattctgataataccaatccaattttttacctcagacttgatgcgtcagaattggttactgctgattcaaacccaacaaatgcaacagaactagcaactgattttcgcaagcatgataacttgctgaggaatctacttctgattgttatactgatcttacttccagcatgtcttatattgggcctattagtttatcggactagtaggctaaggagataaggggaagatttgctacgttttcatgtaagcatgagcatgaaagtcgaagattctgagcttgctgaagcacacaggggtgcgaaagttaagatgaaggaagtcaaattgccattattcagttttgtgagtgttgcagctgct

SEQ ID NO: 22656 - DNA, 394 bp, Glycine max
tttttttttaggggaggtaaaaacccaaactttttttaataaaggatagataaagaatatcctgagtttgataaggttcttgagcatgcattttatccaacaaaatcatataccatccttcatgaaacaatgccttagtgaatcaagagaagctataaaggacttaaaaaaatttgatattagaagacgaggaacattattgtgggacagagaatgaataagagcttgaactctccctcttgcatgaagattcagccgtggaggacacgtcttgatcaatgcttgacaccccggtatccttgctaagatttcgcgaattattctgcttctgctcgacctctgccgaacattttggtctctttctattaagaagatcaatctggggattatcaag

SEQ ID NO: 22657 - DNA, 482 bp, Glycine max
aaccaaatgaaaatatgaattgagcatcattacaaaatagattacaaagccaatatgtctggggaggcccaaaaagactaaaaaagtcatcaactgaaacactatgaaacagcataggtagacaaataaaagccttttttttctgtgatctcaatgtgccccctttgaggttaccaatgaagagtaatgccaaaataaaatagaagagttgatatcaccaaactggcaagttgcaatacagaccttcctacatacatcttgccacatcaaaagaagacccaacaatttgaccgaagggggatttcataatccctgaatgagaaactgaaacatgtagctaaaactgcattaaagctcaaacgtttcattgacaaacctaaggggaaatccttgggggtcattatttgggtagaaagggttttaccaaataggctaaaagggtttcagcaaagtttgaaaaggttttaggcccttgattcggg

SEQ ID NO: 22658 - DNA, 531 bp, Glycine max
gctcaaaaaattctgcatgaactaaaacgaaaaagacactattttgcaagaccaaaagcatatgggcccaggggagtacaagccagtttatttgattaaactaaaatataacacattattttgaacattctttaactgttgaaatcaaactcagttttgtctcatttgattcagtgagaccgtgagtaataaggtacataaggagaaatggggggtagtggaaacatcaacagaacaaatgtcttactattaaatcttacaatgagaagagtttaatagtaactcatcttgcttccaccattgtatctgtgatcaaattcaaagaaaagctttctggcatgctagcgggcaatattgaattttgattacctctcacatttagaaatgcaggtggtttaggagaaggaagggccacagtatcgttcccaatcattgatacgacatcagacatggttggtctatctgctggactttcttgaacacagagaagtcctatgttcacatatcttggcactgtatgcatactactac

SEQ ID NO: 22659 - DNA, 374 bp, Glycine max
aaataaagctgttacgagcacgaagaatatttattttcatagctgaaactgaagctttgggatttacatatatactttcatacaatgaaagtgggtttttgctaatgaaattggaggggtactatgtatgtgcacatatttgatgtaccctctttaatttacgtgttgtaatggggaaggggtgtttattcatacgttattaggggggggatgatggataaaaagaaaagagaaacagaagcgggtcatcatatcagcatatctgatttggaaggcaatctcttgaagaaattaactggtaccgatggcatcttgctcctaaaccgaggatgacgtagcatatagaggccaactagaattgcaacgacttggaa

SEQ ID NO: 22660 - DNA, 765 bp, Glycine max
ctggtcaccacatattatctgctaagtttgacttgaataataaacaaaaaaaggtatggtcctatcccaatagaaatgggatcaaatgcaaagatgcaatgtacaccaccacatatgaggaatagagccaagtctgtactggaaattaaattactttgatacaacagaaccaatggctcttttaaacaatacaaattatctcaagtccttataaaggaatgtttagaaacaaaagcaagccatatactcactgctttgtgagtatttatatatatctctctctcttccctactcaatgtacaaaatgcttagtgctttgttaacctctcaaggacttcaaagtagtcaggaaatgtcttcctggtgcaaccaggatccttgatggttactggaacatccccacaagcagcaagagagaatgccatggccattctgtggtcatcatatgtgtctatagctgtgacattcaatttctcaggtggagtaatcacacagtaatcaggaccttcttcaactgttgctcctagctttctgagttctgtgcagattgctatcatcctctcagtctctttaactctccaacttgccacatctcttatagcagtgggaccattagcaaatagtgcaacaacagcaagtgtcatggcaacatctggcatcttgttcatattgacatcaatgcctcgcaagacttttcgaccagaaaaatctcgtggtggtccagaaacagtgacactgttctctgaccatgtaaccttagctccc

SEQ ID NO: 22661 - DNA, 350 bp, Glycine max
  unsure (1)..(350): unsure at all n locations
tttgacaaatagaaagttaaaaatattagaatatttgttgggagcaatcatcatccaaacgacacaatcaaccacaggtcgctgcattttcccttaaaatcgcagcttgtgttggttgatatggtacatagtcatttacaattgggctcatttctcaataaattaaataatggatcaagtaaaaagctgtctcgctactttgccttgcatttgcgctttctttctgtacagttctatcggctcgatgattacaagttggaccacaagctccgttaactgcggcttcaaggggcatgcaatttctgtanctggtcaaacacatcataggaactgctgaatggttggaaatc

SEQ ID NO: 22662 - DNA, 239 bp, Glycine max
atctaaaaaaaaagaaacaaatcaacctatgcaacccaaggaaaaaaaaagactataaacacttgatgaatccttgttgtcactgctatacaggttgaccaatttgtcatgatcctaatcctaaaaacatgctcaatcttgtatgttcatttatcggatcgaacccagttcgttatagactaattggaagactataaacacttgatgaatccttgttgtcactgctatacaggttgacc

SEQ ID NO: 22663 - DNA, 713 bp, Glycine max
gaccaaaagaaaagaaactagggaggaccaaatatttactaggcatctaaatcaaagcttcgatatacaccctaaaacaaccaaattgctgggcaatcaccttccatgctcaaaaagcttactcaaagatgcacctaaatcaatggctttcgggtggatctgttgaataagtacaaattcaaattctttttgtgcttattgattttacactcaagtccaccaagatatgaagaaattgatatagctccaaaatgaagcactagatgttcattgggaaagtgaaagtctacaacaacttattatcctccaccacgagaagcatcccatatatcactcacaaaacgacttggtctatggtttcaaggccacagcaagaccaacctttgcactcttttcgatggccccagtatccacctcaccaacaagcgaaaatcgagttcttggagtccagtcgtgctggatcagagcacttgcacgaccatagttgttcacccgagctttcaacagcgttagcgggtccagagcatgctgtgtaccaaaggtgagtatattttcattgccagaaaagctatgtgaaagctccgcaccaacagccgtgttagtcagcgggtttacaatgtggtaatatgaggcagtaaggttgtcacctttatcatttagagttagagatgcaataaggtcagcatgagtaatgttcagcgggtatccctacc

SEQ ID NO: 22664 - DNA, 1066 bp, Glycine max
agttagtgcttttgtcgcaaggaacaataacattccttgaattctatttccacaacaggcatctaatactttattaaatggggataccaaaagagcatgaagccactaataaccataacgtattcaactgaaatcagagaagaatggaatgtcggtggaactcaaccattcattcccttgaatgaaattgcgaactgtgaactggtttgcctcagtggcgttcttgataaccctataaccaggccacgtaactcttgcacttgtgtttgaaccgggacccctattgttgtactctccataatacaacgtatccaatgcaaacgtgccattccactccaaccaccctttggggtctatcagatcctccatgtaagaattaagataaacagttctcgaatacttcttccaaggacgacccaagtagttcttgaactgagatttgaccgggattaaatcagcagctgctgcaaccttgcagttcaagatggaaatgccggtgttttggttagggtcttctcttccttgtgcagtgaacaagttcctttggttttcattgggcttgcgtgcgtacaagttgcagttctggagcactgttgctgcattgccgaagatgaagtcgactgtgccataaacgtcacaatcgcggtagaattggcgcagggagtggacatagagagtatcttggtaggcaacgaagctgcatttatagaaggctgagaaatcagaaccactccttagggccacggcttggtgtttgcttggcccagcagaattttcaaaggttataccctttgctatgaatccgtctccaaccacagcaacagtggctgattggaaagtggtccagccatccacaacattcctactggccttcacaacagtctttccaatcccatctccgacgaacatcagattggtcttcttcctgattacctccacattctcgaagtatgccccggcttttatgtgtatcacaaatctacacgcgctggagttgggagccacagccactgcttcggcaatggtggtgaagttgccagtgccatctttggccacaagaagattg

SEQ ID NO: 22665 - DNA, 488 bp, Glycine max
accccagaaaaacatctttaaatattgattaattgggaagttcgggcattaaacaaccttattgcatccaagtaacagtttattattacactctgcagggctgcattattctctaaagggatgagccagagtatgtcacatctccaagttcatataatcgccgacaagaaaacttacacgaaacaatacaagttgctaatggtcaatcctggcaccagacgctacccttgaaattcattaaacccttttgaaactttgatcgcttcaattatatagataaataacaaagaatgaaatatgatcgtaatgtacaatatcttcttcaaatcctgtttgcattggcattattgctgtccaaaggagcccataatggattctaaattaagtatcgggccggtttctgagagccctcaagcaacattgatagtgaaagaaacgtacgggtggccatcggcatcacctgctaggccagccataccggcacctac

SEQ ID NO: 22666 - DNA, 303 bp, Glycine max
gattaattgagttgtacattttattgcgtacagataacagtttattattacactctccagggctgcattattctctgaagggatgagcaagagtatgtcacatctccaagttcacataatcgccaacaagaaatcttacaggaaaccatacaagttgctaatgtacaggaaacaagaaatcctggcatcagatgctacccttaaattcattaaatcctcttgaatcttcgattgcttcaattatatagataataacaaagaatgaaatatgatcgtaatgtacaatatcttcttcaaatcctg

SEQ ID NO: 22667 - DNA, 455 bp, Glycine max
gcatgcaaatgattaaaggttttattaagaattttttttattcagaagaagcgaactcaggtacagtttacgacaacttattaagaatttgattgcatgcatgcaatcttccttggtaatatgcttggatgggaatgactaggagaggttgtgccttatgcaaagtaatcccatatttctcagacacatccatgtcttctggcttttgtccatccgtgagcttccaatcatagttgtatagaagagatgccaacacaacatgcagagttctagatgctaatggcaacccaggacaaatccttcttccagctccaaagggtattagctcaaaatcatggcctttaaaatcaatgtcactttccaggaatctttcaggtgtaaattcatctgggtttgtccaaatacttgaatctcttcctgtggcccatacattgactagaatttgggcactttta

SEQ ID NO: 22668 - DNA, 1090 bp, Glycine max
ttcaacagtaactggttttaaactatatctctttatactggaaatacaggtacaagtggataacatgccaccaatatataaaaaaaaactggaaggcaatgtaatgtgttacctgggggaagtaacttcttgctgaaaagcaataaaagaataatttgaagaatcagcagttactacacatttcacaacattagaccggaggtcatcatactttcttgcatcggtcgcagaaatactatatatgcctaaagaacaaagggcaagactagtttcaagagtgctgatataggtggtacaacagtcccactgctgctaccactggtgtggtcttcaaccgtacttcacgaacagaatttaatctggctcgaaaaatgtttccattagacaattgtctcacaaaacgagtaaaccgatcccaatttcgggattcaaacaatcttttgtccattcttacaaagttgaatgagaaaggtcgcttctcaatcccatctgagtaaaattttgacatcttaagcacctgggtgaatgcaccatcatccaaattagttgaaaagttttgaccttcgagtgatatatcgcagagcctagctaccagcaatagctgtctaagaaaaccttcaggactaccatctggattgatcttctgcgttacagcatcttgcatttcaaaacaagagcagcacattgagaatccatacttgctaaacatacgagcaatgggtaagtatccgtccctgttagaagtattataatagccagctgttaactctgatgggtgggattgcatggcataatgccagtgaatggcagccaattttgctgatatatggacttctgtacccctaaatatagtttcagcttccctacaaatcctctccccatgcagcagcagcatatctgagtaccattcaagaaaaaatttaccatatggtgtgtcccaagagccaccgtcatttctgaaaaaatcagtatgctcaggattttgcatcaaactttcactaccaaatggaccaccatttccccattcacgctttccaatatttcttgcagaggcattcagagaagcaagcatatacttatcatagcactg

SEQ ID NO: 22669 - DNA, 518 bp, Glycine max
tccgcacctgttcaagatattatttctctctctaaagtcgatcgccctctctctctctctctctaaaaacctttaaaatccctggaatctgtattgcgtgattgacatttgttcacgatctcccctaacggaagaagctagggttcggattgatttctctgctcataataataataatctgatttgcttttcggaaaataattttgctatggcaaactggagagaacgagatttgtttcacatcgacgagatcgatcccgtggacgcgtcgaacggcgaagatttcgacgattcttcgtcggtagacagtgctacttccgatggttcgaggacgcaggttggacttacggagcgtttgacggatattctcgttgacgagcgcgacggcgatctgttgattcagcagactaatagagaggaccggttgttgtggtggcttcaggctctcgatatgcaagttatgggagcgtgtcgcgccgacgagcggttgaagcccttgctgaagatgaacgcttcct

SEQ ID NO: 22670 - DNA, 418 bp, Glycine max
aaaaggttgtgcgtgtctgggatgcaagatcaggatcaaagactctaaagctaagaggacatacagataacatcagggctctgcttctggattctagtggcagatattgtttatcaggatcttcagactctatgataaggctttgggatataggtcagcaaagatgtgtgcattcttatgcagttcatacagattctgtttgggcacttgccagcaccccaacatttagtcatgtttatagtggagggagagacttttcattatacttgacagatttgcaaactagagagagtagtttgctttgcacaggcgagcaccctattcttcagttggctttgcatgatgatagcatttgggttgcatcaacagactcttcagttcatagatggccagctgaaggatgcgaccctcaaaattt

SEQ ID NO: 22671 - DNA, 630 bp, Glycine max
actcaatgaaatgtataagcggttacaggattacattacaagcttacaacagtacaatggaaaacttcactctgagctttcgtcggttgaggatgaacttcaacgcgtagaaaaggagaaggtttcggtagtggagaacatcaccttgttaaggggtcaacttactgtatccgtttcttctcaagaggaggccataaaacagaaggatgtcttcgctacagaagtttcctctcttagaggagagttgcaacaagtaagagatgagcgagaccggcaattatctcaagtacaaattttaagttctgaattagagaaagttaaagaatctacaaaacattcctccactgaattggacagcttgacgtttaaagctaatgatctggaggaaaaatgttctctgaaagataatcaaataaaggcattggaagagcagctagcaactgcagagaagaaactgcaggtgtctgatatatctgcatatgagacaaggacagaatatgagggacaacagatatttgtgaatgagttacaaagacgcttagcagatgcagaatataaacttatagaaggggagaggctgcggaaaaaattacataataccattttggaattaaaagggaacattcgtgt

SEQ ID NO: 22672 - DNA, 415 bp, Glycine max
gaaaaagagtctcaaatttctgttaattttagttttcgtttcgtatcacgcttttcatcttccttcttccctctccatttgccctcactttctctccctccaaacagcgtgcaattcttcttctttctctgcgatacatggagatgtcgtcaatggaggattcgcgctcctacgagattctctccacggttctcgacgctttcctccgacgcggacgatctccacgattaccgaacagttctataccgattgccccacgaatatctccttttacgccctcgttttaaggtcctttcttcgctctccatatctattcgtttatttcgctgtttatgctcggaattccaacagtaggatatcgttgactcgtgatttccgtttcattcgtcaatcatgtgttgttagtgacttagat

SEQ ID NO: 22673 - DNA, 483 bp, Glycine max
ctcgagccgaatcggctcgagaataatcgtgttggatcgagtcctccgtcttaccggtgtcaacgaggtggcggagaatggaaaacgccgacgttttcttgggcttacacgacttcctcgagcgcatgcggcaaccctccgccgctgaattcgtcaaagcaatcaaaagttttattgtttcgttttcaaacaatgctcctgatcccgatagggacagtgctgcggttcaagcgttcctcgcgaaaatggaagcggatttcagggctcatccactttgggctggtggctccgaagaggaacttgaaagtgccggtgaaggacttgagaagtatgttatgacaaagttatttgctcgtgtatgtgcttcactgccagatgatgtaaaatttgatgaccaactttctgagaagatggctttgattcaacaatctattcgacctgcacattcggatatcaagccagtatttcagaatgaatcatcat

SEQ ID NO: 22674 - DNA, 757 bp, Glycine max
tccatctctctccacaaggggaacccatttttacgcagtaaccgcagtctgtttgttttcaagttgaacaaaagccgcacaatccttaaattaatagggtgagtcttatttttccacggtgatggacaaggttgtggaggaggttgaaaaggtgaagaaggaatgggatgaaacatacaagaaaacgcaagagcacattgaggcaatcgcagactacggcaaatcagcaagagcaaaagaggagaataattctcttgccagattgaatggaatcgctcaggatggcttggctctcctttcttccttcctcttcaccctcgatcttctcgctcctcagttgccctctgagccagaggtccaatccactcgtgccttgcttcaatcttccaaaaccctaactcaaaatttgcggttaaatctgcggaatgccaatctgcaggcgaaggctaacttgaggaaagctgctcaggaggagagagaactacttctaggtggcggagaagagtccacagtccgcagacgcaatttacaggacaaaagcgggatggacatccgctgcagagagcatcacggaaagccttcgtcgtactcgtcaattgatggttcaggaggttgaaagaaacacaagcacacttatgactcttgatgagtcaactggggtgttgcaaaaggctgaaagtgaatcatagcgggcaccgctcgttgttgatgagaacacgaaatctcctctccacaatgcaacgtcaagatgtcatag

SEQ ID NO: 22675 - DNA, 437 bp, Glycine max
ccttactttgtgttttgttgttcgaaaagaaatcaaggtctttgttttgattccttcgtgcttgcttctggaatctcaacaacaccttttgctctctcttggctggatcagtcgccgttactcaagaaacataacatacaaccaaggtgatggacaaggttgtggaggaggctgaaaaagtgaagaaggaatgggatgaaacatacaagacaacgcaagagcacattgaggcaattgcagagtatggaaaaccaggaagagcaaaagaggagaaaaattctctcgccagattgaatgggattgctcaagatggcttggctctcctttcttccttcctcttcaccctcgatcttcttgctcctcaattgccctctgagccagaggtccaatccacacgtgccttgcttcaatcttggaaaacactaactcaaaatttg

SEQ ID NO: 22676 - DNA, 543 bp, Glycine max
gtttctgtgtctgtttccttctgggtcctccaccatcaatggaacaagaaggacatcaatggatagtgcatcctcatgaagaagaagaagaaattatggaagatggtgctttgataagaaagcaaactgtgtcacataacaagggcaattttattacagatgaattaactttctcatcttcatcttcatcttcttcttctagcaatggcagtgagcatagtaatggagtttgttcagtggtcacagcccccccagatggatatcctgttcagaaagaggaagaagttgcagagataggaggtgttggtgaaaattgcaaccatgttaatggtgatatagtagattatgcagctgctgggcttgcacaagtggcagaatttgcaggaacagaaacaaatggagaggccataagtggtgttgttgtgtcacagaataagaacagtggttactttgatgagcaacaagatgatgaagttgatggagttcaaaatggtgatgctttttggtctgtccatccaacaaatctgggggggagagactttg

SEQ ID NO: 22677 - DNA, 429 bp, Glycine max
gcccttcctccaccactagtactaaccatgttcacccaattcctcatcttctccctcttcttcactcccttcatcttcaccgcagcccatgacacccatgattttgtgcgcaccttagaccgcaaaatgttgggtttggacgaaaagcacgagaagctcagccatttcagattctattggcatgacgtggtgagtggacgcaacccttcttcacttgaagttgtgccaccacccttgacgagctcaaccacatcctttggatcggtgaacatgattgagaaccctttgacattagaaccccagttgaactcaaaattggtggggacagctcatgggttctatgcttccacgtcacatagtgagatcagcttgctcatggctatgattttcgcaatcactgatcggaagtataatggtagcaccattgca

SEQ ID NO: 22678 - DNA, 410 bp, Glycine max
tttctttctagctttcttgcaagtattcttcctcgttcgtgatactaaattggggtcacagattcaacccccgagagattcaatccaatctttcttctcatttctttctggttttacaatttctcacattcaaattctccaccatggctcccaccccttcttcgaaacaaaaccaccccactcaattgaagactccacagtccaagcaccgtctcaacttcaatgccctcaaatcagcgccacaaacacacccttctcccaaccctaattccgttgcaaacaaggaacccccacctgaacacccaattgaagtcattgccagaatccgtgactacccagatcgaaaggacaagcctttgtccgttcttcaaaccaattccaactctagttccattcgggttcgtgccgat

SEQ ID NO: 22679 - DNA, 744 bp, Glycine max
tggaaaccgatgctgatgtgcagaatgatggtgctcagataagaactctaaattctgataaaaaatttgaacgtttgactcttcatgatggtaaaatcaaatttccaaattgggcaagtgacactccttctattctttgggttctggtttgtgccatcagtgacacactcagcagaggatcttcttcagccacaacaaggagagtaagtattgtagatggaatgagaacaatagctctgaaacttgtatttggagcattccacaatcagatattcgtaaggacactagcagtgcattttacatatcctttctatgtgaggacacgtgttactgataaatgcaatgatggtaccctgcttctgcaggtaatacttcactctgaagttaaggctacactggccatttatgatgcctggcttgatcttcaagatggatttgttcatactggacaaactgagggtagacctaattcaagtttcttcccgctaaacatatctcccacttccaaaggaggaatattgtttagtatctgcctagacaacacaaatgcagaagaagccaggaagcaatcagaaagcatattaaatgtcaaatatggaatttctggcgatagaacaattggagctcaccctcctgtcatgaatgaatctactggagttgatggtgccagacaagagttaatcttcaggagtgcaatttactttgcaaaggcctgtgcttgatccatgcctagctgttggtttt

SEQ ID NO: 22680 - DNA, 519 bp, Glycine max
ttttcttgtagtgaatggttctttccttacttttccctattcaatctcaatcatctcttttttctctcttctctctcactctgctcaattcaggacacctttttccttctgatccttctggatattggtttacttgagtgcataatatcagcctgaagctgtacgtaattctggatatctaagccacaccggaaaaatcagcatgcgttggttgggtctttctgttgacgtgttccgccaagttatacagttgaacttgtattgtaaagttattctgtagatgatcatttccaaaaatcctatatttttttgcttctggtctctttgcttagccactgccatggatgccaaccattgtctgatcgtttcttctgataagtatagaattggctaaaagataggaagtgaaggcagattctgttgctttgtattttcagtatgttcttatctcatattggtctctagttctagctgattctgattgtgcttagcttggggtaacttcattgtgatattcaa

SEQ ID NO: 22681 - DNA, 553 bp, Glycine max
attgagtgtcctccttggttttgcttcaattatggctttctcttctttcttttcccattctccattggcattgaagattgatcgcttggggcagactataaaaccttgtggtacagttgagaaggggcaaaagttttctttccctatcagaagtaatggtggtgagcttgaactttgttaccagagtcaacttaatcagagaagtagagtcaacctaatcagagattggagtttcataggaggatcaagaattgttgttaaaccaaatttcgtgagattggttccttttcgaaaagccagtcgtgtctatgcttcatggttgtcaggatcacaacttgctagcagcgcctttacactgggaacaacagcagtgctaccattttacacactcatggttctagctccaaattctgagctaactaggaagtctatggaaagtagtgtaccatatgtagtgcttggcattctatatgcatatttgttgtaccactcttggacccctgagacagttggacttatttttgcaagtaaatacttgctaccagagctgact

SEQ ID NO: 22682 - DNA, 690 bp, Glycine max
agctggtagattccaaccatgggcaacagttgtcatatgggtatgataatgtggtcaaagatgggtggtcaggtaataattccatgccatcatcagatcctaatatgctaagcttttcaacaaagccacttgatggacagtacacaaatgcatcttctcaagaggaggttggttatggtaaaaaaattgctcttaatgttgctgtcagtaacaaagcagcctctgttaaaagtgattattctctggtaaatcctcaaatggcaccatcatggtttgagcgatatggaacttttaaaaatggtaagatgttgccaatgtacaatgcacagaagatgactgctgctaagataatggaccagcctttcattgtagcaaaccaatcagatagtttgcgctttcataattcagtagagcaaattcagagtgtcagtgatgctcagctaagtaatgctagtgaaagtccaatgcctgctttagctgcaaataagcatgcagactctcagttatcgacacctgctgttgaacctgacttacttattatgagaccgaagaagcgaaaaagtgccacatctgaactcataccatggcataaagaactgttacagggttctgaaaggcttcgagatatcagtgtggcagaattagactgggctcaaagtgcaagcagattgattgaaaaagttgaagaca

SEQ ID NO: 22683 - DNA, 588 bp, Glycine max
ctcgaaactgatgagttttaattaaactatgccatggtaatgaaaccgcgtttttcgtgtttcacactttgttcttgccagagtcaccccaaaacaaacctaaatcgccttctctctctctcgttcttttggccttgaaagttgaaagctccaatcttttgcatttttcatttcccttaatatttgattctttgtggagattttgcatttattcactttccttaaagtttgtttccttgtttgcgttttgtggcaatttctgattggttgagagtgaattctgaattctcacaccacctaccctttattctcatattttgtaacctctgatcattgtaaagttttgctctttctgggttttgaattttgccacttccaccctgaaattctacaaggtgtcttttgatgttgggatcatcataagtcatagactatggttttgagggtttctctcattctagttctccttgtgttacactgttcctgcactgtgcaatccatttttgggcatcacaatcacaatgatctcaacaagaatggatcttctcttgctgcagtcaagtttcctgatcatgaacacttcaatgc

SEQ ID NO: 22684 - DNA, 682 bp, Glycine max
ctcttttcaactcaactcaactctctacggaagctactgaagctaactaaagggaaatgagatggccaatggcaacactagtcatcgcttcaagctcttgcttttccttctaactctgcactcttcattcgctgagattttcttcgaagagagattcgaagatggatggaagagccgttgggtgctatccgattggaaaaggagtgaaggaaaagcgggtaccttcaagcacacagcaggaaaatggtctggggatcctgatgacaaaggtcttcagacatataatgacgccaagcattttgccatatctgcaaagatacccgagctaagcaacaaggacagaaccctggtgctgcagtattctattaggtttgagcaggacattgaatgcggtggcggttacatcaaacttctttctggttatgtcaatcagaagaagtttggtggtgataccccttatagtttgatgtttggaccagatatatgtggttcacagacaaagaagctccatcttatactatcataccaggggcagaattaccccattagaaaagatctgcaatgtgaaacggataagttgactcatttctatacatttattctaaggcctgatgcctcttatagtatccttgttgataatcgggaaagagattctggaagcatgtacacagattgggacatc

SEQ ID NO: 22685 - DNA, 297 bp, Glycine max
ccctcgagccgaatcggctcgtgcggctcgagctgaaatctgaagctaccttaagggaactcagatggccaatcgcaacactagtcatcgcttcaagctcttgcttttccttctaactctgcactcttcattcgctgagattttcttcgaagagagattcgaagatggatggaagagccgttgggtgctatccgattggaaaaggagtgaaggaaaagcgggtaccttcaagcacacagcaggaaaatggtctggggatcctgatgacaaaggtcttcagacatatatgacgccaag

SEQ ID NO: 22686 - DNA, 669 bp, Glycine max
tgagcatttctaatggagcaagaaattggtgattcattttctttctttgggtattgcattgcaatgatctgggttcattgattggctttgcgacggcgagcttgggtgctactctgaacgcaaattttcaagatagctatgggtgttgtatatttttttgtgaagaagaattagtgagcataatgttttctgaaagattgggggcagacgaatctcattgtcaagatttacagagtttgagtgtgtcaaagcgacttgtgaggagtgttagccagaagtggaggaagaagagtaacaggaattctggggaagaagctgacgatgtaaatggagtttctttaagatgcttaaatctgtatggacgaggtgggggctgcaaggtaggtgctgacactggtgatgattttggcgattcaagcagtagaaggagatctagtgccagtgacgaaggaaagggatataagccgatttgtggcccagaagaaactgctgtggattgcttttcatatggggtgaaggacaggttctggaggagacacaaccgaaagaattctgagcttgaagaattgtttacaaacaatagaatgcatatttttcttcctgatgatattcttgaaatgtgtttggttaggcttccactgacaagtctcatgcatgcccgtcttgtgt

SEQ ID NO: 22687 - DNA, 1227 bp, Glycine max
atcaaattgcatcatttgcctttattttgatccagcttctgggatttatagcagtgatgtctcaagctgcatggcaggttttcgttgtctttatacctgtgatagcaatcagcgtcttgtatcagcaatattatattccatcagcccgagaactatcacgcttagttggagtctgcaaagccccaatcattcaacactttgctgaaacaatttctggtactacaactattagaagctttgatcagcagtcaagatttcaggaaacaaatatgaaactgactgatggatattctcggccaatgttcaatattgctggtgccgtggaatggttgtgtttccgtttggatatgttgtcttctatcacatttgccttttccttaatattcttaatatctattccacagggattcatagatccaggccttgctggtttagctgttacatatggacttaatttgaacatggtacaagcttggatgatatggaatctctgcaatatggagaacaaaattatatcagtagaaagaatacttcagtatacttgtattccttgtgagccttcccttgttgtagacgataatcggccagatccttcttggccttcatatggcgaggttgatatacaagatttgaaggttcgttatgctccacatctcccacttgtcttgcgcggtcttacatgcaaatttcgtggaggactgaaaactggcattgttgggagaacaggaagtggtaaatccactctcatacaaacacttttccgaattgttcagcctactgccggccaagttatgattgacagcatcaacatctcttcaattggacttcatgatttgaggtctagactaagcatcattcctcaggatccaacaatgtttgaagggactgtgagaaataatctggaccccctggaagaatacagtgatgaacaaatttgggaggccttggataagtgtcaacttggagatgaagttagaaagaaagaaggaaagctcgactccaaagttaccgagaatggtgagaattggagtatgggtcagaggcagttggtctgccttggcagggtgctgcttaagaaaagcacggttttggtgcttgatgaagccactgcatcagttgatacagctacggataatttgattcagcaaactcttaggcaacaattctctggctctacagtaattactattgcacatcgaataacttctgttctacacagtgatatgg

SEQ ID NO: 22688 - DNA, 519 bp, Glycine max
atgatcgattggaaaaatgtcgtcgaaggaaaaaagaggagactttacatggtttgatcaatatgttacagggacatcataatgcagaagctgttaaactatccttctgtacagttaaggttacttgtggagcgtcagcccttgtgaagccagcatgtttgccttctactaaattgaagtcattgaactttggagttggatcaaccatataaaatcttcatcaacaaccttgaccatataacagcctacttccgcaattgttctcagcatgcagacttcgagattgtgactgtttagaatgtattcaaaggatacttcgcggaggaggtttggctcatgctgaggtcgaagttaaccccgatacttggatccttatgatctgaaacaagaattagtgcttggtatagtttgattgggatgaaactgggatatcttcatatatatgtggttgatttttgaaaaacaggctatagtgaaatagaaattcaaatacattttgcaaatttgtatcttgagttc

SEQ ID NO: 22689 - DNA, 377 bp, Glycine max
gccatagactgtgatctgtgatatggaaattgggaactcgtgttatgtaaagatgtgatgtggtgtggctagtgtgaaccgtttgcttgcttcgtgtatgtacattctctccggaggcaccgtcgtgagcttttctctctggtaggtccgtgttgctgaaacctttttgacctttccaataaagcatttgtttcaccctatcaatgagaggaaccattggaataaggattccaaaccccaatatttccaatgccaccagaaaaaccctagttccattttctacatcttccggttttggtggtggcggacgtggtcgtggtcgtggagggtctcttcctggttcagggctgttcaataacaatgaaagagctccagtt

SEQ ID NO: 22690 - DNA, 291 bp, Glycine max
tctgttcagtatctcccacatcactcgaatgtcctcatattcacatgccctcacatagtgccattactgtaaccaaccatggtttccgtcttcaacgagatcctattcccgccgaaccaaacccttcttcgcccctccctccattccccaacctctttcttcacctctcccactcgaaaattccctcgctctcgccctaaccctattctacgctgctccattgcggaggaatccaccgcgtctccgcccaaaaccagagaccgcccccgtggactgcgtcgtcgtcggcgg

SEQ ID NO: 22691 - DNA, 532 bp, Glycine max
ccggaactagaagcaaaagattccttggtgatagaactaaattcaagagtgagttccttaactattgagaacaataattttaggagtaaatgtgatgtcatggagaaggaatacaatgatctaaagttcagtgctgtaaagaaggctgctttggactctaaggttttaagagaaaaagatgaggagcttcatcagctaaaggatcagttcgaacttgccctaggtgaagcaagcaaaaaccagatcgtcattgttgatttatcccaagaaagagatgatttgaaggaggctctagagaatgaatctagcaaggtgaatcatttgaagcatgaactccaagtcacccaggagaatcttgcaaaatcaagaaatgagtctgctgaattggaaaaccttctaactttgtcaaacaaactgtgcaaagagctcgagctcgaggtctctaagctctcgtctgagctcactgaggttaatgaatcgctacagagaaaccttgatgatgcgaaacatgaggcagaaatgctagcaagtg

SEQ ID NO: 22692 - DNA, 370 bp, Glycine max
attcatacatgcttcaggagtacaaggccagttggtggatattttgcagaatcagtcactgatctcagggaattacaggcttttgtacgtatttttggtggttatggcgtagacaggttagacagaatgctaaaagaacacacggctgctcttttaaattgcattgacacctcactacgctcaaaccgagatgtgctagaagcagttgctaccagtctgcatgctggtgatagaatcgaaagagaagcttctgtgaagcaaatagttgatctggaaactgtgattggtttttgtgttcaggctggccttgcactggcttttgatcggctactagctgaggcttctggtgctatacttgaagaaggtgctc

SEQ ID NO: 22693 - DNA, 270 bp, Glycine max
ggcaagggaaaaacacaagacggcgcacatagattttgtcgaagaaacatccgaggaacaaggttctgtgcagagcgggactgtgattcaacgggagtagaatgtcttgcgccaccttcaatgttgcagcttctttgaatcttcatggacgtactaagcaagcagtttctaagccatttgggtcaagaaatcactgtactttccctaagttttcttttctctattctgagaccttgaatttgagtccacttattatagttttggccggga

SEQ ID NO: 22694 - DNA, 301 bp, Glycine max
agggaaaaacacaagacggcgcacatagattttgtcgaagaaacatccgaggaacaaggttctgtgcagagcgggactgtgattcaacgcgtgtcttctgaaactggataattttggaacagggagtagaatgtcttgcgccaccttcaatgttgcagcttctttgaatcttcatggacgtactaagcaagcagtttctaagccatttgggtcaagaaatcactgtactttccccaagttttcttttctctattcatacaccttgaatttgagctccacttattatagttttggccgggat

SEQ ID NO: 22695 - DNA, 268 bp, Glycine max
attccaatatattaaagcaaatgaaggtggttattccatttgaagatatagatgagattcaaaggagtgaacttgcattgattaatcctgctataacaattattcttcgcaagggtgctggtggacatggcgtccctccttccagtcctttggcaagtgctgatggcagggccggatatatgtttgcatcattttgggacaggaataaagcattagagaatcttcagcgtgtatcagaatttcaatgaaatgttagaagctgagaagg

SEQ ID NO: 22696 - DNA, 613 bp, Glycine max
gacaacacaagagaaaaagcgcactgctcgctcgtgttctgtttctctctgtttctccgttctctgtttttttttcagatctcgaaaaatgcagagcgcggctttcactttctctccctctctccctctccgcaacccttcccctaactcttggaggagaccctctctttctctccgtctccacgccaaacacagcaacaacaacaacaacagtaacagcaccgaaggcgttaactccaatggcgtctcttccacttccttcactcgccgatcttggactcttcttccttcttcttctttcaaattcaggcctcttccttcttcacctcctcgcgccgccgaaaacgccgttcccgaaagcgcagcagcacccgtcgaaaacccgctcttcaaaactctcgaactcggcgccttgtttggcttatggtacctcttcaacatctacttcaacatctacaacaaacaggtgttgaaggcgttcattatccggtaactgtgactgttgttcagtttgccgttgggactgtgctagtggcatttatgtggggtttgaatctctataagaggccgaaactcagtgtctatgcttggagcgattttgccgctggctgca

SEQ ID NO: 22697 - DNA, 353 bp, Glycine max
cgtagtttttaaaagctgagagcgtcgaaggcacagccgtcgcgtgggaaggtcccaaaataaattaggtttgattattaggggagggaaaatggatgaatcaacgaagaaggggtctgtgacctcactcgcctccctcttcccagtagaggaggcgcaaagggcggccaagcgcgtcgaagacaccattgccgacaagcagagcgagctcgaccgcctacgaggtttcgccaccgacaacaacagcctcatcaacctcgtccacaagctccccgaacagctctcccacgacatcatggttccgtttgggaaagcagcgtctcccaggtcgtttgattcacaccaatgagttc

SEQ ID NO: 22698 - DNA, 449 bp, Glycine max
gttcatctaaccctaattgatgggtataatcaccaacaatactttatatcgcttggtgcttcttatttatttaagctacaattgcatcttaccattcactcactgataaacgctgaattcattcatagcagcaaacccatctccaacaacatgagttcccaaacacgcaacctcaactttgttctgtttcctctgatgtcccagggccacatgatccccatgatggacatagcaaaaattctggcacagaacggtgttactgtcacagtggtcacaacccaccaaaacgcatcacgcttcacatcaactttttctaattcccaaatccgattactcgaagttcaattcccataccaagaagcagggttgccagaagggtgtgagaatctcgacatgttaccttcacttggcacaggcttggatttcttcaacgctgcaaacagcaacac

SEQ ID NO: 22699 - DNA, 382 bp, Glycine max
ctttcttttccctctctcaattccaagtgggttttatcttctactttttttctttctccaaaagtgttaaaattttaactttgttttgccttaatttgattgttttatgaagtgcagacagtagatttagacacccttttggaaaaggaagtgttttttgagggaaaggagggaattttttgtgtgggagggtggaacccggaattcggtttggttggggtagagaggatgaagattcagtgtaacgtgtgtgaggctgcggaggccaaggttctttgttgtgctgatgaggctgggctgtgttgggagtgtgatgagaaggttcatgcggctaacaagcttgccagcaagcaccagagagtgcctctttctacctcttcct

SEQ ID NO: 22700 - DNA, 348 bp, Glycine max
cacaaacctcgttcccttcgctggtgggacagcgaaaccagtttaacaacatgaatatgctagggaacatgtctaatgtgacttccttgctgaatcagtctttcccgaatggaattccaaattcagggcttggtggccctgggagcagccagcgcagtggagggattgatgctggggcagaggcggatccgctatctggtgttggcagtggaatgaattttggcaatcagttgcaatcacatttgatgaaccctggttcatctggtcaaggtcagggtcaacagttttcaaatgcttctggtagtcagatgttgccagatcaacagcattcgcagcaacttgaacctc

SEQ ID NO: 22701 - DNA, 396 bp, Glycine max
tcgagctaaaaacttctctccaaccaaacgcctcctccgggtcaaacactcaaacctaactaattattattatttctgtttcaactttcaaattagttttcacattacatacacatctcgacagagaagatccgtggacgaaaaaaaactgaaagcaagtgatgacaagtgccttatggaagaaccaaatgactttgtttgttagggtttatagcacggtgttacttcactgaagcagcgtgcattgtgttcgcaggtggcaccaattgatgaggaggctaggaagcattcggagctatgcaaagcatcttcgtatagatggtgtgaaggatactatagctgttgcctctggcaaaggtggtgttggcaagtcaaccactgctgttaatttggctg

SEQ ID NO: 22702 - DNA, 305 bp, Glycine max
cgagccgctcgagccaatttcccttcttagctttcattgccaaaccctagtgtggcctagctgttttctcaatatgagaaaggcttccactctgcaatgctcactttggcgcttcggtgtttcgctattgctggttgccagcttcatttgtgcttcttctgttatggcaacatctgaagtttcagggaatgaagtggataccgatgggaagcttgtaaatgaagagccagcaaaaacaagccttcaaggatatgatgaagaagaaaaatttaaagggctttttccaaaatctattcctatagtta

SEQ ID NO: 22703 - DNA, 442 bp, Glycine max
gctttcttgaaagaggaacctcttgggccagaagacatgtggtactgccctaactgcaaaaatcctcagcaagcatctaagaaactagatctttggagattgcctgaaattcttgttgttcatttgaagaggttctcattcagccgctacttcaagaacaagctggaaacatttgttgatttcccaattaatgatctggacttatcaacatatgtagcccacgggaatagccagtcttccaaccgctatgtgttatatgcaattagttgtcattatggagggttaggaggaggtcactatacagcatttgtccgttatggctatgataaatggtatgattttgatgacagcagggtcgaatctgttagtgaggacatgataaagactcctgctgcctatgttcttttctacaggaaaatttagatgaaaattctagatgcaa

SEQ ID NO: 22704 - DNA, 424 bp, Glycine max
cggatcaagagaagcacaatctaggtatagaattggagtctttgctgggagagatgcctatgcatatcattgatttcttaaaagaaaattgttcaaatggtgaagaatgtggagaggacgagttagagattgatattgatgatctaaaggatgatacactgtttgctttacgaaagcttttggatgactttttgctagagaagcaaatgaatgaaacgacagttgaagtgcgtgaaatagaggtgttgaatgattctggaccaagcaattcctcattgctaccatttaaagatgacgaagaagtggacattggtggagatgaacaccctgtgtcgagttatcctcctgtggagattgtgaaggaggaaacttgtaggatgatcacctctgttagacctcgaggcagtgttacagacgctcctgt

SEQ ID NO: 22705 - DNA, 615 bp, Glycine max
acaaattttctaagcctttgttcatttttcatataattaaacttttatattattagtaaaagtataacttttttgtatttggtttcttcattttaccttattatatttaatttaaagttccagtatgggtttaagcttaaaagttacttttttttgtcgtttgctttatccaaagtaaaagggtgttcatatctagaatttggattccctttgttcagttgtctacatattcacacatttagtaacttgaaccataggataaaaaattagatgactcatatttgtatcttagtaaatcagacttaaaataaacattcggaatcggagttgtccgattttacatctaactagctcgtactaatattctaattgtgtgaatgtgtggaagtatccactgcacttagtaaatcagatttaaaacaacagcattcaaaatctgagtcgtttgatcttcattcaaccgttacaaatgtactaattgcttgaatgtgtgaattatttttttatgggcaaatgcttgtcagtttgttagtttttgttagtgagatgattggaaccatggcctcttcctcccccgttctccctttaaccaccaagtcgatcttataactgcac

SEQ ID NO: 22706 - DNA, 522 bp, Glycine max
agtttgttaaaatcacaattctttccccaacaaaagaacatcctgctccaagggaattccatattgatcacactgttactaatgctacttcttatcagaaatggcaacggtcagaacgagtgcaataaggaattgtcttgtgggcctgacgaaccccttattagatttcccttccaactggtgaaggggatcaaagatgaatgtgctaatcccgggttttgtttatattgtactcaaaaaaatgaaaccatggttgtgctctctacaatagaattccatgtccttttcataaactacaaacgtaactactttaggttgagggacccagaaaattgtcttccgaacaagtttctacaaatcgacaatttttttcttcagcacaaccaacttgaactaggatttcctggacatgaaggaacaaacaacttgagcttctttaactgttcttcagttgggcatagacacctcagacaacaggtttatgtttctgacttttctaatcaacaagatatgatctcctgt

SEQ ID NO: 22707 - DNA, 273 bp, Glycine max
cttgaactaggatttcctggacatgaaggaacaaacaacttgagcttctttaactgttcttcagttgggtatacatacctcagaagatttgtttatggtccttactgtttggattttagtcaacaagatatgatctcctgtccgatttacgtctctagttcttacgacagcgtcctcgatttggatctaacatcctgtaccaggatgtttgacctcatttcgccagctgaggcagacgacctgcagtggaattctttgaatatgagatggtcc

SEQ ID NO: 22708 - DNA, 463 bp, Glycine max
aaataatccctttatgctcggttttgggatgttgcaaattttattgtctcaaatcccaaacttccacaagttaacatgcctttcaaccgttgctgctattacctctttttgttatgcattaattggaagcgggctttctctaggcagtagttgtctcaggtaaaggagaaacaacccgtgtatttggaaacaaagtagggccaggactatctgaagcagataaaatgtggagggttttcagtgctttgggaaacattgcacttgcttgctcttatgctactgttgtgtatgatataatggacacgttgaagtcatatccaccagaatgcaagcagatgaaaaagccaatgtgttaggaatcacaacaatgacaatacttttcctgctatgtggtagccttggctatgctgctttcggagatgacaccccgggaaacatcctcactggctttggattttacgag

SEQ ID NO: 22709 - DNA, 294 bp, Glycine max
gcgatctccgagaatacatagtgacacaaatcaaccacctctgcgcgaaccacattacccagtgaaccctaccgcaccaaaacaaaaccctcgcaaaccctaaccctagacatggacggggacgacgagacctcgggtccgatgatcgacgaaatctacgccaacggtggtggcgacgacggcgacaagcggagccgccgcgcgatcatgagcggcgaccaggtcgacatcgaagcgtacgcggcgctgtactcggggcgcaccaagatcatgcggcttttgttcatcgccgac

SEQ ID NO: 22710 - DNA, 574 bp, Glycine max
cactttctctcttcatgcgtgagtgcttgatcgcgctactttaccagagaaaattagaagtgagaaaaagctatgggccacaacatctaaacaaaacaaacaaacacatctgaattattcctttgattttcaaattctgcttcggtttatttctttataattgatagcgggtgctttggagattttatttttccctttctttttggttgagtatgggttcggtggactgttatccgtctcgtgtggacgatgcggccgtggtgtctctagattcgctgccgttagggttccgattccgacctaccgacgaggaactcgtcaattactacctgcgacagaagatcaacggtaatggtcgcgaggtttgggttatccgagaaattgatgtctgcaaatgggagccttgggacatgcccggtatttttttttctgtctcttcgtccttttacaatcatataatctctagttcgaggtagctatgttatatcaattggtagttatttgcttggaatttgtgtctgtgctagactcaactgaaaaagttagtttatgagaggagcgttatctcttactt

SEQ ID NO: 22711 - DNA, 328 bp, Glycine max
tctcgagccgagtaaaaaaaaaagcaaacttttctctttctctcttcttcatgctcgagtgcttggtctcgctcctttacaaaaaaagctatggaccacaacatctaatctaatctaaacaaacaaacaaacactcctcttaattattcttttgattctcaaattcttcttcggtttttttccctttctttttggtttcattgagtatgggttcggtggactgttatccttctcgtacggacgatgctgccgtggtgtctttggattcgctgcctttagggttccgattccgacccaccgacgaggaactcgtcattactacctgcga

SEQ ID NO: 22712 - DNA, 381 bp, Glycine max
gtcaagcttgctctttgtgaagaactcgatgagaggatgcgggatttgagaaatgagcttcagtcatttgaaggtgaagaatatgatgaaagccataagaaaaaggccatagaggctttgaaacggatggagagctggaatctattcagtgacacatatgaggagttccaaaattacacagttgcgcgtgattcttttcttgcacatctaggtgcaacactgtggggatctatgagacatattgtgtcaccttcagttgctgatggtgcctttcattattacgagaagatatcctttcagttgtttttcatgacccaggagaaagttgggcacattaaacaacttcctgtggatatgaaggctataatggatgggttttac

SEQ ID NO: 22713 - DNA, 279 bp, Glycine max
ggtcaactgggcattggtcactcactcattcccaagtcctaaaccctctgccaatttgaacggcgaactccctcattcttcttccgcaatctccgttctactatctatctgattagaagatagcgtaaattctaagcaaaatattaccgtgttctttagcgtgacccaccttcataaataataaaaccctatgcaactgcaccatcctcgtgttctcttcaaacctctcatcctctctttctctttctgatcacaatgtcgaccttcggagccgccgcg

SEQ ID NO: 22714 - DNA, 535 bp, Glycine max
ctcgagccgtgtgaatagaatacgtgattctattcaattcatcatacattaaaatatcatcgttatcatatcattccagcgtcactctgattgagagtgaagaaggtgggagatggagaagccacaaaacggagaagaaaaggaagaaaccacggcctctttctgcggttacgattctcttcaccgtcttctcaaggataatcttaacccccatcacttccaggaagtcagccgtttgcttactgggcttaattgtggaaaagcacttgaagcagtttctctcccagaatctgcaacttccctctctgcggaacatggttttgacatccaggccttttccttttgtgctgacaaggaactattaagagaacctcggatagtgagagttggtttgattcagaactctattgtccttccaaccactgctcattttgcggaccaaaagaaggctatctttgagaaactaaagccaataattgaagctgctggttcttctggagtcaacgtattatgcttgcaagaagcatggatgatg

SEQ ID NO: 22715 - DNA, 410 bp, Glycine max
ttttattttctgttatttgcatttgaatcaaatcaaattttgattgattgattagaaaatggcgttgaatatgactcaccagatcgggaccctggctgctgcgacggtgccggtgccgaattcgtccgccggagaatcaaccgcggcgatgagtgccgccactctgtggaagccgccggcggcgagtctgaagtgcaaggtcacgaggacggagggcggcgcggaggggctgtcgccgccgctgagcccgtgcaggtcgccggtgctacgggcggatctgtcggcagcgtgtcaggcgttcacggcggaggtggcggcggaggagtacattgccggagggaaggagaaaggagaggggaaggaggggagtgccccctgtttgtgatgatgccgttggacagcgtaaagac

SEQ ID NO: 22716 - DNA, 285 bp, Glycine max
ggagaagaagaagaagaaaaaaacccctccctcacactctttctagggtttcacttcgcgattgcattctcgccgaggttgccttgatatggattctacaagtcaggcataccaacatcgcccccttaccatcaaattatggcctcctagccagagtactaggctaatgcttgtagagcggatgaccaagaaccttacaactccgtcaattttctctagaaagtatggccttcttagcaaggaagaggctgaggaggatgcgaaacacattgaggatgtagcttt

SEQ ID NO: 22717 - DNA, 866 bp, Glycine max
tgctgaacgtacgctttaatttattttaatttcgttgtttacaatttaattcaatttttcaatataatggtgcctcacatgtaaataaattataattggctttatagtttcgtaatttaaacaaaaaggcaatcgctacaattgactgcatgttttagatatttgttcacagtatggtgttatggtttcgtaagtaaaatggtttatttactcgtatgtatacagtttaatgtttttgtgattagaattgaattgaaagtcgcttactattaaatgattcgttaaatatcgtaatcactatacaatctccttcaaaagagatcaatgtagctagctcgctcttgactgtatgatggtttacacccatgtatactgtgacgtattttatattttcatgatttggattgaatttgaagcttcttacaattaaatgactcgttcaatatattgtagtcaggatacaaatctacttcgttcaccataattttgattgatttaattaactattatgttcactataattttgattaatttaattaactattaatctttgagaatagcaataatttttaatattggtttcgagtttttaacttgttcaataagaagttgcaagttttatttatgttcagcatacatttgctatttatcaacctatgtctgtattttaaatcagatgtagaattgtgcctgtattttagggttgattgatgttttgctgccattgtaatatgtagcttttagttgcacctgtacttggttcttttggggatatctgggagcttgatgtattatatataaaatgtgccatggatagcttatgtggcaatgagagtacagatggctgtaaataactgcatgtagtg

SEQ ID NO: 22718 - DNA, 661 bp, Glycine max
caaagttgttgagatcagttgcaaattatcatgcaatcaatgtcgatactctaagggcccaaaatatggaatcttggccattcttcaaccaggtgacagcagatttaacacctttaaatccaaggaaagtagctgtaaaatttgatactttcaaaattggaggcattatacctattaaagcacctggaagagctcgtggggaactggaaataacatatttggacgaagaactgcggttatcaagaggtgataaaggaaacttgttcatcttgaaaatggtggatccgtcttacagggttcctatatgatggcattgtcagcattgcaatgcagtacttgtgttcttcctctctagggattcaaactaccatcatagctcactgaaaatacacgttggagcttatactagcactgccctattattcaagttgacttgaagcattttgggaccgttcttccagacttccagtacaaaagataaactgaaatagtataatcttaatctctgtaatgagttctactctttatctcctcaaggtcggtgaataaaataaaaaaaaataatcattaatattaatgagggcgagtcctggtgcagcggtaaagttgtgccttggtgacttgtgacaattatgtgagcttatcaattttttccctcctt

SEQ ID NO: 22719 - DNA, 648 bp, Glycine max
gattcttgatctttctcacaaccagcttaatggctattttcctgatgagtttgggtcattaactggcctaaaagtgctaaatattgccggaaataatttttctggttctcttccaactaccattgcagacatgagttcacttgactccctggatatatcagagaatcattttactggtcctctaccaagtaacatgccaaaggggctccaaaactttaatgcttcacaaaatgatctgtctggagttgtcccagaagttcttagaaagtttcccagttcttctttctttcctgggaataccaagttacattttccaaatggtcctcctggatcaatcagttcacctgctcaaagttccaagaggaagcatatgaacaccatagttaaagtcataatcatagtgtcatgcgtggttgcgctcttcatattaatcttgcttgctgtcttcatacactacatacgtatatcaagatctccaccagaatatgaaacaagtaaggatatccacaggcatcctcaaccaattatctcggctcctgttcgtacgacagatgggggtggcgctttggttgtttcagctgaggacctcgtgacctcacgcaaagagtcaccatcggagataatcagctctgatgaaaaaatggcagc

SEQ ID NO: 22720 - DNA, 453 bp, Glycine max
ggaaacttggaatttggaacttgcaagcacagccacagcccatggagaacattccagagtcttcatcgagagggacgaaacgccggcgagacgaagattccgatgccggaaacacctcctcactcgaagacgatcttacattcaccgacacgctggtcgcgcttcgaatcatgcgagctcagtttccccacgttcacaagtggtgtggtgatgcttgtttccagagttcggttgagccttttatattgaagtcacagttgtacagtattgtgaaggacagaacacaagtggatagggaattagagtctctaaggagggacaaagtactgcgtgttttcaaattaaatactggacaagatgatcatgccataatgtttttggatgactacctaaaccagatagatcatgttgtgaaaagaatggaagaaaaaaaaataggggaatgtgaggctt

SEQ ID NO: 22721 - DNA, 456 bp, Glycine max
atcaatctcaagagacagatcatataattttttttagcaaaatccatggcagatcttcaagaaaaactggatgctctgaagggtcttgttggtgtgctaaataacatggatgagggtgaaactcacaacaacaatgcaacctcctcacccaataattcccatagtcctgctcctatgcctggaaggaatcgctctgttggaaaatataacaacagtggcactcagaagattaaaggtctgagtaaccaaaccggcttcaccgaaggcaacgctaacggagccatcaactttggcaatttacatgcctaaataaatcaatgtaccaagatcttgaaatccataaataataatgtgacgtacaaattaaaataagagcttcacagtttgagtgtggatccaatattttcagctttttattatatataaatatatgacttcttagattaacgtgcagaa

SEQ ID NO: 22722 - DNA, 519 bp, Glycine max
ttttcaagcaagtcgcgcttccgccatactgactctgcctgctactgagttgtgacttgggcgaagacatgctgagaactctagttgtgaagcgcagccttggtcaccactggcactcgcattctcagcacctccgactccagcggcaattctcatcatccccggagcccaactcctccgtggatgcagaaacccgcaagtacgcgggctatgctgccctcctcctcttctgcggcggcgccacctactacacattccccctcccggacgacgccaagcacaagaaggcgcagatcttccggtacgctccgctgccggaggacctgcacacggtctccaactggagcgggacccacgaggtgcagacgcgcaacttcctccagccggagaacgcggagcagctggagcgagagctgagggaggcgcggagtcgtatccggccggtggggtccgggctttcgccgacgggatcggcctttccaggaccgggatggtaaacttggctctcatggatgggat

SEQ ID NO: 22723 - DNA, 366 bp, Glycine max
gtacaactcccttgtttgtgagttttgcgaagccgaagacatgctgagaactctagggctgaggcgtttccttggtctccgcctccactcgcattttcaccacctcctgcttcggcgatgctcatcatccgcggcgcccaactcctccgcggatgcagaaacccgcaagtacgccggctacgctgccctcctcctcttctgcggcggcgccacctactgcacattccccctcccggacgacgccaagctcaagaaggcgcagatcttccggttcgccccgctgccggaggacctgcacacggtctccaactggagcgggacccacgaggtgcagacgcgcaacttccttcagccggagaacgcgga

SEQ ID NO: 22724 - DNA, 572 bp, Glycine max
agaggatccagcacacagacagaggctgtgaaagagagagagagagagagagagagcaaatggcattctggtaaatatggccccagtcccatcccagaaaacaactttcgtttgtgtgtatccgttgaaaccccactttccactcttctcaacgccaacgctggcctctgttccccttcttttcaatgcctataataataacttgtcctattttttcaaccatgtcatcccagtaagcaatcgctgttagtaacatagcctctaacagaaaaacaagtagtcatcacatgcccacagcaatgacagagtcagggccaagtgtgagtttgaagcttcttgctttagtagctattctagtcgtcttctcgctggtgattctgcttctgatcttcttcctctgcttccgaggtagccgtagctgcaagaagcggaacctggccatcaagcacagctcaggtagcatccctctggtttcgaaggagatcaccatggtcagggcctcggatctcacccctgccaccacggccattgccgttgacgtggacggtgatgatccgaagaagaaggagtcg

SEQ ID NO: 22725 - DNA, 466 bp, Glycine max
gtggctatagaatagtccacttgtcttgtttcacagcgaaccaaatctctttaattgatgatttccgctttcaggataaggcaacaacggaacaaaattttctgtgttccaattttgctttggacacaacaaaacggtagcttgagctttgaaacatagcagcattcacttttcacgagagaacaaacaaggccttcttcttcaccttttcacattgtgttgcatcatcaccatccatttccattgttagctcctcttaatggttatggcaactgtggggtctgaacctgcttgtgcaagaacggttcatgatgttgcatcttctttcagctctaaatggcagcactcttctacggttaagaagcagccacgtgctcgaattcttcaatgttctctcaggattagagcttgtagttccatggctaacaaaaaggatatctacaaacaagtgggtttattttctcta

SEQ ID NO: 22726 - DNA, 283 bp, Glycine max
tatgctgaaggagaaaagagtgcaaatttgagaagtagaagagggaggtcttgttcaattttaccgcatgctagtgctaagatggcatgtgatcaaacacacagattgatctctactaacttagatgaagtgagtcaaggtgaaagtacacacaatagaggagtagctaatgattctcctcgcatccttaatgttcatgatgtgtatgaagttccacaaactagtgaaaatcatgaagtcagtgaacatgggggaaaaaggtttgagaaatggagttctgatg

SEQ ID NO: 22727 - DNA, 309 bp, Glycine max
cctcgagcgaatcggctcgagtaacaatagcagaaactagaactatactaagatgcagccattgcaagaacttgcagtgtccttggctgttgattatttgcttccacccttcgtgcgagctgtagaattcagtcatggaggttccaaaagatgctgcagacatgaaagacaaacttgatgggattcaagccatgattcatgatgtggacaagatgggcagcagctgaagaaggcaactcacgtgatggtctcaaagcaaaggtgaagcagctggtggaaacatctttttgcatggaagatatcgttgat

SEQ ID NO: 22728 - DNA, 444 bp, Glycine max
gtatagagacgaggagccgaagctggagtttgaagatcccactttgtatcattatgcaatattctcggataatgtaatagctgtgtcggtggtggtgagatcagtggtgaagaatgcagtggaaccatggaagcatgttttcatgttgttacaaacaggatgaatgttggggcaatgaaggtttggtttaagatgaggcccattgacggtggtgcatttttagaggtgaaatcggtggaggaattcacattcttaaattcatcatatgtcccgatcttgaggcaacttgagtcagcaaaaatgaagcagcggttcttagagaatcaagctgataatgccacaaatggtgcaaacctgaaaaatacaaagtccctgtccatgttggatcaccttcgattttatttgccagagatgtatcctaacttgtataagatcttacttttg

SEQ ID NO: 22729 - DNA, 301 bp, Glycine max
ctcgagctcgtgggaattttcgggggctagaagttggctctgtaggagcatttcttcaagtccattgcgggtgtgtgttgttggaagtggtcctgctggtttccacactgccgagaagatgttgaaggctcaccaacaagcacaagttgatatcattgacaggttgcccacggcttttgggttggttcgctccgttgttgcacccgatcaccctgaaaccaagaaaacttgcaacaaattgtcatcaaccagttttcaaaggtggcacaacatgaacgatgctcatttttggggaatgtga

SEQ ID NO: 22730 - DNA, 397 bp, Glycine max
gtcaccattgctcaccggttaccttattcttcggttaacttttattcgtacgagcactacaagaagttgctaaagatggttccgggacttcaaagtcatagggataatgttagtgcagacctttgcgtacattttgttggtggtggcctggcaggagtcactgctgccacaactacttatccattggatcttgtaagaacacggctggctgcacagacaaattttacctactacagaggtatctggcatgctttacacacaattagcaaggcagagggaatatttggcctttataagggacttggaactacactcttgactgtagggccaagtatagctatcagcttctctgtgtatgaaaccgtgagatcttattggcagtcaaatagatcggatg

SEQ ID NO: 22731 - DNA, 304 bp, Glycine max
cagacttttctcaaattcgctgaggctccctcacacacacaccccttcatgcttcccagcaccgacttccaccgactctgcctcctcctctttcgcagaatcgttcccgatgccctcctctcggtgtatgttagacctgctggtagttatgtgatgggttggtgctgtggtgggttgcactgtaccctggagtggcagaggcagagggcattgtcattctcgtgggtcattttaatattcctgcaggcttgcgtgctgccaaggtcacgctttccaattcgcaagttaatgttgtccctgaatg

SEQ ID NO: 22732 - DNA, 341 bp, Glycine max
tgcccaatggcaactctctcagctctttccttcacaaacatcatcaggactttcccactacacacccaccgtctctctttttctttcagctccaaactcacgtgcagcaggtcctctctcaaacacgaccaacaaactgactcttgttcctctaatactaccacggtttctgttgcacccgaaaacgattctgagacccagcagcaggaaatggcttcgaagagcgacgaggagtttaagaagttcatgggcaacccttccatcgaagccgctataaagctcgagaagaagagggctgacagaaagctcaagcagcttgacagagaaaccaccaacactaa

SEQ ID NO: 22733 - DNA, 435 bp, Glycine max
gaaaatgctgttgataacttcagagctggaaaaacatgggttttgattgctactgatgtagttgcccgtggcatggatttcaaaggtgtgaactgtgtgatcaattatgatttccccgattctgctgctgcttatgtccacagaattggtcgttctggcagagcagggaggactggagaagcaattactttttacacagaagatgacattcctttccttcggaatgttgctaatcttatggcagcatcgggctgtgaggttccttcctatctcatggagttgcgcaaaaagaagtggaagaagcaccgacccaaaagagattcaatctccacaaaaccagacctatagccctgtaatagcatagaatgacaacatgcttttaaccttgaaatttccagtggtgtttagtatttcttaaataggccgggcagccta

SEQ ID NO: 22734 - DNA, 346 bp, Glycine max
atccattcaagacattcttcctataatttctgtcattcttgagctcccaccagaatcccagcagcaattgcttcaattgccagttaacttggttagaaagttaatatctcgtgctgctgcaagaactgtaaggagggcctttttataacatggatgaagtagctgaagctgaaatctttttgtacttctcaacaagtgaccggagaacattgaaaaataaataaggctttatgacaaggcctttaatccttaatgcttcaatacactgttgattcaacaacatattcttcgctttcaatttcattttttttttattaattttatcttcgttgtaagtatttatagg

SEQ ID NO: 22735 - DNA, 337 bp, Glycine max
ttgaaatttaacacaccctccaacccttcaaaccagatgcattcataattcatagcagccactggcaccgctcttcatcttcaccagcccaacatggccacaatccagtgcgccacaaccaccctaatactgttactcctcctcctcctcatcataccaagatccaattcccaacaagagtacgtatacaacaagcaactagactgcaacaacgaatacaactccacaaagggtaacctctgcaacagtctcccgtcatgcacctcctacctcaccttcaagtcctccccgccggaatacaccacccccgccgccatctccttcctcctcaactcca

SEQ ID NO: 22736 - DNA, 363 bp, Glycine max
gggaaaacatcaaggccttcaaccttgccggaatggggtgcagtgcaagtgttgttgctatcgatgtggtgcaacagcttttcaagacttacaagaactccgttgggattgttgtgagcaccgaggatctcggtgcgcattggtactgtggtagggacaagaagatgatgctctctaactgtctctttcgctctggtggctgctccatgatgtttacaaacaaggcttctctcaagagccgtgcgatattgaagctcaagcacatggagaggactcagtatggtgctgatgacgaggcttacaactgctgcatacaggtggaggatgagttagggtattcaggttttcgactcaccaagagtc

SEQ ID NO: 22737 - DNA, 1559 bp, Glycine max
ggatgggtcatttcacaaaaggctagataaagctggaatatatatggttgaagacttcttaagacttgtggtcagagaccctcagagattgcggaatattcttgggagtggcatgtcacataagatgtgggatattcttgttgagcacgcaaagacctgtgttctcagtggaaaactttacgtatactatcctgaagatgcaagaaatgtgggtgttgttttcaataatatttatgaattaagtggcttaattgccaacgaccaatattactcagctgattctctctctgagaatcaaaaggtttatgtagacacattggtgaagaaggcatatgataattggatgcatgttattgagtatgatgggaagtctctgataaatgacaacgaggataaggctttggataccactcattcttaggctccaatgacttcccatgaatattcaaactcacttcagcagagatccatcccagctttgccacttccagtacatcctggccagccctcaatggattcaggagtaacacttggaggttatcatgatgggacagcttctagattctccttgcaaccacatcctaatcttaattcttccattcagtttgatgataatgcatttccacgacaaaaccagttgatgagtgcttcacaccatgcccaacttccaagaaatgaaaatgggcagactattggtcctccacaatcatccacgcacggctttgagcctgtaagcatttcaaatcctacgtacagaggagttgaagagtacttcccagaggaggaaattcgtattagaagtaatgagatgctagaaaatgaagatatgcagcatctactccgtatttttaacatgggaggccaaccacatcccacctttaatgctcaggatgatggataccctagttcatctacatacatttctgcaaaccccatgggctacaattttgatgatgaaccaaaccgctcctcaggcaaagctgttgtgggctggctcaagctgaaggcagctttaagacggggtatttttattccaaagcaggctgctgagagacctggcacaacttggtgaattggatgacccatagagatcttggggggcactactgatctttagtgatctgaacaataatgtttctggttatagcatccaaggcttcttagtctttcctgacattcagaattggtgtcatgctgaaatctcgtagcaggagcaaggatatgaaatctggactgaattatttggtgcagacttaactcaaagattcaactgtcccttgatccataaacagttgggcatagactttactgctttgcttgtgatgttttcactaagcattccggtatccaagttgtaaagtctctgatggtcaacttgtttttaaacttggcaagctccaagtgaaattcacggggagctactaggatcgttactacatttatcaggttggatttaattctgaatagtaagctagctaaatgattttcaacccaactgaagtttaatgttttaaagttgctggggcattataattaatttgaactttttatgggctttc

SEQ ID NO: 22738 - DNA, 294 bp, Glycine max
ctttctctctttcttctcttctcttctctgcaacacaatctctctccatctaggttcagacactgtcattcttctcctgcaggaaaaaaaaatcagatctaccctctcacaatgttgcaggagatgtggaatgctcctcccggtctcagaccctccaagtctgcaccttgttctccggcaaagcctcttggggtcgttccaagaacgcgttctgagtccttccacgtggctcacaaggtcccagttggtgacactccttatgtcagagccaaaaacgttcagttggtggataag

SEQ ID NO: 22739 - DNA, 685 bp, Glycine max
aggaactcaaaatgaaatgaaatggaaatgtaagaagtagtactgaaaactgaactcaactaactcgtgactcgtcagagagaagaaaagaatatcgttcgttcgctcttaccttcttcaccttccttcctctctctctctagagaatggaaccggaatccggaacttcgacttctcggaatccttctcagttgtcttgggtgaatctgtctaggaatttattattagcgtatcaaagctttggtgtggtgtatggagatctgagcacttctcctctctatgtcttcacaagcaccttcaaggggaagttgcagaatcaccatgacgaggaaactatattcggcacgttttcgttgattttttggacccttactttgattccgttgcttaagtatgtattcatcctattgggtgctgatgacaacggggtaaggtggaacattcgctctttattcgctgctctgtaggcatgccaagtttaatttgctccccaatcaacaagcagctgatgaggagttgtcatcctataaatatggtccctcttcacaggctgtagcctcttctcctctgaagacgtttctggagaagcataacaggttaagaacagccctgcttgttgtggtattgtttggtgcttgcatggtcattggtgatggtgtgcttactccagcaatttcggttctag

SEQ ID NO: 22740 - DNA, 457 bp, Glycine max
acaatttaaactatggtcaactatccgagaagaacaaatatgtcgtttcacgtctgatagcaaagagagattccgtggtaatgctggagttgttgtgacgacatataatatggttgcttttggtggtaagcggtctgaagaatctgaaaaaatcattgaagaaataagaaacagagaatggggattgctcctcatggatgaggtgcatgtggttccggcccatatgtttcgtaaagtcatcagtatcactaaatctcattgtaaacttgggctcacagctacacttgtcagagaggacgaaaggattacagatctgaacttcctgattggtcccaagctgtatgaggcaaattggttagatctagtaaaaggtggatttattgcaaatgtacagtgtgctgaagtatggtgtccgatgacaaaagagttttttgccgagtatttgaagaaagagaac

SEQ ID NO: 22741 - DNA, 513 bp, Glycine max
ttgggatttggcttgctcttagaaaaatctatgtttcttttgttttgaattcaatactcagtgctttgattgtgcattttgcatcagaagcaggcactgctgagtcacagtatggaggccaaaagctcaaaccagataaaagaggaaagcaatgattccaattatgataggaaagctgaaataaaagcatttgatgattcaaaaactggtgttaaaggtcttgtagattctggtgtgaaaaagatcccacgcatgttcctttccggcatcgacataactgaaaacgtagccagtgactcgaacttgagtattcctgtcatagacctacaagacatacataacaatcctgcactgcataactgaagttgtcaccaaaattcgaagtgcatgccaggagtggggatttttccaagtgatcaatcatggaattccaattagtggtatggatcaaatgattgatggaatccgaaggtttcatgaacaagatactgatgtcaggaaacagttttactc

SEQ ID NO: 22742 - DNA, 297 bp, Glycine max
atcaacttgtatcttaagaactgaaatcgcacattcaccctgaacagcatttcaaattttaaaattagagatcaaaataaaacaaaaaaattacaagatataccaccataaaaaaagtatatactttttgccttgaaaacttacaagatataccaacattaaaaaaaagaaaaagtatatactatatgtacaaggtcactcccaaagtactggtttttccttaaaaacaaatggtaaatcaaaacaattaccgcaacacattactgtttccacctcccccaagtgcaaccatggcaa

SEQ ID NO: 22743 - DNA, 518 bp, Glycine max
cttagagagtgattttcgaagatctgaaggtcggatggctccaacatcattcatcccatatggcagcattggattatcttgtctcattagagagtgatatttgttgttcccacatatgatggaaatatggccaaagtggttgagggccaccgcagatatcttgggttcaagagaacgattttgttgaacagaaagctcctagtcgaattgatagatcagtacaataatggagtgctgaactgggatgaattctcttcagcggtgaaggaagctcatgccgatcgcatgggtagccaaacaaagaggtttgtaatccctgagaggccaaaagaagaggattatttctatgccaacccacaggagtgtttggaacaatcagcagatgaaccgttggcgttgagtagtagtacgtgagtgagtgagtaatatgttgggaaatagtggaatttacttgtgccatcatctcctggtgcacttggtttttctaccacagatagtttttccacgcattttagcga

SEQ ID NO: 22744 - DNA, 373 bp, Glycine max
aacagttgctcctcctaagtcctaacctaaacttctttccacacaacatacgtcttcacattctcaccctcccattcacacatcactcacaaatcccattgacattatccctttcctcaatcacaaaaaagcctctcttatatctcattattctccgcttgcaatcaccaaaggcaaaaaaaataaaggggtacgttaacgatgaagcgcgctttctccgtcgacaccgcggaggataacaaaaacaacaggaacacgaaaaagacaaagcttgattcggaagaggaagaggaacacgggacacgtggcggcagcgtgtacttagacgacaacgttttgttcgaggtgctgaagcacgtggacgcgcggtcgt

SEQ ID NO: 22745 - DNA, 1039 bp, Glycine max
ggccttagtataaagtataaaccctagtaatcgtttttctcggagttagacagagacggttccctttccagtgacaggcaatagctgcaagcaactcaatctcagagcttaagcaatggcggcgaagaagcatgacgccggagacaccaaaaagagaaagcgactcaatactgaaactcacgaagctcccaaggcttcgaagctcgttgcctcaaagaagcacaaaccagactccgttgctaaagacaacaagaacaagaagacggctcctcttaccggccgagaacgtcgtcttcattccaaggaactagcagatgctagaaaaaagaagagaaagcgacatttcactcttgagcaagagcttgcacgtctgtgggaaaagatgagacgtcacaagattgctaaagaggacagagctaagctagtgactgaagctttacgaaagatgaaggggaagattccagagattgtgggctctcacatctcatctcgggttcttcagacttgtgtcaagcattgttcacaagctgaaagagatgcagtatttgaagagcttcggccacattttctaactctagcattcagcgcttatgctgttcactgagtgaagaagatgctcgacaacgcttccaagaaacaactagcagcgctttatctccactctccatggtcatgttgctcctcttcttcgccatatggttggatcagttgttgttgagcatgcttatgagttcgcaaatgctgcacagaagcaagaactgctttcggaattatactctacggaacttcggttgtataaggatctagtctcattgaaagagagcagattattagatgtgatgtccaagttgggtctacagaaaggttcagttctgcgacacatggcgtcagtgattcagccaattttagatgaagggatagttgaccactctattttacacagagtcttaatggaatattttagcattgctgataagtcatctgtcacagatataatccaacagttatcaagtccactcattgttagaatgattggtac

SEQ ID NO: 22746 - DNA, 542 bp, Glycine max
ttctttgcttcagtgtgaagagtagaaagaaggaaggaggaaaggggcatcggagagagagaaagaaaaaagatgagcggtggtcgactttgtacattgcttggagaattagggtacgaaggctgggaagcattggaccctgacagcttcgaatggccctttcagtacgaagatactcgccctcttctccactggatctgctccaatcttcgcccctccaacgtcctctctctcggagaactcaaccagtatgagcagttcaagcaagaagggaagctgttagagggcgaggacttggactttgcttacgacagcatctctgcattcgctgataggagagacaatcaggaggccgtttttggcaccgtggcaggattgaagagttatcaaggaggcgactttggcgtatagagaggaggctttggccttgcagaggcagctgaggcatctgcaatctcagtttgacatgctttcgggccaggcctccaccttgacacaaggaagacgagcacgccttgctgcaacctctattgttaatggac

SEQ ID NO: 22747 - DNA, 284 bp, Glycine max
cttgaaaattcattttcgagaacctgcacagtttctttcattttttcttgttacaaggtcatgacaaaagacaacaatggatacctcagtgccctacactggggcaataagaggcaccgtgcataagcctcaagcgaacctaggggcagatcagaagttctcacttggtaggtcgaaaacccgaaagggcggcctaggaaaaattggggttaaaaaaaaaaaaaaaaaaaaaaaaaaaaaaaaaaactaaaaaagggggggccccccaataattaccccccccc

SEQ ID NO: 22748 - DNA, 474 bp, Glycine max
caattgttactattaagctccgttgtttcctgaagctcctccaacagaagcaacaaagccagcaaagaaaaaccaaaacctcctttccttaaaaccaatccatccaaatttcgttactatcttcgcttccaccaacccccaataacaaaattaaagcccaaacccacattaaccctcaatttcccaaaccgatcgtgctctctcgtgagagcatggtctccgctgaaaaaccaatgccagaaaccgaacacgcggcggcggagaacaacaccaacaccgccctgtttggaaaatacgaggtcggaaggctcctaggatgcggcgcgttcgcgaaggtttaccacgcgcgcaacaccgagactggccatagcgttgccgttaaagtcataagcaaaaaaaagctgaactcgtcaggtttaacctccaacgtgaaacgcgagatttccatcatgagccgtctgcaccaccccaaca

SEQ ID NO: 22749 - DNA, 504 bp, Glycine max
gcaccaacttataaaccataacgcgattctccaacgccgttgttgtttcctgaaacttctcaaacagaagcaacttaagccagcaaagaacaacctttaaaccaattcattcaaaattacgtttcttgcttcgcttcccccaacccacaatttcctctcaatttccctgatcctatttaaaccaactcacattaaccctcaatttcccaaaccgatcgtgttctctctcacgagagcacggtcgccgaagaagtaagaaaaccaatgccagaaaccgaaagcgcggcggcggcggcggtggaggaggagaacaacaccgccctgttcggaaaatacgaggttggaaggctcctaggatgcggcgcgttcgcgaaggtgtaccacgcgcgcaacaccgagactgggcagagcgtggcggttaaagtcataagcaaaaagaaactaaactcgtcagggttagcttccaacgtgaaacgcgagatttccatcatgagccgcctccac

SEQ ID NO: 22750 - DNA, 308 bp, Glycine max
cggacatcggctcgagccattctaaagttctgagtgctatttgcttattgcattgccattgccaagtaatggcgctactacgtcttgtttgcttaacttcaacaaatcagttatcaactcaatccacctctttctcttttcttcgcaaaacaccccattctcaatccatccatatcgatccctcttcctttcactttccacgcctatcccttatcacaaccactctcacacacgcccaacaagccaaccctgttgtcgccgaagaagaattttctcgcaccaggttactcgctcagaacgtgccctgg

SEQ ID NO: 22751 - DNA, 556 bp, Glycine max
cttcagcacaatggcttctctggcattattccttctcctgtgacgcctaaactcatggcattggacatttcctttaacaacttttctggcagcattccaccagcttttcagaaccttagaagactcacttggttgtatctccaaaacaattctatatctggagctattcctgacttcaaccttccaagtctcaagcatttgaacttgagcaataataacttgaatggctcaattccaaattccataaagacatttccttacacttcttttgtaggaaattctctcttatgtggtccacctctcaatcattgctctacaatctccccttctccatctcctgccactgattaccagcccctcactccaccaaccacacgaaaccaaaatgctacacaccataagaaaaactttggcctagctactatacttgctctagtcattggggtcattgccttcatctctttaatagttgtcgtgatctgtgtgttctgtttgaagaagaagaaaaacagcaaaagcagtggcatactgaaaggaaaggcttcttgtgctggga

SEQ ID NO: 22752 - DNA, 282 bp, Glycine max
cgcccgctctcattcttctccctaaaatcaaatcatggccaccgccacatcccaaacccttcgattccaatctccgtcactctctctctcctcgaagctccccctctcctccgcgttctccgtctcgctccgccctcgccaccgcggctcccgccctctcgtgctagtcgtctccgccgggctcgacgcgaacccacggtgctcgtcgccgagaagctcggagacgcggggctgaagctgctcaaggacttcgccaacgtcgactgttcctacaacctcagc

SEQ ID NO: 22753 - DNA, 435 bp, Glycine max
tcacaacaaagtccttcgttggcggagcctctcttcctctcagacggttcttccttctggaatccttctctttttgctctaccaggtctaaggagtgaaccacacgcttcagcatacctgcacctcaaagttgttatgcactctgaatgtttctgtttcaccatctcttttagaagctagaaatgggtagaggatgcgcgtttgccatagcaaaacaatttaaagagagtccgcatagatgcttctcagtttcctaaggccggctttctctaaggcggcgatgaatacgaagttggtgcatgtgaaaacaaagggaaaccaatggcttttattcaagtgaggacaaaagaagttcatagaatggatattttgtgcatcaactctttcctcagaattaacaccactgtttgataccgtaccatgcctgcacctcag

SEQ ID NO: 22754 - DNA, 612 bp, Glycine max
actgccaaaggatgtttggagtgatagaattcctgattttcatcttctggatcaagctgaacaatctgctaaaaggcaaaagctgaaaatctgggagaattttgttgaaggagaggaagtatctaatggtgcagcagttgagaacaaacagcaagaagtacttaaggtaattgttacggaagtcttgggtggtggtaaattctatgttcagacagttggagatcaaaagattgcatccattcagcaacagcttgcttctttgaacctaaaggatgctcctgtgcttggtgctttcaatcctaagaagggtgatatagtcctttgttattttcatgctgacaaatcttggtaccgggcaatggttgtcaacacaccccgaggaccagttgaatcccccaacgacttgttcgaagtattctacgtcgattatggaaatcaagaagtagtaccctacagtcaactacggcctgttgatccatctgtgtctgcggcacctggtcttgctcaactgtgtagccttgcatacatcaagattccaaacttggaagaggattttggccaagaagcagctgaatatttgagtgaactcactttaaacagtggaaaagagtt

SEQ ID NO: 22755 - DNA, 382 bp, Glycine max
  unsure (1)..(382): unsure at all n locations
tgtatactgggaagaagaagacaattgaagctgttcagaggctaaaattgaattttcctgcaatcccaatctacgccagagctcgtgatctcaagcatcttttagatctgaagaaagcaggtgcaacggatgccattttggaaaatgcagagactagcttgcacctgggttctaagctgctgaaaggccttggtgtgatgtctgatagatgtggcatttttgagtcagcttattagagattccatggagctccaagctcaagaaggaatcggccaatctgaagatcgcggattagatattatgaaaccactgcaggtgaaagttgctgacgtganggaagcacatgtactgacggcaacaacttcaccagaaactgaattat

SEQ ID NO: 22756 - DNA, 1946 bp, Glycine max
tctcgagcgaatcggctcccgtcaaaagagagaaaaaaaataaaaagaaattttacaaaaatgccttcctcttccaccaccatagtctccaaatgcgtgatccaccccgaccagaaatcaaacatgaaacccttgagactctctgtttctgaccttccaatgttgtcatgtcactacatccaaaagggcgtgttactcaccgccccgccctcctcttttgacgacttaatactttcttttaaacacactctttctatcgcgctctctcactttcccgctctcgcgggaaggtttgagaccgattccaacggttacgttaatattgtatgcaacgacgctggcgttgattttattcatgctaaagcaaaacacctaactttgaacgccgtcgtttcgccgtccctcgttgatgttcacccttgcttcaaggaggagtttttcgcttacgacatgactatctcctacgccggccacaacacacccctcgccgccgtccaggtgacggaactcgccgacggagtcttcgtcggctgcaccgtcaaccactccgtcaccgacggcacctcgttttggcacttcttcaacacctttgccgccgtcaccaaaggcggcgccgccaaaaaagtcctccgagcaccggactttactcgcgacaccgtcttcaactccgccgccgtcctccccgtcccctccggcggccccaccgtcacgtttgacgtaaaccagccactccgggaacgcgtcttccacttctcccgcgaagcaattcagaaactcaagcaaagagccaacaacaccgtcaacaacgaactaacggaagttatgggaaaacaagtaaacgacggttggaaaatcgttaacggtaacggaaaaattaacggtaacggaagaaacgagatctcgtcgtttcagtcgttatcagctcagctctggcgagcggtgacacgtgcgaggaaattcaacgacccagcaaaaacgtcgacgtttcggatggcggtgaattgccgccaccgtctggagccaaagatggacgcgttctacttcggcaatgcgattcagagcatcccgacggtcgcgaccgtcggagaaattctctcgcgcgatctgcgcttctgcgcagatcttctgcaccgtaacgtcgtcgctcatgatgacgctacggtgcgccgcggaattgaggactgggagagtgcgccaaggctgtttcctctcggaaactttgacggcgcgatgatcaccatgggaagctctccgcggtttcccatgtacgaaaacgacttcggctggggcagacccgttgcgattcggagtgggaaagcgaacaagttcgacggaaagatctccgcgtttccggggagagagggaaacggcagcgtcgatttggaggtcgttttggccccggcgaccatggcggggctcgaaaacgacatggagtttatgcaatacgtaacgcaattcgtttgaataagtttgttcatgaagtttcggcacagtagtagtgatagtgaaaactgggaggagggagggagtgaaaaaaaaattataagtcggtgatgaaacgacggggaaggtgggtgggtgattgcacgacaatagtaccatggggtgtgggcgtcgttttgtgtcagtcaaaggtcaaacgttcggggagtggggtctcttttttaggctgtgtttgagtgtttcggtggttggcccaaatgatataatggtttttctgtacgtgattccggggaggtttttcagtcttcacttttcaggtgaccaataacaggccgaaataataatatggatgatgatgatgatgaaaaatggaaattggaaaataaaagggaagtatgttgaagccaaaataggcttatggaatttggagtttttgtttagctgttttgaaagtgttcgtccagtgccgtttttttttctttgtatacaataaaatttatttt

SEQ ID NO: 22757 - DNA, 277 bp, Glycine max
ttcagaagaagcattacaagaagcccagtgagaggtaggaagggaagaagtgttagtagaagccccgtgagcactcacaatcatggaagtatcagtagaagccctgtgagatctcgtgatcatagaagtggcagtgcaagctctgtaaaatccctttctcagggccgtcgaaggagtttacccagagcaccttcgcgaagatcaatcagcagaagtcccgtgaaatcacatggtcatagaattctcagtagaagccctgtgagatcacgtggtcata

SEQ ID NO: 22758 - DNA, 367 bp, Glycine max
ctagacgtgaacagccttcacaaaatgacgagtgtgatagtagattaagatggcctggtggtgtttatggaaggcaagattgtatttcagagattgattctaggaattgcagggtcagggactggtctgttgatttctctgctgcttgtgtcaaccttgatagttccagaatgccagttgataacctttcacagaggagtcattcaaatgagattgccagccatttgaatttcagagagcactcaggagaaagtgttgctggggacagcagtatatatacaaaagcttggattgacacagctggtggtattgcaattaaagaccatcatgccatagagagatggcaatctcaagcagctgcagctga

SEQ ID NO: 22759 - DNA, 324 bp, Glycine max
  unsure (1)..(324): unsure at all n locations
ataaaacctccctctctcaattacaaaaccgcatgcctgatctcctttcagggttccactgtctgctcacccttgaanaaacaaaaattcagttttggaacttcccctgatctaaaaatctgaactttttggcatttctgtcaattattttgaattctgtttctgggtttttgttttcatgggactgtgtcatggaaaacccattgaaacctcacaaagtgaaggtgggcaccacgctttccccggcggcgagaaagatgcggtggtggtttcggcggcaagtccgaaaaccgccacaaaaggctcaaagtttccgttttacag

SEQ ID NO: 22760 - DNA, 493 bp, Glycine max
ttgggcttgagtcaaactaaagaatatttcatgggcaatcacaaccttggctttgatgcgaactgcagctcccgatctaactgaagaactggatcctcatgtaactcatatcacaattccaagtgacttgcatggctctttgcgcaaaggaaaggatgacaatgacacaaactgttgggcttctcctagcggaaaaggatttatgattagaggaaagaattatcttaaagatagttctaggtagttggaggagatcctcttctcaagcttgtagcagttgattggtttacagttgataaatccgcggatagaattgccctgcaccctaaatgtctggttcagtcagaagccgggaataaccttccatttatccttgtcattaatctccaggttcctgctaaaccaaactacagtctggttctatattatgcagctgacagaccgataaataaaaattctctgttagctaagtttgttgatggaagtgatgcat

SEQ ID NO: 22761 - DNA, 527 bp, Glycine max
ctcaatctaaagttttttctcttccacacaacctctgtcatccgccatttcctatcctgcagaatgaatactcaattttgcagaacaccaccccatcacgtgcatgcacccatcatccccacttcccacttcccttccttgtacactgtctcaccctcccacccacgtttcttctttcatgccaatttctcagcttctcccactcccatcttggaagaagaaccttcttccaacacccccatcatccatgttgtggatgttaactttgatgttcagcagcaatattccaagccagaacctgagaacttgaacgagtttttatgtgggatgctcgaggatccaaagaccaaggagcttgcttttgactactaccaaaggttgaaagagaggccagagtttagacccgagaagccaacactgaagcatgtgatcaggtacttggtgagtttgaagagttgggattacattatgtcggtttcagatgactttaaggtttaccatgtgatgcctgatagggctacttgctc

SEQ ID NO: 22762 - DNA, 467 bp, Glycine max
ctcgagccgctcggttggaagccgagccgccacacactcacacaacactctctctgtccgtgccaccccttcaatggtctctcaacactgttgaaatttgacccatgcagaccatgctacgagcaaagcagatcactgcactttctagcagtgctaggacttttctcattggtggttcgcgttgtaatgcagcagatggtagttcatgctcttgcactgaggatgaaatttgtgtttctagacgacagcatatcaaaaatcatgttttacctgcacagaagccatcctccctagcatccaaagctacttctgaggtggatgaaacattggtttcagaaaactcagtaaatgggccagcttgctgcaaggctaagggtgttgaccaatctagctgtattcagcatatcaggtctgcttcaagtccggcatgtaaatcagattctgtaacatatgcttgtgatattgat

SEQ ID NO: 22763 - DNA, 297 bp, Glycine max
aggaagttgaaggagataaatatcgaaagcgatctattgggtatgtatatagctgtcaatgtttgtgtgcacaataagctgcttcttttatactgatcaaagaccaactcatcctaacaggctgcctgaaacaaaagccctttggcttgaagtgtattcaacgcacaggccattataccttgtgcctaatttaattttgaaggaatgaattaatgattgacttcctatcaacttaatcatgatctaataccttgtgaaagacaaattgaacctagaagctaatgttagttgaagtca

SEQ ID NO: 22764 - DNA, 291 bp, Glycine max
cctgtatcgatacacaaggaaggagaaggcaaaaaaatcaattatgttacagtatttgaacgccctgggttgaaggaatttttaaagcaactcagtgaatttgctgacatggtgctgtttacagctggtcttgaaggctatgctagaccccttgttgacagaatagatgtggaaaatcgattcagtctacgactttatcggccctcaacaattagcacggaatatcgggagcatgtcaaggatcttacctgcatctcaaaggatctttgtcgcattgttattgtagacaat

SEQ ID NO: 22765 - DNA, 192 bp, Glycine max
ttgagagggactcattggaacttcccactaagccatccacaattaacattcctcattattactctagtatttcattgttccttcattttgtatccaatgccaaggtgtgtaattataaaggttttgaaatatacttcataatatctaaatcatttcaaaacttaaataaattattttatcatgaattctttt

SEQ ID NO: 22766 - DNA, 568 bp, Glycine max
ccttcctttattctctcctcttaaacctttcacttcaagctttaagtttccaagctacccacccactgctcatactcacacccaatgaagatccagtgcgacgtgtgcaacaaacacgaggcctccgtcttctgcacagccgacgaagccgccctctgcgacggctgcgaccaccgtgtccaccatgccaacaaactcgcctccaaacaccaacgcttctctcttctccgcccttctcataaacaacaccctctctgcgatatttgccaggagagaagagccttcacgttctgtcagcaagacagagcgattctctgcaaagagtgtgacgtgtcaattcactctgccaacgaacacacccttaagcacgataggttccttctcactggtgttaaactcgcagcttctgccatgcttcgttcatcacaaactacctctgattcaaactcaaccccttctcttcttaacgtttcacatcaaactactccacttccatcttccaccaccaccaccaccaccaacaacaacaacaacaaggttgctgttgaaggaactggttcaacgagtg

SEQ ID NO: 22767 - DNA, 314 bp, Glycine max
ggatggctcatttatcatagtagtgcttcctcctttaccatttgaccatatttatccatctcaatcacttcccactttttatgagcattggccaacccccacgcttcctttattctccctctcaagcttcaagctactcacaccaatgaagatccagtgcgacgtttgcaacaaacacgagggcctccgtcttctgcaccgccgatgaagccgccctctgcgacggctgcgaccaccgtgtccaccatgccaacaaactcgcctccaaacaccaacgcttctctcttctccgcccttctcctaaacaacaccct

SEQ ID NO: 22768 - DNA, 443 bp, Glycine max
caaagctgctgatgaaggcttggtaataattcagtctccaaaggtgggtttctttaggagatcacggacgataaaggggaggcgtgctccaccatcatgtaaagagaaacaaaatgttgaggaggggcaagtgatttgttatattgaacagcttggtggtgagctgccaattgagtctgatgtgtcgggagaggtcatcaagatcctacaaaaggacggcgatcctgttggatatggtgacgcacttgttgcaatattgccatcatttcctggaataaagaagcttcaatagcctcgaatttttggaaaacagtcattcttgccagccatgctgtaattgtgtcatacatatatttcattacttttgagttcatgtggtccatagcttatttgttttgcatatcaaagacaaagggtataatcaaactgctttgttttctcat

SEQ ID NO: 22769 - DNA, 299 bp, Glycine max
gatccctcatcttctctgttctatagcaaaaaaacagtaatcataacttgatttagatctcaaaaatcttgatcatcaccatcattacctttagatctttctcccttttgctcactatcactctcagtctctcacctatccacccaacatgccttctcagggtttccattctctgtgtcactgggacaatacaacagtcccaattctcaccctttcacaccaccattctctgattcagcctccaccctcatatccaccagaaaagcatgcatctttggtgccactgcctcaaacccatt

SEQ ID NO: 22770 - DNA, 513 bp, Glycine max
ctcgagccgctcgagccgaatcggcttgaagatatattatggcattctctatcttcaaacatgttctgtcgttattccttctttgcattttcttgcaggaacctaccaatgcccttagaaagacctacattgtgtacatgggaggacattctcatggtccagaccctttgcctagtgatcttgaaacagccacaaattcccatcatgatttactcgcttcttacttaggaagtcacgagaaggccaaggaagcaattatatactcgtacaataagtacatcaatggctttgctgccctacttgaagaggaagaagcatcacagattgcaaaaaatccaaatgtagtttctattttcttgagcaaagagcgcaaattgttcactaccaggtcttgggattttcttggactggaaaaaaatggaaaagtcactgcaaactccgcttggaggaaagcaagatatggagaaaatataatcattgctaatattgatacaggggtttggcccgaacacc

SEQ ID NO: 22771 - DNA, 528 bp, Glycine max
cggctcgaggattgacaaatgactttctggaaaaaggacgttcattgtacttgatgacgtgaatgagtttggccaattaaaaaacctatgtggaaatcgtaaatggttcggtcaaggaagtgtaataatcattacaactagagatcgacgtctgcttgaccaacttaaagttgattatgtttatgatgtggataaaatggacgaaaacgagtcccttgagctttttagttggcatgcattcaatgaagcaaaaccaaaagaagacttcaatgagcttgcaagaaatgtagttgcttattgtggaggactaccactagctcttgaagtccttggttcttatttaaatgagaggagaaagaaagattgggagagtgtattatcaaaactagaaagaatacccaatgatcaagttcaagagaaattaagaataagctttgacggtttaagcgatcacatggaaaaggatatatttcttgatatatgttgtttctttattggtaaagacagagcctatattactgagatact

SEQ ID NO: 22772 - DNA, 419 bp, Glycine max
actaaacctacccatatttgcttttgcaccaaccaatgcatgggtcattgcacttagtcttcaatgccccactttggataaagaaatagaaggagaatatagcattgaaagcaaaccgatctcaatcccaggttgcaaatccgttcacccccttgatttgattcctatgttgcgtgacaggacacaaagggtctaccatgaatttgttggcgcgtgtgaaggggcagcactggctgatgggatctttgtgaacacgtttcatgagttggagccaaagacacttgaagcacttggtagtggacacattattaccaaggtgcccgtgtacccggttgggcctattgtaagggatcaaagaagccctaatggtagcaatgaggggaaaataggtgatgtttttgggtggctggacaaacaag

SEQ ID NO: 22773 - DNA, 974 bp, Glycine max
gtaaaaatagtggagtatcttctctgctttctgtggtattgtctggcttttggagccgatccaaccaatcatcgctggcgccaaatacaaaatctcatcccttcccctttctcttactgactctctttgtcaccgggtttgtgagatgtcggatgcaccggcgagtccgagtcacgagagtggtggcgagcagagccctcgcggctcgttgtccggcgcggctagagagcaggaccggtaccttcccattgccaacatcagccgcatcatgaagaaggctctgcctcccaatggcaagattgcgaaggatgcaaaagacacaatgcaagaatgcgtttctgaattcatcagcttcattaccagcgaggcgagtgagaaatgccagaaggagaagagaaagacaatcaatggagacgatttactatgggccatggcaactttagggtttgaagactacattgagccgcttaaggtgtacctggctaggtacagagaggcggagggtgacactaaaggatctgctagaagtggtgatggatctgctagaccagatcaagttggccttgcaggtcaaaatgctcagcttgttcatcagggttcgctgaactatattggtttgcaggtgcaaccacaacatctggttatgccttcaatgcaaggccatgaatagtttagatgcttctacgcatcttatttatttcccttgaatgcttgtacgcatggaatgggtggaaacaatggtttggtgatttaatatttaggttctcgtttagaaggcatcagtgtcagaattttgttacggtactaaggtagatttttattaatacatgtcttatttagctatgtaatacctactcaagggagagatgtgtttagggttatgctagtgattcgccatgtagcttgtcagggtgagaagcacttgcttttagagttttctttagattattatataatatataatatttgcagac

SEQ ID NO: 22774 - DNA, 440 bp, Glycine max
ggctaacggcaaggttatcaagtttatcatcgtacctgatcaagaagttgacacgtcacgggtccctaaacggttgttagaataccctgttgttgatttatccagtgtggcgcacacacgctatgttgctatgtacgagtacgcgagcgacattgatgagccgacacacttgtacctaaatgcgaaaccgtatgaagcagcggctacggaaaccccgaaggtggggtccacagaggtgtggtatgtgatcaacttgacggaggataatcacccgcttcacattcatttgggtttgttcaaggtgttggatcagacggaactggtgaaaccgcatgatgagtttacggaatgcatgacgacaatcaacgatgcggtgaagtgccacgtggacaagtacgcgcgtggcacgataatagatgtgccaacacatgataaagggt

SEQ ID NO: 22775 - DNA, 312 bp, Glycine max
ttccttcacaacgtgttccaagacagtggtctaataatgatcttcgtgattaaaccatatataaagattctgagtatctggagtttcttgaactacttgccaagcctgttgagaatcttcccagtgccgagatacaattggagaagagggaagcagaacgatctggtgctgcaaaagatattcctataattacaccactgatggactttgtgcgccagaaaagagctgccaagggacctaggaggccactgtcaaatggataagtgagtagaagagctggcacttcatcaaatgggggccctagttccgcca

SEQ ID NO: 22776 - DNA, 559 bp, Glycine max
ctgtcaatttgggggttcttgataccttcctttttcccacccctccataatatatagagcctcgagctcctcagtttccaatccccgtactccctctctctcttccttttcttgaaacttccctctttccttaaaggattccctcctaatttggtgggattatcccaagtttcagctgctaccactcatcagcattgccatttcctgtttcactcaccacatggaaaagcttattcgcatgttccctttgcttcttcttcttcttctgttccccacttttgccttcgctggccatgactatggccaagctctgagcaagagccttctcttctttgaagcccagagatctggctaccttccccacaaccagagagtcacatggagagcacattctggtttgcaagatggcaaagcaagcggggtggatctagttggagggtactatgatgcaggggacaatgtgaagttcgggttacccatggcgtttaccgttacgatgatgtcgtggagcatcattgaatacggcaaacaaatggctgctagtggtgaacttggtcac

SEQ ID NO: 22777 - DNA, 265 bp, Glycine max
ctctctctctctcccttttcttgaaacttccctctttcctttaaggattccctcctaatttggtgggattatccctcatcagcattgccattccctgtttcactcaccacattgaagacatggaaaagcttattcgcatgttccctttgctccttgttcttcttctgtgccccaattttgcctttgctggccatgactacggccaagctcttagcaagagccttctgttctttgaagctcagagatctggttaccttccacacaa

SEQ ID NO: 22778 - DNA, 286 bp, Glycine max
ggctgcgcgggataattgtgatcactcatcaaattaatatttttttggtaccaactcatcaagttatttgtttttttggtacaaacttatcagattaatttgaaactagcgtcacttgattgtaccatttgttttctggaatgaatcctttctcatgaagtgataagattatgagaagagaggtagatgcaaagcccttaaatagtaacttgaaacttttgtttataaggtcaacttatttaagattgccttagttggatgtttctttattcccttgaaaaatatg

SEQ ID NO: 22779 - DNA, 599 bp, Glycine max
ggtatgtgtcaaatgctgttgctattgctatttgctaccgtctttattcacacatgcagctaattgttttacctttaccccaggctccacaaatgggaaggagagctgcacctgaaagtgttgttgaaccagagttggtatctgatgacaccaatggagatgttcctggggaacctcaagccccacttacatctgcacaaagacttgcagtttcaacatctgctgaaactgcagctgatccttttgcacatgatgctaaatttttcactgagatgcgtgtattgaatcgagatgtaagtaatgtgtttctataagttatatgattttgcatttctgaaaattttctaatccaaatggtatgtaggttcgacttgtcctggaaggtgtcgataagttcagcaatttaattgggtcggtgtattatcctgatggtgaatcagcaaaggacctagcattggagcttgtagaaaacgtatgtgattcatttgtgtggggtgatattatcatgatttatttgctctaaatcaattaatgtttcatcgtggacctgagtttacttccatgattttgtaccgtagtattactacattggtttattt

SEQ ID NO: 22780 - DNA, 960 bp, Glycine max
attctgtgtactctcccggatcctccgccaggaactcttgttttgctgcgctcctgcttccgcttcggatccatcccgaaaacctcacacagaattattcactttctgtgttcggttcaactcttttggattttgctagatccgaagcgccaaccatttccaagatcgttgaagaatggcatcagcggcgagtggggccaccggatggtacaggggaagagtgaaggcggttccttccggggactgtttggtcattgtggcgatctccagcaccaaacctggtcctttgcctgagaagaccattactctatcttctttaattgcacctagactggcgcgtagaggtggtgtggacgagccgtttgcatgggaaagcagagagtttctgaggaagctctgcatagggaaggaagtgaccttcagagtggactacaacgtgccgtccataagtcgggactttggaacctgttttgctcggggacaagaatgttgccatgctgggtgcttctcagggatggggtaaggtcagggaacaggggcagcagaaaggagaagttagtccgtacctggcagaattgttgcggttggaagaacaggctaaacaagaaggccttgggcggtggagcaaggttcccggtgctgcagaggcttcaatcagaaatttaccaccttctgcccttggtgaccctagtaactttgatgctatgacttttttaaatgcaaagaagggattgcccatggaggcagttgttgagcaggttcgtgatggcagtacactccgtatctatttgctcccggagtttcagtttgttcaagtttttgttgctggaattcaggctccacaaatgggaaggagagctgcacctgaaagtgttgttgaaccagagttggtattctgatgacaccaatggagattgttctggggaacctcgagccccacttacatctgcacaaagactt

SEQ ID NO: 22781 - DNA, 433 bp, Glycine max
ctttgattctgtgtactctcccggatcctccgcctggaactcttgttttgccgcgctcgtgcttccgcttcggatccatctagcgtcacgaaaaaaatccagaattctgtgttcggttcagctcttttggatttgctagatccgaagcgcgaaccatttcgaagatcgttgaagaatggcatcaacggcgagtggggccaccggatggtacaggggaagagtgaaggcggttccttccggggactgtttggtcattgtggcgatctccagcaccaaacctggtcctttgcctgaaaagaccattactctttcttctttaattgcacctagactggcgcgtagaggtggtgtggacgagccttttgcatgggaaagcagagagtttctgaggaagctctgcatagggaaggaagtgactctcagagtggactac

SEQ ID NO: 22782 - DNA, 928 bp, Glycine max
ctatcttttcaggaatggatgttccagtatcttctctgctttgtgtttttctcttccattttttaacaggaagctttaaggtcaagagggctgaaggatgatacaacttgcctcgttgtagatattattccttcagatcatcccgtgttgccaacaattccaagaaagaaacgtaacgtgctaacttcccttctctttggaaagaaatctcaaaactctacaaacaaaggcaccaataagctttcttctgttggtgttgtggaggaattatttgaagagggttctgcaatgcttacagagaggttaggcaaggattttccatctaatacgaatcctgagattttccgctgtgcggtttgccaagcagatcagccctctgtggacagtttatcaatgaacactgggccttttttccccccagtatctaagccatgggaaggtccattcctctgcacaaactgtcagaagaagaaagatgccatggaaggaaaaaggtctacttggccctcggagacagcatagtaatatagtattctagcagcatagtaaatattagtataatttttctctggcagtgtgagcatgcttacttctacatttgggtggtgattgtcattggtgtgtaagaatgaggttgagatagccatattaggtctattggaggttgtcgcaagtttgtttttggcgtgtgctctcagctgttggactgactgacagaacaagcaatgttgtttagtagataacttctattagtttgattactaacggcttgtaattaactggcaatttcattgttaccctttataggttaatttgtttttaacatcatgtacacattatgttgtgtgtgactctgtcggacaacaggatatgctcaatctcctgaattgtatgagcccctttttttttaacttgctacattattaat

SEQ ID NO: 22783 - DNA, 332 bp, Glycine max
cttcgctgctggccaggtggattgtgcctatctagatctataggtgacacagacgtgggagaatttattgtgccaataccacatgttaagcaagtgaagctttcaaatgctggtggaaggcttattatagcttctgatggtatttgggatgctttatcatctgatatggctgctaagtcttgtcggggtctacctgcagagcttgctgcaaaactagtggttaaggaagctctaaggtcaagaggcctcaaggatgatacaacttgccttgttgtagatattattccttcagatcatcctatgttaccagcaattccaagaaagaaacgtag

SEQ ID NO: 22784 - DNA, 515 bp, Glycine max
cgtttagcaagagcggttttctggtctctgctacactaggaagaagatgaaaaagcagcagcagcatcagtgttgaatctcgttttcccagcagaagaagaaagcaagggcacgcacatcttctcagctgtgagtgagaatttggagagtagaagaagacgcagctgattgtggaaatgtcagtgcaagattacctggacaagcacatgctttcccgaaaactcgaagatgccgtcaatgccgccgttagggccaaaacctccgatcccgttctcttcatctcgaatcacatgcgaaaagcagtgcaatcggtgataacaaaaatcaaggcgaggcagatcctcgatagcagaggaattccaaccgtcgaagtcgacttgcatactaacaaaggcgtgttccgcgcttcagttcccagcggcaactccaccagcatgtatgaagctgttgagttacgctaccgtgacagaggagtgtatctcggaaatggcgtggctcacgctgttacatttatc

SEQ ID NO: 22785 - DNA, 330 bp, Glycine max
ttaaagtcaaactgaggcataattcaacttgttcctctcaccccaggttcctcttcatcctctctccactctttttcagagacaaatttcccttattttctcccataataaaaattaaccaaccccactttcacttaccacacaatcccgctatctcaaatcaaccttctttcagacatagcaaacaaacaaaacaccgttcatcatgtacaactcgccaacaccatgtatttaaccattctccttcactattacttgacaaagaaaaaccaaatacatctctcctttcgtcttcttacatctctaatagaccagctcgtcacattccaa

SEQ ID NO: 22786 - DNA, 555 bp, Glycine max
gtaagaattctgcctgccgagctgttctctctagagatgacacattttgtagaaggtgctcttgctgtatttgccacctttttgatgataacaaggatcctagtctttggttggtatgcacatgtgaatcttctcaaggggactcttgtgggttgtcttgccatattgagtgtgctcttcaacatgtaaaagtaggagttgttgatcatggacaactgactgccactagatggtggttattgttgtgcatcctgcggtaaagttactgggatacttggatgttggaagaagcagctaaatatagcaaaagatgcccggcgtgtagatgtactatgctacaggatatatttgagctacaggctcctggatggaacctcaaaattcaaagatttgcatcagacagtacaagaggctaaggctaaactggagacagaagttggtcctgtcaatggtgtttctgccaagatggctcgaggcattgtcagcagactccctattgcacgtggtatacagaaactcagctctcttgctattgggaaagttgtagggtggctt

SEQ ID NO: 22787 - DNA, 451 bp, Glycine max
acgagctcactcagaactttctactgttttctatgaaaaagtcctgcttcttgcttgggggtatgacaatcttgtcattcggttggtggggctagccgtttttgcctttgcaactgcctttatactactaatgatggagactctcagcgcttttcttcacgccctgcggcttcactgggtagaatttcaaaataaattctaccatggtgatggctacaagttcaggcctttttcatttgcctccttaacagaggatgacgattgatccattcatatgtatggtttcatggcaactatatagaaaggatatttccacaagtgaagggagcataaaatgagaatttgtagtgtcggaaccaaatttggcggctatggttgttaggtttgcttgatgatattctgcttgatattgacctggcaacaaaaatttcctgctcatttccccatggct

SEQ ID NO: 22788 - DNA, 424 bp, Glycine max
agagacccttctttataaggatggagtttttagaatagaccgtctagagtctttggtgacagagtctctccgtgccaaaacagaaaaggccatagtaaaacaaactgaaggcactgattcgacaatggttatgaaggaaattctttcttttacactaacagaaaagggtgaatttgtaagggaaataattgttcaagaatttgctaaaggtttagatgcacttggtctagcaaccatggagacagctgctgccagagttcctttcagtagtttcttttattcccctttaatgactaaagaagatataatcaacttgagaaacttccgacgccttatgctattgctgttgggggccagaagaaaagaagaatccagtacagtaagctttctggccagtcctgacaagaatcaaatactgtacatg

SEQ ID NO: 22789 - DNA, 618 bp, Glycine max
catgtttttgtggccccaacaaaatgttaactatgcacaagcacaacttcaagcaccaaccaaggggatgctccactcatagaactcaacatagaaactggaactagaagtagcagtcactaagttttgtgcataaccttaaaccatgtcattgcctaccactactagtggtcactcatctatttactctgcacttacattgccaagaaccacccaaattcacccaaccttgttttctcccaccaccaagttcttttcttccaaaagcccctcatattcaggtctttccaattgtttctcaaacacccttttgtcaagacctttgctttttgctgtcaaggcttcatctggggttggctcagaagcatccaaacaggagagtgacaagagtgaagaagaagaagaggaggaggaaccgtatgaagagtatgaggtggaaattgagcagccctttggactcaaatttgcaaagggtagagatgggggaacttacattgatgctattgcaccaggaggatcagctgataaggctggagtcttcactgttggggataaagtaattgccaccagtgcagtttttgggaccgaaatttggccagctgctgaatatggaaggac

SEQ ID NO: 22790 - DNA, 202 bp, Glycine max
aattggctgagaattataacaacaacatggcgctttctccggaaacgtttacaactcgaaaagcgagcccccgaaggtcgtcgtttacgtccccgaacggtaaacgaccttaacgtgttgagctctttgcttcaactaacggatcacatatgttccctaaatctcacagccaccctcttaaaccgtgtttcctcttccacac

SEQ ID NO: 22791 - DNA, 599 bp, Glycine max
aaagggtttccgatcaccgaacggatcaaggaggatgaagatagcggtggaagggtgcatgcacggggacctggacaatgtctacagaacccttcaacagttggagaaatctgaaaacacgaaaatcgaccttctcctctgctgcggcgatttccaagccgtgaggaacgagcatgacttgaagagcctgaacgtccctctcaaataccgctccatgaactccttctggaagtactattccggcgccgaggttgccccctaccccaccatcttcatcggcggcaaccacgaagcttccaattatctctgggaactgtactatggaggatgggctgctcctaatatctacttcttgggagctgctggggtggtgaggtttgggaatgttcgaattggtggcctctctgggatctataaatctttcgactataaatcaggacactctgagaggcctccctatgatcataataccattaagtccgtgtatcatgttcgtgaatatgatgttcgcaaattgatgcaagtcaaggagccaattgatgtttttctttcgcatgattggccagtgagaatcactgattatggggattggagggagc

SEQ ID NO: 22792 - DNA, 303 bp, Glycine max
agtgtttgaagatcagaaaagaattatacgtgaactccaggaacgactggcagagaaagaattccaagtaattgaaggggagaagttaaggaaaaaattgcataacactatcctggagctaaaaggacatattcgcgtgttctgccgtgtccgacctttgctaccggatgatggtcctggaacagatatggttgtttcatatcccacgtcaaccgaagctcttggccggggtattgaattactacagagcgggcagaagtacccttttacatttgacaaggtatttaatcagaggcttacagc

SEQ ID NO: 22793 - DNA, 549 bp, Glycine max
gaaactttcaaaagctgttaaagattgtttagtcttgcatccatagtttataccttttcttttatttcttcttttgttctcattcaaattcgcctgtattctttcttatggtatactgttggtaaaatatctctcaactgtcaaagcctctctttatcccttaaacaaacagacacgcacggagagacaaatcctactactaactcttgtttatcttagtgtgtcatcacactgtggacggttctgtgtcaaaacaaaccaacgattttgaaggtttgagacagcaacatgatgatgttgcggttagtctatgctcttatcttggggtttgtggctttgaattgcttgcaagtgtttgaagaatccaatgctcaacgcataccgcgagatgaagtgaaagcactacaagcaatatcggataaactagagaacgtgaattggaaagtcacagaacgttactgcatagaggatggaggcttcaatggcaagattaatatagacaatgacatcgtaaggaatgtcacatgcgattgcacttttcaaaataaa

SEQ ID NO: 22794 - DNA, 645 bp, Glycine max
acgaggaaaatattgattatgtggatgagtctaaggatgatgaaggaaaaattgagaacttggaaagttgttctgatgaaattaccaaagaccgtgctgtcataaacattatgtatggaaatgaagaaaagaataagacagtgcctcattccagtgatagcgttgagccagagaaattaggagttactgaaaataagaatggagatggtgaagggtttatagttgtctcaaagaggaggaaaaacaggcagaagatcacaaatggagtcacagaattgtacaaccaacagtccatttgtgcttcagttcgttgaatagagttaggaaataaataaccgatattgtctctccatctgagtgtttgtctagccaaagctctggacaatggacatcatattgttaatagtttataacttcattgcctagaattttggtcattcaaatcattttgttttttgccaatataataagtgcattcgggatttgtttattctctgttatagtaggttttgttctgatacttggaaattttgttttatcaataaaaagctgattggcaactttttaaaaaaaaaaaaaaaaaaaaaaaaaaaggggggcccgccgataagggaccctctggcccggggatttattccgggccgg

SEQ ID NO: 22795 - DNA, 761 bp, Glycine max
tcatcacaaggacaaataagttaaggttccacgttagtaattttttggtgtttgaattgaagttaaagggccatggcttcaggatccaaatcagtagcctctatcctcttggcactgaatctagtgctgtacttcattgtgcttgtaattgcttcttgggcagtgaatcatgggattcaaaggtctggcgaaacagcatctgttttgtccattccggctcgcatatttccaatatatttcccaatgggaaacatgacaactggttttttcgtaattttgtctctggttgctggtgttgtgggattcaccacctcactcactggattgcaaaacattttccagtggaatgctcccaacttacatgcagcagccatgtcttcattgactacatgggcactcactctactagccatgggatttgcatgcaaagagattgaacttggctggacagactccaacctgcgcaccttagaaacgatcacgatcattgtaagcgcaacacaactattatgcacgggagttatccatgttggagtttcaaaagttgttgcgcagagaatgggaggaagagtatgagtttcagctggtgcaggcttatacgaatactatctttcaggaaaattatcctctatgactgcagaattaattgtaactctttctttgcacaaagttgtttcattcattcatgtacgataaaaatatttaattgtaactatatactttagtttcatttgaggaaacttataaatatactttttcag

SEQ ID NO: 22796 - DNA, 374 bp, Glycine max
attcagaacaatagttgaaaataaaaaaaattatggaattattcttccgggatacaaaagattatgttttgaattgcattgttactttcaatggcgacaggcaaaggaaggaggtggaggaggatgttttgtggtggtgcgactggtgacgaggaggtcgtgtgactgctgtgaagaaggtgaagtcatgggagaagaagttgccatggcgggagtggtttgtacaaagagaaaggtgttagggtcggagaaggatagtttggtattttcaagcaaaatgagaggtgtaagatacacatatgagagtgctccattcaaatccgttattcacctactatcaatccaggcccataaaaagaagcagttcagttttt

SEQ ID NO: 22797 - DNA, 285 bp, Glycine max
gctacatgtatgcttcagcagggatttggatcctcttttttctcaaaaacgcagcaaccatcacaaaaacagttcaaagggttagcaagcaatgagaaacacatgccaatcctggagagcagtaaagaggagccgggatggccgtctttcggacagctcattgttgatctttctaagctttcccttgaagcattagctagcacattcattcaattcataccctcacatttcagacctagcaactccaagagaggcctatcaccactggaagatcggcttgtgatg

SEQ ID NO: 22798 - DNA, 344 bp, Glycine max
cgcataactcgcccaacggaatccaggggcttcttcagtactttaacctagtggagggatgcctaacgatgataaaatcacaccaacagaagcacaacttcacgtacgattggataatccgaacacgtgtggacgggtactggaacgcgccgttgggtcccgaaaacttcgttccgggaaaatacctggtcccaccgggctcctcgtacggaggactcaacgaccgtttaggaatcggcgacctcagaacctcgacggtggcactgtcgcgtctctctttagttccaaacctcgattccgctggcttcaacaacctcaactcggaggcagcgttcaaggcccaa

SEQ ID NO: 22799 - DNA, 591 bp, Glycine max
gacccttctggtaatggtatgtggggttctccaggatgtcctaaaccttctgaatatgtacaaggcctaataggtgttgttttacgtgccttgaactcactataaaatgcaaagatgatgccaactgaggcatgtataactgattgcatccggtatggagatcccaagcaccgcaacactgatgttaagaaggctcttgaaagtgctattgagcagaatatggtggtgaaacagaatttaggtgctttgccgttgtatgttggtaagaatgataaactttggaaatgtgtaaatcctttaggtggtactcctaagcagcattcaaaagaaacatgggatcaaattggaaagtttttaacaactcctgctggaagatcagcactaatgggtacacagtgcaagtatgaagcaggtattgtgattaagagtatgtgctttaaagatcttgctttgggtgatgtccttcagatattgaacatgttaattacccataaaaaatgggttacgcatcatccatctggttggcaaccacttaacattactcttcccgagacaaaccctggttcaggggttgtagctggtgcataactg

SEQ ID NO: 22800 - DNA, 277 bp, Glycine max
tccatgcattgcatgttttgagcaaagtgggccatattatgaccccaaagattctagctcttttaggaatataagctgtcatgatccccggtgccaattggtttcagcccccgatccacctaagccttgcaaggctgagaatcagagttgtccatacttttattggtatggtgatggttccaacacaactggggattttgcattggaaactttcactgttaatctcaccactcctaatgggacttccgagttgaagcatgtggagaatgtgatgttt

SEQ ID NO: 22801 - DNA, 336 bp, Glycine max
ctcacttctgattcaactggatgtcctaatgctttatgctttctttcttcaaccgactaatatctcctttgaggcatatgataatatgaatagttgagtcgagaagaagatttttcttctttttttgggagaatgagaaaaactgttaaaaatattttccataaaagaaaaaaaaaacacttgaagtggttattttgtgcacaaatatgttagtttaacaatcacttgactcattgttgtttattttggtaaatactttttttaagttttacttttttgttcccatttggcggggtggattggagccttgcagggaagtaggaagatacatgctta

SEQ ID NO: 22802 - DNA, 635 bp, Glycine max
atgtcaattgatcaggtggcaagtgcagtccaagattgtaattcaccaattgatgctgagttgacgtttaagcagagtgacccatctaaggagcagcaaggatgtatgttaaaggatacaagtatttcaaagtgtacctcttgtcgtgatgacttgttaagtaaagggcaagtgtctgcagctgttaccaacatacagcctcaggttcccacttcatcttcagatgtgaaattggagtcttctaagttggaaaagcaagagaaaaatacaagttctaaagcatcatcaggccttcgaaagagggcctatgaccctgaattgtctttcaaagccaggggcaagctttatcaaaggcttggcaagatacgtagtggtggaagcagtgaggtacacaaagagatttcatcaaactgtacaatctatgcacttaaaaagataaaattaaagggtcgtgattatgccactgcatatggcttttgtcaagagatccagtatctaaataggctgaaaggaacgaataatattatccagcttatagattatgaggcgactgacaaggctttgtttgagggagtcatacatggctccttcagtaatatggatggtagagccaatgatgatggatatatatacat

SEQ ID NO: 22803 - DNA, 620 bp, Glycine max
gttctacatttttttttcttctccctttatctcttgccctttttgttggtggtgaaagagaagccttgagaacaaatttcccgttttcaaaattggagcttttgggtctctgaggtttgatctctgcacaagaaccttgttttctcatctgggtgtgttgcttttgcctctgctggctcgacatggctgtggaaaaccaaagggaagatgggggttgtgatcgttttcctgtgggtatgcgtgttcttgctgtggatgacgacccaatttgcctgaaggtgttagagaatctccttcgcaaatgccagtatcatgttactacaactaatcaggcagttgaagcgctgaaaatgttgagggaaaacagaaataagtttgaccttgttatcagcgatgtgaatatgcctgacattgatggatttaagctccttgagttggtgggacttgaaatggacctacctgtcatcatgttgtcagcacacggtgatacaaagctggtgatgaagggtgttacacatggtgcatgtgactatttgctgaaacctgttcgaattgaagagttgaagaacatatggcaacatgtggttcgaagaaagaattttgatagcagggatcagaac

SEQ ID NO: 22804 - DNA, 284 bp, Glycine max
gtcaacacaacagttgcatatcaccgtttatcctatcccagcaagaaccatgtcactgcattttctgacaaattcaaccaatctgaattaaattcacattcacatcacgctgcattctttatttctccaaattttcaatttttttactagctaactaaatgaccagaagatgagttttggacatattttgtatcattaaattccaacattatattacttttccttacttatctaatagtaattgtttttcaacaacttcatatcatattatattattccacacc

SEQ ID NO: 22805 - DNA, 558 bp, Glycine max
gtggatgagacagccaaaattggcgagggatgcctcattggacctgatgttgctattggtcctggctgcgttattgagcaaggtgttagactcaaaagctgcacaataatgcgtggagtccgagttaagaagcatgcttgtgtatccagcagtattgttgggtggcattcaactgttgggcaatgggctcgagtggataatatgaccatccttggagaagatgtccatgtatgtgatgaaatttacagcaatggtggtgttgttttgccgcacaaggagatcaagtcaaatattctgaagccggagattgtcatgtgagtgaggtcaatgatgttcaaattggtaccatgtggtgaggaggtagaaaaattattgagtctggaatatgtttgtccgtttcatttggttttcctttttacttcatggcatttctttcctttctataagtcagtttttggattagaatgagtgacgccattgcattgatgtattttcagtgtggtcgttgtgtattttcagtgcgtatagaaatccattattgtttagttgtttctcgcc

SEQ ID NO: 22806 - DNA, 298 bp, Glycine max
cgatgaggaagctgttgctcgccttgaggaaataaaaaaatccattgaggcgaactggctttacggcaaagcaatttgaatccagaaaggcctgactcaggatttttaaggacattggattctagcattaagcgcaacactgctgttattaagaaactgaagcagattaatgaagaacagtgtgaagctctgatggacgagttgcgaagtgtcaacttaagcaaatttgtcagtgaagccgtggctgctatatgtgatgccaagcttagaagttctgatatacaagctgcagttcaga

SEQ ID NO: 22807 - DNA, 495 bp, Glycine max
atgctgctcgagctttatagattctttaatgatgtcttagcatattttgaaagttcacaatcaaattaattcttaacaataggttcaggtcatgtagatctctacattgttgtttccttttgttattttcttttggttcttttgttgttgtactttaatttatacttccataaagcttttgtggacatttctgactttcgccagtaattggtgtaaattaggatccaaaagccttggtcaagactcattcatcatctgttcctaatgaggaaaacttgttgtcacattcccagagaaagatggttcagtgatgcatggagtggaaagtctatcttgaacagccaacctttctatctgctatcaaatctttcttttataataaggatggagggaatcctaaatggcactcttcaacccttattttgttaccttaaataaatgaatcactaaatgttagatgctagtcacagtagtataccttctatcatatttgta

SEQ ID NO: 22808 - DNA, 862 bp, Glycine max
aatgattattcccgagtctgggcactcggcatatgacaaggctgcacagtattttaatatcaaactatggcgtgtaccagttaacaagaatttccaagctgatgtgaaagcgatccgacgtcatattaacaaaaataccatcttgattgttggatctgctccagggtttcctcatggagtaattgaccccattgaaataatttggcaatttcttccgtaggaacttggtcatctggcatcaagctttggtatttgtttccatgtggacctttgccttggtggctttgtattaccatttgctcgtgagcttgggtaccacattccaccttttgatttttctgttaaaggggtttcttcaatatcagtggatgtacataaatacggtttagctcccaaaggaactagcgtagttctttacagaaaccatgaaatcagaaagcatcaatttgttgctgttaccgagtggtctggtgggctgtatgtatctccaaccatagctggaagcaggcctggaagtcttattgccggtgcatgggcagcgatgatatctctagggaaagaaggttacttgaaaaatacaaaagaaattatggaagggtcaagaagaatacagcaaggcatagaggagattgctgagttgtttattgttggaaaacccgacatgacgatagtggcttttggatccgccgttctggatatattcgaagtcaatgatgttatgtcatccaaagggtggcatttgaatgcattacagagacccaacagcatccatatctgtgtgaccctgcaacatgtgccaattgttgaagactttctcaatgatttgaaggaatctgtgaaaactgtgaaagcaattccaggt

SEQ ID NO: 22809 - DNA, 288 bp, Glycine max
tggcatccgaagcattgcacaataatccttcgtctgaaaacgcattcattcttttctcccacgcacgcacgtacatccaaacgaaccaaggttcttcttctctgcgatcagatcgcacaaattttggaaccctaatctactacatttcgttttggaccttcatccgaatcgtaaaaatcactctctgcgaatcgaatcctctttctgacgtcgatcatttcgtcgactgagtcatttaaccctaaacattttacatggccatgaccggtaaccattcccctcgccatt

SEQ ID NO: 22810 - DNA, 778 bp, Glycine max
gctcgagctcgagccgctatgcgtaccgcaaagtactacaagaagttttcaagttcttcacaaagtctaaccacaaagccactgttctcttcagaaccaccacaccagaccactttgagaatggggagtggtttagtggagggtattgcaatagaactgtacccttcaaagagggtcagatacatatgatagacgtagattccatcatgagaagtattgaacttgatgagtttgagaaggctgcttctctaggatccaaaagggtgaacttgaaacttttggacacaactcttctttcactgctgagaccagatggacatcctggaccttacaggaagttccagccatttgcaaaagacaagaatgccaaagttcagaatgattgtctacattggtgtttgccaggaccaattgactcatggaatgacataatcttgcaaatgctactcaatgcttaataaacaatatgtcaccggatcatcagggtttgaagctggttacaaatatgatcatttgaaattcaggattctttgctgcatggtagtttcttccaatacctttattagtttgcaaagggcagttttatacacaaagccattaggttgagcttccatctgtacatggaattgtatagcttaataaagcttgcaagatacaaatgtaaaccgtagcactcaagtataaactcatcttatgtccttttcaccataatttttgtgagcatgtatacctatttattttcatatttagatgaagaggtaaagtctctggattgaat

SEQ ID NO: 22811 - DNA, 342 bp, Glycine max
tctgtctcctccttgacggtgctgtcccactccttcttgttggctccatcctgatgatccgcaccggcactgccgttgtctagctctgcaaccacttctatgtccttgataatagcttgcagatccgaattaacctctgttgatgtatattgtctcatattggttcgtgtatgagttcttgatttgtagatcagtcataccgtgacagagagattggtggtgcgaactcggacaaccactaacagagcattagtcttgcgatggtataacgcgaggcagagtacgtctgcaacgacagaagccattgccggtgagacgtgtgcagtggcatcactatcagtg

SEQ ID NO: 22812 - DNA, 290 bp, Glycine max
catcagttcctccaagtccacgttaacctcaacgagaattccgttgttcctagcgatgaactcgttcgccaaatcagaacccgtgtcatcctcagcctcttcatcatcatcaacgtaccagcaggtgccggagcaagatgctaataacgacttggaccgcgtacagacaacacgtttcgcaggtacacgtccaacgttaccaaggggagtggcaaaggaacagccattgtctggttcaggaacgatctcagagttttggataacgaggctctctataaggcatggctttc

SEQ ID NO: 22813 - DNA, 331 bp, Glycine max
tgaaatatatgtttcctgatgctgagtgggtttgtggaaactatcttcattgtcacaatccgagattggagcaaaaatggatagaagttatggttgatactcaagtggatgaactcataaaggctgtgaatcacagattcagatctgaagatttggttaatgctggtggcattcacagaacaatggtgtttgccaacactgttgaggctgttgaagctgtggcaaagatattactccgttctgggattgaatgttctcgttatcataagaattgcacattggaagagcgagcacagaccttagttgattttcatgataaaggtggtgttct

SEQ ID NO: 22814 - DNA, 313 bp, Glycine max
tttcatttccctatcttttgttcgtagatatctctttttgccgcgacaaatgctaccatcatccactgtcctatctctcgccggaacccgcgccggcgttccggtgagcttttccggcgaactgggtcacctcgaaaccaagttttcttcaagacccagaaaggttttcagccgttcgtgcataaaggggattcccttacaacaaaacaccatcaatggtttgaattcgaagaacagaaactcactttcgagcttcgcattcggtaaaaaagccgaagacagctttttctcggatgtaatggagacaccgatg

SEQ ID NO: 22815 - DNA, 795 bp, Glycine max
tgattctctcacactgtcttgtgttgtgttgtgtcatggcattaactgccactacttcaatcaacataagtcaccatagcactttgatttttcctccgaaacaacacaagcagcaccttagaatccacaggtttcgatgcagtggaactaatccgaacaaagagtcggaatcacagaacaatgcaattctcaagcttgcatggtatagttccgagcttcttggcattgcagcgtccgttttccgttcaccatctaatgaggaagttcctcctcagaggcttcttcagaccattgatcgtgctgcggttgtggacactatcaaacaagactttgaaagatcctattttgtcacaggagatctgacattaaatgcttatgaagaggattgtgaatttgcggacccagcaggctcatttaaagggcttcagcgattcaaaaggaactgcactaattttggatcccttctggagaagtcaaacatgaagcttatgaagtgggaagattttgaagacaaaggaattggacattggcgattcaactgtatcttgtcctttccttggaggcccattctttctgcaactggatacacagaatactattttgatgcacgatcgggaaaagtatgcaggcatgtggagcactggaatgttcccaaaaaggcattgttcaagcaaattctaaggcctagtcgtggatttggcttaaaagattatgtgaataggtggttgaaagcagtgcagatgaagctttaaattacaatagttctgtgatggtgtcaacaatatatatagcttt

SEQ ID NO: 22816 - DNA, 327 bp, Glycine max
atcagttacaaggccagattcccaccagccttggccagatgaagaacctgaagtttctttctttggctggtaataggttaaatggtttaattcctaccagcctggggcagttgtactctttgaaagtcttggacctttcgtcaaactctcttactggtgagattcccaaggctatcgagaacatgagaaatctgactgatgttttgctcaacaacaacaatctttctggtcacattcctaatggtttggcacatgtcgctacactctcagcattcaatgtgtctttcaacaacttatctggatccttgccttcaaatagtggcttga

SEQ ID NO: 22817 - DNA, 294 bp, Glycine max
ggagaattgaggttggagttggagtgagtaacccagcacagcaatggcattgagactgagactcaaagtgtcttcaattgggtcaccttttctgcagttaggttcttctgcaagtgcagcatgctctgtttccaaacttggttttcatccaccacgcttgcaactcaacaaaaattcacacccaataaggctttttgttcgggctgctagaattgagtccaaaggtgttaccttgggtttcaggaccccacaatttcagcttccggagccccttaccgggacgacctggacatt

SEQ ID NO: 22818 - DNA, 345 bp, Glycine max
gtgattgaagaagagaatgatggggaattgaggttgtggtgaatgttggagttggagtaacccaataatggcattgagactgagactcaaagtgtcttcaattgggtcaccttttctgcagttaggttcttctgcaactgctgccttctcattctcccaaccatgctctcttcccaaacttgcttttcatccaccacgcttgcaactcaacaaaaattcacacccaataaggttccttgttcgggctggtagaactgagtccaaaggtgttaccttgggcttcagggccccacaatttcagcttccagagcctcttactgggaaggtttggacattggaagattt

SEQ ID NO: 22819 - DNA, 432 bp, Glycine max
ccccggcccgatcatgtcccagcaaaagcggttaagaggtctggctcaaaacctcaaagacaaagcctcggtgatcgccgcagcgctatccaccaagcgtcacctctcttccgtccgtgtccacgtgctccgcgccaccacgcacgccctcgcggcaccaccctccgaggaaacaatttctgctgtcctcgcggtcgggcacggcggctcccaccgtcatccacgcgcgtgcatcgacactctcatggaccgcctccacaccacgcgcagtgccaccgtggcactcaaatgcctctacactctccacaacgtcgtcgtaaagggacccttcgtattgaaagaccaactatcttgttacccttcttacggtggccacaattttcttaacctctccaccttccgagacgtctcggacttggaatcgctcgaact

SEQ ID NO: 22820 - DNA, 396 bp, Glycine max
aaatcgattaagaaatttggctcaaagcctcaaagacaaagcctcagtaatcgctgcagcgctatccacgaagcgacacgtgtcctccgtccgcgtgcacgtgctccgcgccaccacgcacgccctcgccgcgccgccctccgaggaaacaatctccgccgtcctcgtggtcgggtcccaccagaagcgccaccctcgcgcttgcatcgacgcgctaatggaccgcctccacagcacgcgcagcgccaccgtggcactcaaatgcctctacacactccacaacgtcgtcgtaaagggacccttcattttgaaagaccaactctcctgttacccttcctacggtggccacaatttcttgaacctctccaccttccgagacggctcggacttggaatc

SEQ ID NO: 22821 - DNA, 275 bp, Glycine max
gactgcagtgatcgtattaatcagctagccacaaggtacccaaatagcctcaggctataaatttcaatacccctctcgccaattgatctgttttaatttgtacttccacttccacattgcatctggtgtgttttttcttctactatagctatctttcattctctctctagctacacacaacctctgtatattctccgcgcgcgctttcgatcgatgctattatagtgttccctagctacctgatggctctctcttcatctcaatgctaatgcttc

SEQ ID NO: 22822 - DNA, 879 bp, Glycine max
tcggcaccagtatagagtgtaataatttttgaaaaacctctgtctctgttgtttctgatgcaaatctccgttgtcgttggtgtttcggtctgaaatcaaatcaaaatcaacactgtgcgctgcggttagaagagattcaatctgaatctgaatggaagctatcagaaagcaagcctccaaacttcgagaacaggtcgctcgtcaacaacaggctgtgcttaaacagtttggggctgggggatatggaggttcagataatatggttactgatgaggtagagcttcagcaacatcagaaacttgagaagctttacatatcaacacgtgctggaaagcattatcaaagggatattgtccgtggtgtggaaggttatattgtaactggatccaagcaagttgaaataggaacaaagttatcagaagatagcaggaaatatggtgcagataatacatgtaccagtggtagtactctgtcgagagctgcgctaagttttgcgcaagcccatgctcaaattgagaaggagcgtggaaacttactaaaagctcttgggacacaggtagtatatacatgttgatatgtaagtatgcttatgtgtggagtgtttatgtatgagttcattgagcagtacttgcaattgcaagattataaggttcaaatctgacttcacagaagtaatgatggggatttccccctaactgaactggtttactggatatgaatgagatttacagatatttaagtacatttaatctaatgaaaaaggaatatggaggccatattcaagttcaatcgtgaatagaatttaatagccatgctcgtatactgagttcatcaatctcacgctatctatactggtggctcatattattgatttaccta

SEQ ID NO: 22823 - DNA, 888 bp, Glycine max
ctcacgcgtccgcccacgcgtccgcccacgcgtccggcaattttgaaaaacctgagtgtcccttttctctcttccgatacaaaagcccgttgttgttgtgtttcggtctgaaatcaaatcaaaatcaacactgtgcgctgcggttagaagagattcaatctgaatctgaatggaagctatcagaaagcaagcctccaaacttcgagaacaggtcgctcgtcaacaacaggctgtgcttaaacagtttggggctgggggatatggaggttcagataatatggctactgatgaggtagagcttcagcaacatcagaaacttgagaagctttacatatcaacacgtgctggaaagcattatcaaagggatattgttcgcggtgtggaaggttatattgtaactggatccaagcaagttgaaataggaacaaagttgtcagaagatagcaggaaatatggtgcagaaaatacatgtaccagtggtaatacactgtcgagagctgcactaagttttgcgcaagcccatgctcaaatggagaaggagcgtggaaacttactaaaagctcttggcacacaggttgcagagccattaagggcaatggtggtgggagctccattggaggatgctcggcatcttgctcaacgttatgacagaatgcgacaggaagctgaagcccaggctattgaagtttctaaacgccaggcaaaagtaagagaaatgccacccaatgcagagaatgctatgaaattagaagcagctgaagctaagctgcaagatctgaagacaaacatgaccatactggggaaggaagcagctgcagctttggctgctgttgaagcacagcaacagaggttaactcttcagcgtattatagctatggttgaagctga

SEQ ID NO: 22824 - DNA, 411 bp, Glycine max
atataaataccttgtgctttagaaaagtgataattgcattgtaactgtctttatttgaaagaagaaataaaaaaatgttttgaaaacagacaagtttctcgaggaagcgatccaaagcccaatgaatgaatggttatcgttttgaagaagcttttgatggcagtgctctgagactgaatcattgaaactagattcaatttattcgctcctttcttcaccaaaattgaattgaatggatgctatcagaaagcaagcctccaagcttcgagaacaggtcgctcgccagcagcaggctgttctgaagcagtttgggggtggcggttatggaggttcagataatgtggttactgatggagtggagctccagctacaccagaaacttgagaaactttatatatcgacacgtgcggg

SEQ ID NO: 22825 - DNA, 264 bp, Glycine max
atagacaccattcacttcttcatatgacggaggtggtggcatggtgttatccagactaggagtagaaggggtttcaatttgtcgtcgttctgatgtcacttctccctcaagctgatcaagtatttgtaggactatttgatgataggcacgctcagcttcaaacatgaccatactggggaaggaagcagctgcagctttggctgctgctgaagcacagcaacagaggttaactcttcagcgtattatagctatggttgaagctga

SEQ ID NO: 22826 - DNA, 279 bp, Glycine max
gtgaaaaagcaaaacgtgagagctggattgaatgacgatgggatggtcaacactgaggattgttccaagtgtacacaatttgtggatcagagatgggatgagaatgataatgaggagattcgcaatcgatttgtgactggcaatttggcaaaagctgcacttagaaatgcattaccagcagctaatactgaagaggaaaatgatgatgtctatggtgactttgaagatttggaaacaggagagaagcatgagaatcatcagacggatgatgctttggct

SEQ ID NO: 22827 - DNA, 415 bp, Glycine max
gggcgatgaatcgaggcgcaaaagagttgcgcggggatccttcttccctcatgatggcttcaccttcaagttcagtagagtagagtgagcgaaagtggaaaacaaaaatggaggagactcaagtgctgcacgaactccacaagctatcacagatagaatcagaggaaaccctaaaccaaatgctatgcaccctttggtccactcgtaaaacgggtcttcccctctccgacaagtcccatttccaatccctcctccacctcccttccccctcccatctcgaccccgttttagcgtgcctccgttccctcgtcagaaaatgcgcgcaccagaacctcgcccgcgacgaccttctcagactgtttccccgcgatcttccgattcagttgcaaacgaatttggtatcagcgttgcagag

SEQ ID NO: 22828 - DNA, 525 bp, Glycine max
attccatttggaatttccatccagtattttatgttgatgattatgatttaatttctccataatgagtagtgaatatttggtgggaaagttaacttttccaagacgatgatgtttgtgagtcaaatcaacacagcattggatgcacacgctacaaaataagacacagaggctgtgcctcaaagttggttggattagatatgatatgatgattttctctagaacagaggcagtttctcaaactcgttgcctccgaactttcactttctctgaattttagctcaaaaagttcgcaaaagcgctccctacctctgttgggtctgtttcaaatctgcaatttgcatacgtgtggagccataagcttgctatgtatcattgaataattctgctgggagcatccatctcaaagacaggaacatttggatcttgaattggaggtgttactaatagaagcatggctaagagtgtggaaggtataaaagggggaggaggatccatcaagctaggtaccactggaacaatcagttc

SEQ ID NO: 22829 - DNA, 288 bp, Glycine max
ctcctcaatccacataccagtgccagagggagattaaagaatctgctgccgccatcaaaattcaaactgcatttcggggttacctggcaaagaaggctttgagggcattgaagggaatagtgaagcttcaagctatcattcgtggccgagcagtaagacgccaagctatgagtactcttaagtgcttacagtccattgtgagtatccagtcacaggtctgtgcaaggaggctccaaatggttgaagggagatgtgattactctgaaaatgaagacatgcaagattcta

SEQ ID NO: 22830 - DNA, 289 bp, Glycine max
atgctggatgcccgtggcaatttattggccgtttgtctctctttgacccacccaggcatgatagtgcagaaacaatacggagggcactaaaccttggagtcaatgtcaaaatgattacaggggatcagctagctataggccaggagacaggtcgtcgcttgggaatcggtaccaacatgtatccttcatcagctttacttgggcaggccaaggatgaatccattgttgccttgccaattgatgaactaatagaaaaggctgatggatttgctggtgtatttcctgagca

SEQ ID NO: 22831 - DNA, 991 bp, Glycine max
tttccgtctcacgcgtccgcccacgcgtccggtccttctctgcgtctttggatctctctctctgcgtctcctctgagctcagatcctctgctgtggagcctttctgcctccgctacacccccaatttcttctccttctcgcttagggttttcatctccatttccgaaaccggttaaccggttcaattttttctgttttcgtgctgaattttgaagtcgcagctcgatcttcgatctggggtttcgggtgaagtgaccgacacggtaggtagccggtgacgttgctttgttgttggatctgttcccagaaaaaaaaggaaggagcaaagaaagaaaggaagaaagaagaagatgcagcaagatcagctcaagaaggatattaaggaggtagagtttttcactgagtatggcgatgccaacagatacaagattcttgaagttgttgggaagggtagctatggagctgtttgttcagcaatcgatacgcacactgggggaaaggctgcaattgagaagattcatgatatttttgaacatatctctgatgccattagaatcctcagggaagtcaagttgctaagacttttaagacaccctgatattgttgagattaagcggatcgtgttgccgccttcaaagagggagtttaaagatatttatgtagtctttgagcttatggagtctgatctccatcaggtcatcaaagctaatgacgacttgacccgcgaacaccatcagttttttctttatcagatgctacgtgcattgaagtatatgcatacagctaatgtatatcacagagaccttaagcccatgaatatactggcaaatgcaaactgcaaactcaaagtttgtgactttggattggcaagagttgcattcagtgatgccccaacaacaactttttggacggattatgttgctacaagatggtacagagccccagaactatgtggctccttcttttcaaagggaggactattgatctctcc

SEQ ID NO: 22832 - DNA, 548 bp, Glycine max
ctcatcatacgtgggcaagaaaacaatcttatccacatggacaaatccatggatataggatgtcactttgggcagaacatacaggaacaattgaagagtgctttttgcaacccgagagccttgaatgtgtaagaagggttaaagcaatgggtgaaatgaactggaaacaattttcagctaaggaagcaacagagatgaaagggcatctactgaaatacccggtagaagttgatcgaaatggcaaggttagaccccttcaggactgtgaagagttcccggatgtgggaggaaaaatagttggatcttttcttgctatgaaggagaacctaaccatttgatattgagtttattacttattagtttgagtgttttcacattatgctagccaataggatatggtgtatgtatgtacattacaacatagaaacaattttgaaaagcatgatagttgaagaaacaattaccaacccaaaatccaaccaaataaagacaccatactgaaaaagaccaagtgaagatgatgtacaaatatacagctaagttctatt

SEQ ID NO: 22833 - DNA, 678 bp, Glycine max
cttgagtgagaagagatcagcactggaacttgcaatctcaatgtcagaaacttccgatcagattgataatgttgctgattcagtagttccttcagtctatgtgggccaatttgcccgattactcgagcaaggagatgatgttgatatgctacctctcactgatgaagaattcatccgctacgccgtttctgaaggaaaaaggttccgagattcacttgaaattattgctcttcttaaaaaagcttatgaatcctacagcagtatgaatattcagaggatgagctctttttgtgcattccagatgtccagagaatattttgctgaaggtgatatcagtaatgcaaaaaagacttttgatagtatagctagcctatacagaaaagagggatgggtaactttattatgggatgtcttgggatatttgcgagaatgcgccaggaaaaatggtactattaaagattttgtggagtattcccttgaaatggctgcgctgccaatatcatctgatactggtgtccagagagacattggtccagctggtcctgcaaatctactgcaaagagaaattgtacagaatgaggtttttgagcttgtcagtggagcttcaggaaaggaaacaaatgaacaccccggtaatctcaagatcatgggagatgaatcacttcaacttgaggttga

SEQ ID NO: 22834 - DNA, 386 bp, Glycine max
gtttcaaagtctccctctctctgttttcatctttctttcgcttcaaatcttgcattctattttcactccctcaaatcctctcgctgtttcacctttctcatgccgttcttctctgttatttgagtcaaaggattatccccatgtcagttgcaccagttgacggtattccctcattaaacagtgatctcttctatgatatatttcgtcgacttgatggtgcaacattggctagtgcagcatgtacttgtgcagcgctgtgttccatctcaaaagaagagaatttatgggagaatgtatgttcatctatgtggccttcaaccaatagagaggatgtcaaaagtttaatatcttctattggtggattcagaaaattctatgcagattgt

SEQ ID NO: 22835 - DNA, 421 bp, Glycine max
tataaaagtaaggtcaagaataaatagttacagaaactatcaaataataatgtatgtggtgtttagttgactggtaagtaagggaaggtagaaattgaggagattgaattgcaatagcaatgagtgtgtcttcaaattcgaaggaatcgatggaattatgcatatttgatttgcggagaggccaacacgaaggccaagagctcgataagattctcttcttcttccccgccggtttgcccttttcaaagcaactctccgtcattggcctcagcgaaggactcatcactttcactagaatcttctcgccagacgctgcctgcgacgtcatcgaagcagaaagacattctcatgttttctacgaggccgaacccgatatctggatagtcatggttgccgacaaaagctatgattcagaacctat

SEQ ID NO: 22836 - DNA, 704 bp, Glycine max
ctccgctttcgcccactgtgccgcttccgctgtctgagacatctgaatttgctaggagatgggttccattgtgtaagacatacaatattgagccccgggcaccagaatggtactttggtcagaagatggactatctgaaaaataaagtacacccagcatttgtcagggaaaggagagcaatgaagagggattatgaagaatttaaggtgaggattaacagtttggtggcaacagcacaaaaggttcctgaggatggatggaccatgcaagatgggactccttggcctggaaataatgtgagggatcatcctggcatgattcaggtcttccttgggcaggatggtgttcgtgatgttgaaggaaatgagctaccccgcttggtctacgtttctagagaaaagaggccagggtttgatcaccacaaaaaggctggtgcaatgaatgctctggtacgggcttcagcaattatcactaatgcaccctatcttctgaatgttgattgtgatcactacattaacaatagcaaggcacttagagaagctatgtgttttatgatggaccctcaacttgggaaaaaggtttgctatgtgcaatttcctcagagatttgatggaattgatagacatgatagatattcaaacagaaatgtggtatttttcgatattaacatgaaaggattggatgggatacaaggtccaatatat

SEQ ID NO: 22837 - DNA, 604 bp, Glycine max
ctttatttttttggcattcattcatacccaacaacttaacaactcctccaaccctcctagaccacgaaaaaacaaaaaaagacaagcgataaatatagggaaagaaagaaaaaccgaggctttgctcaatttcagtgaagaaagtgaaagatgggtaatcgtttcatctgcatgacgaagaaggagtcgaaagatgttggatcgagaagcaagagaatgggtagatcacagaggaagctggtgagtgaggaagagctgcatcttcaggcactttctatggcacttcaacagcatcaactgtctcagaggtttgaaggctccatgtctaggagaattggctcctccagaaggcacgctgtctctgaatctttttcagccaacaagcaggttccagtaaatctggagaacattaaaataaagaagtttgtactaatccatggagaaggttttggagcatggtgttggtacaagatgttgcccttctagaagaagcagggctgcttcctgttgccttagatcttacaggctctggaattgatctcacagacaccaacaacgtcactacattggcagattattcaaaacctttaactgtttatctgca

SEQ ID NO: 22838 - DNA, 307 bp, Glycine max
  unsure (1)..(307): unsure at all n locations
atacacaacaacaacttaacaactcctccaaccctccgaggaggctttgctcaatttgacaagatgggtaatcgttttatttgcatgacgaagaaggagtccaaagatgttggatcgagaggtagcaagagaatgggtagatcacagaggaagcttgtgaccgtgagtgaggaagagctgcatcttcaggcactttctatggcgcttcaacagcatcaattgtctcagaggtttgaaggctccatgtctcggagagttggctcctccagaaggcacgccgtctctgaatctttttcangcaacaagc

SEQ ID NO: 22839 - DNA, 558 bp, Glycine max
ggttcccttgaaccaaaccaaaacggcaaaaccaaatctatttctctgttcacattttgtgtcgactcgactcgactcttctatttaatactcgtacgaggtacaaacaacacaacaccctctgactctgtccctttctctctctcaaactaaaaactaaaacccattttcttctccaaaaccttcgactttcttttctctaaccgaaacgcgcttcgcagcacttcttctccactctctcacatctctgacccattgcgctatatttacgcactgtgtcaaattcccccataaaaccggtattgattctccctcagatcaaaatagagttctgagaggtagcagtgttactggcaatgaaaaatcttctgtagcttctattccgcactcaaaattgcattgtgacatggaggctcaaattcatctacttgaacaggaagcttactctgctgtcttgcgtgctttctcagctcagtccgatgctcttacttgggagaaggaaggtttgataactgagcttagaaaagagttgagggtttctgatgatgaacacagaga

SEQ ID NO: 22840 - DNA, 641 bp, Glycine max
gcattgtgaatgcagtgcgtgatggtttgaatttggttccatacaggtacactgtgtgtaggcagggaagttctaaactagacgaagctttagaaatcgcttctgactccccgcgtgtaagcgcacttgtcgtttctgagtttataggttgctcaccatctcttagtggggcaataagggtaaacccatgggatattgatgcagtagctgaagcacttaatttggcaatcacaatgcctgatggagagaagcagcttcgacatgaaaagcactatcgatatgttagttctcatgatgtggcatactgggctcgaagcttcgagcaagatctagtgttctcgtgcaaggatcactatagtaaccgatgctggggctttggctttggcctgaacttcagaattttgtccctatctcctagtttcaggaggctatctatagaccacattgtccctgcatatgaaaggagcagttgcagggcaatctttttggattatgatggtacggtgtgcctcaggcttccattgttaaaccgcccagtcctgaagtcatatccgtgctaaataatatatgcagtgatgttagaaacactgtgtttattgttagtggcaggggaaaaacctcactgagtgaatggtttgatc

SEQ ID NO: 22841 - DNA, 442 bp, Glycine max
gcgatgggattcgatcaccaatagctaagtggatggggtttcctgagccaaagtatgttggtcattgtgctttccgtggacttgcgtcttattcagatggacaaccttttggaccaagagtgaattacatctacggaagagggttgcgcgctggatttgttcctgtttctccaaccaaagtttactggttcatctgcttcaatagtccatctgcaggtccaaaaataactgattcattggagctgaagaagcaagctaaggaactggtgaagaattggccttcagagctattgaacatagtggattctacgccggatgacactgtcattaagactccattagtagataggtggctttggccagccataagtccttctgcttctgcaggaagagttgtggtggttggagatgcatggcatccaatgaccccaaatcttgggca

SEQ ID NO: 22842 - DNA, 429 bp, Glycine max
cccacgcgtccgactgcactttccttattggcaataataatggcttcccttctctcatctaattctgctgctcctagtcattatgaagttaatcctaactcaagatttgaggctactttgatagaagaaacatgtagtgctcaaaaaccaaaagggaccaaaggaggagaaacttcaggttggaataataatgagagagaagagaagggtacgtgcttgagttggaaggatgtaagggtgactgcttctgtgggaaagaatggaagcaaatcaattcttgagggtctaactggttatgccaagccagggcaactcttggccataatgggtccttctggctgtggaaaatctacacttcttgataccttagcagggagattaggttccaacacaaggcatactggggagattctgatcaacgggaagaaa

SEQ ID NO: 22843 - DNA, 439 bp, Glycine max
ctcgagccgctttctccctcctctttttctcatccaccaacaccaattcacttttcttcttcttcttcttcttcttccttcattttcttctctgcatctcacactgatcataccccaaacaacccttttgagatatgtttatggttatggattcagcagaaaggtgcttagattctcaactatggcatgcctgtgccggtgccatggttcagatgccacccctcaacacaaaagtcttctactttccccagggccacgctgaacacgctcatgggaaggtggaatatttcgggaaaaaccatcaaacccgtgttccaccactcatcccttgcagactctctgccatgaaatacatggcagaccctgacaccgacgaggtttatgtcaaaatgagactcacccctttgagggaacatgaattattggattcacaagatga

SEQ ID NO: 22844 - DNA, 346 bp, Glycine max
cttcggggttaagcactgtcacagtaccgatggctataacagctggagctgctggtgtgggtgtaggctctgcagttaatagacttaatgatgtggttgctatgattgctgaggtcagaagcattgctaattcattgcagacaccatttcagatatccactgcacatgaagtggaaactcaaagacagtaggttaatgttgcaagaaacagatgaaggaggtgtaggtagtgaattaaacatgcaaagaatattaagaactgatccaaatatttgtgttcctgtgtggatgctaaattaaaagaaatagtgacctatttggaattttgcttcgttaatgggtggag

SEQ ID NO: 22845 - DNA, 366 bp, Glycine max
agctggttttcttcttccacccttttttaatttctctctcctcttctctgaagctatcaggttgcatgagcgtctccaggaatgcaatggagacgaagtattgaaggcagaagctggtgctaaggttcaaaagtttactgaatgggctctgaaatgtataggcatccattcacgactgcaggatgatagggaaaatgtgatacacagctcagccgttgaaatccagctccggttatctgccttcaagacattcctcgatcttgccggcagccgccttacagggaaggacttcagcgaggcctttgatgcggcttgttttcctcttactcttttctcaagctcatttgatccaggttgggcatttgg

SEQ ID NO: 22846 - DNA, 277 bp, Glycine max
attccatctggttcttgagcacagagctagagcttaatgggataatggtatttatcaagaagatcattgctaatggtgcttatgacttcacaagagctgctctaaggacttcattccttgcttcatgtgtctctgcttgccagagtagtacaatgagtcttgctgatacagttactgtaatggcccaaaggttgcatgaacgtctccaggaatgcaatggagatgaagtattgaaggcagaagctggtgctaaggttcaaaagtttactgaatgggc

SEQ ID NO: 22847 - DNA, 527 bp, Glycine max
cagtttggtgtggttttggatctcacgactctcccttctgcttgcaaatctgcttcttctgccaccaactgcggattaaacccagagatggagtggtgtgtgtcaatgccaaagattgagctgcatgctcacctcaatggatccatccgagactccacacttcttgaactcactaaggctttgattggaaagggtgccattaatttttccgaagtggagcatatcatcctcaaatataaccgttcagtggaagaagttttcaagctgttcgacctaatccacattctcaccactgatcacaacactgttgcaagaattaccagagaagttattgaggattttgcatcagagaatgttgtctatctggagttgaggactactccaaagagaaatgattctgtgggaatgagcaaacgctcttatgttgaagctgtactgaaaggtctaagatcaatcacttcagttgatgtggatttcattccacatgtgaagattcaaagactctttattatcctgcacggctattg

SEQ ID NO: 22848 - DNA, 447 bp, Glycine max
gtgctcagtttggtgagggtttgaatctcaccactctcccttctgtttgcaaaactgctccttctgccatcatccgaggatcaaagagaaaaacaagagatggagtggtgtgtgtcaatgccaaagattgaactgcatgctcaccttaatggatccatccgagactccacacttcttgaactcactaaggctttgattggaaagggtgccattaatttttccgaagtggagcatatcatcctcaaatataaccgttcagtggaagaagttttcaagctgttcgacctaatccacattctcaccactgatcacaacactgttgcaagaattaccagagaagttattgaggattttgcatcagagaatgttgtctatctggagttgaggactactccaaagagaaatgattctgtgggaatgagcaaacgctcttatgttgaagctgta

SEQ ID NO: 22849 - DNA, 287 bp, Glycine max
ccaccgtttttgtctttcagttacattcattcattcactccttaacatagcattttctaccatttaccaaagcaaagagaaaaacaagagatcgagtggtgtgtgtcaatgccaaagattgaactgcatgctcaccttaatggatccatccgagactccacacttcttgaactcactaaggctttgattggaaagggtgccattaatttttccgaagtggagcatatcatcctcaaatataaccgttcagtggaagaagttttcaagctgttcgacctaatccacat

SEQ ID NO: 22850 - DNA, 396 bp, Glycine max
tttgtttgctaacagaccaccaacgccaactagaggtcgccccccagtaacaaatgaccgaggttcgctggcttggatatagtgatcattatgaatgtccttcaaatttatgccgtactggctcgtgctatcagccttgttttagtgttatgtatatagcataatgccatttacgggagtctcttcgaacctgtgaacttaatccctgcagaaagttttggttctcatcactccatcagcaggccctgataagataagatatacacgttccgcatcaaaggttggtagccactgttacgtttactttgaccaagctagaacgcaattcaagttccccccacccgtttgtaaattgagcatagtttacgacatcaaggttatggttgtcatggaggc

SEQ ID NO: 22851 - DNA, 490 bp, Glycine max
ctttttgctgtgattgctgactggttccaaaataatcgtgatcttatgcccataaagtcgcagtttgatagtctaattagagaaggctcctcagaatggaggaacttatgtgaaaatgatgcctacagagagcggttccctgacaagcattttgacctggaaacagtcattcaagcaaaaatacgtccgcttactgtggctcctgggaagtcctttattggtttttttcatcctgaagggatggatgaaggcagatttgactttctgcatggtgccatgtcttttgataatatttgggatgagattagtcgtgctggacaagagtgccccagcaatggtgaacctcacatttatattgttagttggaatgatcattttttcatccttatagttgaatatgattgttattacatcattgacactttgggagagagactttatgaagggtgcaacaggcatatatcttgaaatttgacagcaacacaatgat

SEQ ID NO: 22852 - DNA, 563 bp, Glycine max
tttccgtgcttttcgtcgccaaaccagctctctcaattaggggttcgcgataaatggctcggttcgttcttccatcgaagacactgaccttttcgaggaacactcttctgggttaattgcagtgttagttattttcagaatacagcaagagggagcatcagattcaagcatttccttgcttcagaggtcactttccgaaagaagtattgcccattatattcttcactaccaagggtcaagcaagtaagtaggcgactaatttgttcagttgccacagaggatttaccaaaggaagttgaaaaatctaacatggagacaccaagggaaatattcttaaaggattacaagatgcctgattactactttgacactgtagatctgaaatttaccttgggagaggagaagaccatagttagttctaaaattgctgtgtatcctcgcattgaaggttctactcccccactagttttagatggacaggacttatctttagtttcaattcacctgaatggcaaggctttgaaggaggaagattatcatttggatgcacgccatctcacaat

SEQ ID NO: 22853 - DNA, 370 bp, Glycine max
  unsure (1)..(370): unsure at all n locations
gaaatttagacgtttctctaactccgatattatcactctccccacttgcacacacacatctctaggttaagtgccagccctcattggttcagaagagtgtgcaagctggcacctttgcatgtgaattctatatcagcaggagaggaggaatgaaagattcggataaattaacgtgggatcagggtcgatgtctgagtcccgcacaggcacgttcctcggcctcacagaagcttatggtgtcgctcatgttcttggtttccctcacctacatggcttacactctaaagctggtttccacgtccacatcatcatacgagtgcagccacgctcctttcatcatcaancacctcttcccttcctcaaacgtaac

SEQ ID NO: 22854 - DNA, 511 bp, Glycine max
ggcgcgtgttgacgagactggcagagtcgccggctgaggatttgatagaaagatagacagataaaggtttcttcttcttcatattcgccacttcaaatttcacattcctttggtgcttccttcgtagatcccactctctctgcttcttcgctttacctcactctcagatggctgcgaattttgggaatatcttgtttacgtcgtctcagtctagctcacaggttcatggggccactgattctgtccaggttgcagtgtgttctctttgtcaaaaggccctatcacctgataatgagatggcaagcgatcttgctagcagtggtgtgtgtggtgattgtaaatttttgttacttgaagactttgggaatcatacagttacccaaagctcacgaaggaggcttagaggaagattcaggcacaatagttctgaatcccgtgagaataatttctcacagcagatcccccatgtggttaatactgtgaggcaacatcagtcagctgcttctgggga

SEQ ID NO: 22855 - DNA, 312 bp, Glycine max
ggaggttatcataatgttacgactaccagatgctcaatgcaaccacagaatgataatcttcattcttctattcagtttgataacactgcatttccactacaaaaccagctaatgagtgcttcacaccattctcagtttccaagaaatgaaaatgggctaactcttggtacacgacaaccagccactcctggatttcagaatgtcagcatttcaaatcctaattatagaggattggaggactacttcccagaggatgagattcgaactagaagtcacgagatgctagaaaatgaagatatcgcatctgctccg

SEQ ID NO: 22856 - DNA, 321 bp, Glycine max
ggtgagtgggaggcattttgatttgagaatggcatcagcgtgtctgaaattgagaaatttgagcagaggaggaggagcatttaggtgtgggcgttattcgaagttgatacatgcagagagagagagagaagaagaagaagaggaggtgccgagttctagaatctctaggccgctctctgaaatactgaaagagctgaacaagaaagtaccggactccctcgtcaaaacccgcctccagaaagatcaagatgcctcccccatcagattcattccctggctcgttctcttccgcattttgaacttacacgcctgagtggtctg

SEQ ID NO: 22857 - DNA, 565 bp, Glycine max
atggattttggtccaagagggtcatctatgttatctcccaatgctcagatgggtggactgcgtggattgcctactcaagttcgcgggtatggttctcaggatgctcgcatggaagacaggcaaacttatgaggctaggacattgtcagttcccttgcctcagagacctttgggtgatgaatccataaccttgggaccactgggtggccttgccagaggaatgtccattagaggtccacctgcagtttcaagttcaactggtcttaataatggttataataatttgtcagagcgcacttcatacagctctagggaggaccctgcatcaagatatactccagatagatttgcgggttcgactgcttacgatcaatctattgttcaagatcgtaatatgagttatggtaacagggacttgagaaatgcaaataggattcttgataaacctgttgtgacttcacctcctgcccgaacacaagggacagcagcctcccagagtatttctccagagcgactgcaggacatgtccatggcagcagtcggagagtactatagtgctagggatg

SEQ ID NO: 22858 - DNA, 289 bp, Glycine max
cccaatcctcttcctcttccctcaaatcataacacattttctctctttcccttctctgttccgttccttctcgcgcgatttgcatattccgaaattgagaaccccacccgcgcgaaaattgaaggcagagaagggcaaaagatttgatctttcaaacgaggagtttctggggtgtcccaggatgaggctaaacggtgaaatctcaagcggagaagaagaagaagaggagaaacaaacgggaacgacgacgttttcgtcgcagaaagtggtcgtggctacgctttaacgt

SEQ ID NO: 22859 - DNA, 986 bp, Glycine max
tcgagatggaagaagcattgaagaaccaatagtaaaccctccttatcagctatcactttgaaaacccgcattcggccaacactatacaataccataaccttatctatcgcaaccacctcccaaatcactctcatccaacttcatctctctcttcccccagttgccagatctgaatcacaccttcactcttgcgatttaattactgagtagttgaggatggctccttttgcttttgcaacattgccctcttctcacatctgccgcctcccaaagcccacaaacttgaagtttcgagttcgctgctctactgccgcgtcttctccttcttcggtttccactagatcaaaagctgctggctttgatttgaagacatactgggccaacctaatggtgcagatcaatcagaagctggacgaagctatcccggttcagtttcctccgcagatatatgaagctatgaggtattcatccttgccaaaggtgccatgcgagccccacctgttatgtgcatctctgcctgtgaactctttggtggcagccgccttgccgcctttcccactgcctgtgcccttgaaatggttcatgcagcttcattgatacacgatgatcttccctgcatggatgactccccctcacgccgtggtcagccttcaaaccataccatctatggtgttgacatggcaattcttgcgggcgatgcactctttccccttggatttcgacacattgtttcacaaactccatcagaccttgtgcctgagtcgcacctccttcgtgtgattgccgagatagcccgctctgtaggatccactggaatggctgcagggcagttcctggaccttgaaggaggacccaatgcagttggatttatacaagaaaaaaagtttggtgaaatgggggagtcttctgcagtgtgtggaggattcttggctggagctgaagatgatgagatagagagactgatgaggtatgggagagctgttggg

SEQ ID NO: 22860 - DNA, 286 bp, Glycine max
catgttcttgtacagtgtcttatattgtttgattacttgcaaggccccgtggtaaaaaggtcgacaagggattctgccatctgaaaacatgaaagaagagattacatcatgggaggaacgtgttaaaaaacttcttgaactgacaccaccaaaagggacagaatttcttcacaaaattgagcatatattggaacgagaaaaaaattgggtgtggtggaaacgtgatggctgcctcccatatgaaaaacaacgtatagagaagaaagcagtaccagtggcccaagaa

SEQ ID NO: 22861 - DNA, 582 bp, Glycine max
tctcgactccacaaactgacagaaatagtcgaaaagtataaggaacttcatggtagattaccgattattgttgccgaaactcttctacgctcagatcctaagattgaattacctctttggcttgtacaattgttcaaggagggtcaaaaagaaaggtcgtgggggatgactggcagggaatcaaatcctgcatctttatttcagctttatgttagttatgatcgatatgcagaagctacttatcttttgcttgactgcatagactcatttgcttcgatgagaccagcagatataattagaaggaaaagaccattagctgtttggttcccgtacacaactattgagcggttactataccaactcgatgaattaatcagaatgggtcgcatggtagatcactgtgacaagctcaaaaaaatgttacatggttctttacagaatcatctgaagatgttgaaggtggactctgatgatgctgtttctgtatcttcttgattgctgcttacactgaccaccggaggttgtagatactagagtgttcacgttgctcttaattactcgctgtattaactgcataatatc

SEQ ID NO: 22862 - DNA, 339 bp, Glycine max
cgaaatagtaaaaaagtaagaaagatcccttcagcagctgcaaatgctaatgagagcaaggagcctttgacagatcccactctcctgtgttgtgccttcaaaaagcacaggatatatttattcagtcgaagagagccagaggagcctgaagatgcaactaaaggaagagatgtgttcaatgaaaagccacctgctgatgaacttttggcagtatcggatattggaaagtcagttacaacatcacttcctgacaatgtgattctacacaccactatgggtgatattcacatgaaattatacccagaggaatgtccaaaaactgtggagaatttcactact

SEQ ID NO: 22863 - DNA, 367 bp, Glycine max
  unsure (1)..(367): unsure at all n locations
tgatttgttttagcaatacaagttctcacacttacaaaacacgcatcttaagcgcttgaagaatgaaagtctcaagggtgtatggctttcaaagagatcaattcatgaagtttcataggaaaactagattgacctcttcagtgacacttggtagtgtccaaagaagggcatcacaagggtcattagggtgtttccctccatcatgcattttcaggcaagtgttttacaagttgaagagtcgattgaagcaagctttggtttggcaaaggagtagtagtccacagtatagctacgattttcgcagctattctctcaattttgatgatggcctttcaagtgaccacattccacctcgcttnttgttgat

SEQ ID NO: 22864 - DNA, 513 bp, Glycine max
ggcgaatgcttggcttggaacatgaatctaagaggggttacatagggcttgaatactttggccgtacaatattcattaaaatattgcctccagggattcacatgggtcgactgcaatctaccttagatcacccttcctcttccaacaaagtcagagaaatccaccaacaatataaggggaaaaagcttatagttggtgttgatgatatggacttattcaaaggtatcggtttaaaattcttggccatggagcaactcctgcagcaatatccagaacagcaaggtgaattaatattgatccaaattttaaatcccccaagtagttctgacaaagatgttgaggatgcaaaggaggaggcctacatttcagccgaccggatgcatgaaaggtttggtttggaaggttatgaacctatcatcatcattgatcgccatgttcctttctacgagaaggcagcctattatgctttggcagaatgttgcattgtgaatgcagtgcgtgatggtttgaatt

SEQ ID NO: 22865 - DNA, 535 bp, Glycine max
tttaagtttatcttccaagttcacgtaccatcgcttttataaataccctcatccagtttcccttccaagttcgaatattcaattcaacaccttccctcattctcttctccaaacacgacacaaacattaagaagaagaaacataccacgaaatgtacggacaaagtagctatgagtccgatttggcccttttggactccattcgccgccacttacttggcgactccgaggagcacaaattcggagccccgaatgttagttcgggtaacactccagcgtactctcggagctcctgtttcagcaggttgtacccttgcttgagtaacgattggggagaacttcctcttaaggaagacgattcagaagacatgcttctttacggtgttcttcgcgatgcaataaacgcagggtgggtcccatctctcgatgcatcctcaccggagagtttctcgtcgggtttcatcccggcggtgaccgtgaaatccgaaccggatctatttccggcgccagagcctgtctatattcctccggcggct

SEQ ID NO: 22866 - DNA, 772 bp, Glycine max
cagaatttttctcaaaagtcgggagccgggaggtgggaaggttgatcaaacgctacgcagcggacgtgacttggtagggcatggcacccacacactgtcaacagctggtggtaattttgttcctggtgcaaatgttgaaggtaacggcaatggtactgctaagggaggatcccctagggctcgcgttgttgcctacaaagcatgctggaataaactggatgaaggagggtgctatgatgcagatattctagaagcatttgatcatgccatttatgatggtgttgatgtcatctctgcctcgttcggtgcgtctaatccctatcccgaagccttgttcacggatgggatgtccataggggcattccatgcagttgccagaaacgtagtcgtagtttgctctgctggaaatgatggaccatcacctttaagtgtcacaaatgttgcaccctggtccttcaccgttgctgctagcacactagacagggattttctcagcgacatttctctcagcgacaatcaatccattacgggtgccagtctcaatcgaggcttgccaccatcgtccccgtcgaacaagttctatcccataattaattctgtcgaggctagacttcctcatgtgtctattaatgatgctcgtctttgcaaaccgggaacacttgatcctagaaaagtaaggggaaagatactaatatgccttcgaggtgataaattaacttcagttagtgagggccaacagggtgctcttgctggtgctgtggcagtttttgtg

SEQ ID NO: 22867 - DNA, 467 bp, Glycine max
gtgtcacaaccagtgagagttcattcttttgattcagcagtaagagttcaggaaagaatcagaaaatttttgccctcatctttacatttatcaacacttagatcttttcatgcttctggagattatgggaatatggttagagaccccgtctctaacatattgcggtcttactttcaaatgttgccatgggagacacagaaactaaatctgattctgagctccacaccatcattcatttcctctgtttcaggcatagctgaaggtgctcgattgctgctttcccaaacatatcatggtgatagagttattgctgtctatgacgatgattactctagcataatatcatatgcccttagttccaaggaatatgaagattgggtgtctggtaagtcagatatgcaagagagtaactggattgctcgtgagagaagcaaagaagatttagctacttctggcttttctgcatg

SEQ ID NO: 22868 - DNA, 695 bp, Glycine max
ctcgagccgcttctccgaacctctccaactccctcccagagataaaattcctttcgccccacgcacactccaatatctaaatcaaaaaataattttaagatcaggaatcaggaatcccaatcgtttcataccctagaatcccaatcgatctctctctctctctctgcttattgcaataacctaacctggtgtcgtgatccgggcactggaactagggtttgcgctttctgtgttcaacaatcaagtttcaagaggagaggagaagagatggatgactgttgtgccgtttgcgctgagcctttggaatgggttgcgtacggaccctgtttgcaccgggaggtgtgttccacgtccgtcgctcgtctccgtttcatctgcgacgatcgccgttgctgcatctgcaagaccgaatgcaacctcgttttcgtcaccaaggctctaggtgattatacgaggatgatcaatgatttttcgacccttcctttggaggcgagggagggcaaggttggatcatattggtaccatgaggatacaaatgcattttttgatgatgtggaccattacaggatgatcaaggctatgtgcaggctttcgtgcaatgtatgtgacaagattgaggatcaaccacaggatgctgcttcaaggcggcgagcaaagtttaggaatatagggcagttgaagggtcatttattcca

SEQ ID NO: 22869 - DNA, 423 bp, Glycine max
tgggtaatcctgatgcttcttatcttgttcttataaaaggctttctcaatatcaagataagaagcatcaggattaacctttcttcccattatcttggcaagggtgagcttggggtcctctccgagtaaccgaccgaacttgacctccatgaggtcgtagctgtcgaatttaggtggttctttttctccttcatttcgtgatcgtgaggcaaagaccttgactctctgattcagagaaagggttcttgttctgtccgatgaaaaccagtgaagctgggtgaagaagggtttactactggtgagaggaagagaccccattttcctctgaatttcagtttacagctatgttattattatttgagaagggatttgttgttctcagagtaagagagtgaaaccttgggtttggataaacggctagcaa

SEQ ID NO: 22870 - DNA, 411 bp, Glycine max
ttcggcaccagattgtatgttaatttacttttgttccatataatatatattattctaagtttattacattacaccaacaaagtgccgttggttattggatctctcactagttttagagagagagagagattcagaggaagagaaaaacgtgtggttatgtgattgtggaagagagaactgagacggcattgccaattctcccttgatctatgaaactgaccctgcaaatctgaggccacaatcggtagagattgtttcattttcataacaaaaaaaaaaagaacatttcagctctaagcctctaaccttatgagttttgagctggtttggtaaactgtgtttctcttccaatctattccctttgattccattggttcatctcaacaaacccttttggatgtctaccctctg

SEQ ID NO: 22871 - DNA, 217 bp, Glycine max
cggcgcgagcggctcgagaattgttgttgtgtggtggggcacgatggcggaggctcctccgtctctaatatctctgtgcatcgacgctctcgcacaacaatttctccgtccaagcgatgatcttccttctatctacgaccttccttctcacttactccacaccttaatcacgcctttgccccctttcgcactccgcacattccaccgccaccaccta

SEQ ID NO: 22872 - DNA, 529 bp, Glycine max
tctcgggccgcgcgtcccgactcggcgcgacttgtgatgttgatgcttttgatggcatggacaagatgtcctgaaaagagttttgaagatggagatcatgaaatacggttgcaggatttgaaaaaaatttcaacaacagatgcagatgacaaccagtctgttaatctggttgaagtcaatggacattgttctaatcaagttgattttcttcgatttgaggtgagcccatacactggaaggatccacttgtatacttgcattttgggtactgataaaagaccacagccacttcatgaaaattttcgatcagaggaacttgagttgttaagttctgttgctgatgatgagaaacaggctcatgatgagaaacagaaaacagagtttgtaactgtgaaggacaaccccgcatataggcatgctcttatggcttttgcagaagagtggaagaacttgaggtcaattgaacgcaggaagttacttggaaaaccattacaacttcctttggctgttgaattatgctacttgagtg

SEQ ID NO: 22873 - DNA, 287 bp, Glycine max
agcgtacctcctccgagacagcaggtggagtagttataacttcagaaagttcaaatacccaagggaggaactgataaatatatatacctgctaagtttcaactgtataatcttcaaattaaattttatcacattaattcttgatctttttccacatcatatcttcatttttttggtccacatgctgtagcttttaggcaataatggttcgatctgatcagatgagttgtgttccccacagctatggcattcaaaagttggactaatcatctacttcatggagattaa

SEQ ID NO: 22874 - DNA, 330 bp, Glycine max
tgattttaaaaacgcgacccatcactgtgtgtttaacacacagcagaaaagaacaaaccgcaggttcttcctaatcgaaacggttccaaagtagtgaataaacaaattctcgtgcctagggttttcccttttcttcgattcacactcccagagcgaagcaaccgtcatgggaggaggcgaggagaagcgacaccagatgatgcagaacctcttcggagatcaatcggaggaggaggaagagctcgacgtcgattccgagcacgaatcgaacccgcaacaaaattacccctccgacgagggggagggggagggtgtgggggagcaggaggg

SEQ ID NO: 22875 - DNA, 290 bp, Glycine max
cggctcgagtcgaccgattcggctcgagagttggtgcagatgttgtgtttacagcaagaacccatgacacagaaatcataaattcctgcccatcatgaaatgggcgctgctggtgcagaaaagaattctgaatccttatctttcagtggaacagccacatccaggcaagctgctcatggaatgcacggtagaggcatccatcgtaacaaaggaagatcaaacaatcaagatgctgatggttggcgaaagaaatctgtggttgaagattcttcagcctcatctggtgcaca

SEQ ID NO: 22876 - DNA, 284 bp, Glycine max
ttaacaacagtttcgatcgtctgcattgcaacacacacacgcacacagaacactagaatcattattcgcttcagggttggaggcacgaatttgcaccggtagctctatcacttggatcacgcggaaccctttggctgaaacttttatcgcttcttttcttgttttgtttccttggaaaatctaataatttgcgcgctattctagtaacttactgagttaccaagaatgatgcctgcatacagaagcatggactcgtacccatgtcagagaaacgaagtactttg

SEQ ID NO: 22877 - DNA, 469 bp, Glycine max
cttggtttgcctcttgtagcttgagacttgaggagaatggataccttcctgttcacttctgagtcggtgaacgagggtcatcccgacaagctgtgtgatcagatatctgatgcagtgctcgatgcctgcctggagcaagaccctgaaagcaaggttgcctgtgagacatgcaccaagaccaacttggtcatggtatttggagagatcaccacaaaagccaatatagactatgagaagattgtgcgcgatacgtgccgttctataggatttgtgtctggtgatgttggccttgatgctgacaagtgcaaggtattggtgtaccttgagcagcaaagtcctgacatagcacaaggagtccatggccacctcaccaagcgaccagaagacataggagctggcgatcagggtcacatgtttggctacgccacagatgaaacacctgagcttatgcctctcagccatgtccttg

SEQ ID NO: 22878 - DNA, 561 bp, Glycine max
ggtaatttggaggatccagttggagtgccacctgagtgggccccgcctaatgttagtgtccccattttggatttggttgacaacatatttcagcttaataaaagaggctggataagaaggcaggtctattggatttcaaaacagatattacagttggtgatggaagatgcaattgatgattggcttctgagacagattcattggctccggagagaggaaactgtttcccaagggattcggtgggtccaagatgtcctatggcctggtggtacattttttttaagagttgggactccccagataattagtgacagtgataaaaaatcttctccaacaatgagcagatctggtggaagcaacatcacgaaatctgagtcagggtcttttgagcaagagctcgaggctgctcgtagagcaagtgacatcaagaaactgctgtttgatggagctccaacaactttagtcagcttaatcggccataagcagtacagacgttgcgcccgggatatatactactttagtcagtctaatgtatgtgtgaagcaacttgcttatgcaatt

SEQ ID NO: 22879 - DNA, 773 bp, Glycine max
actagttctagaatgtttgatgagcggcctatatggtccaaaaattcgcttaccgaactcttgcttgataagggctaagcttttcgcacagcatgctcagaaggcttctatctagaatttcttactacttttctagtggaccatttctgaggttttggatcaagatatgatatgatccacgcaaagatcctaattctcgaatttatcaaagaattgattatcgagtacctgttccattacgaagttactgcgatgctcattcagccaataaatcaaaacatagatggaaggatatatgtgcctttcgtgttttcccttacaagttccagacttctttacagtttttcgaccttgttgatgattatattcaatcagaaataaataagcctcctttccgaccaacttgcacttctggaactgggtggttctcacaacacatgatcaattgtattagacaacgtcttatggtgcgatatctatcagtattccccaagcctggtgctgagaatttactcagagctgccactttaaagtttgaaaaattgaagagggagtgctataggcatgccatgaagctcgatggagaagaatgccaacaagctaatttaggtttggaagagaatgaagaacttgataatggtgaagatgaagaggaggcagctgagggtaatgatagtgatgaagaatgggaagaagagcatgatttggctggagataatgaaatgcctctgccatctgattcctacatcaactttgagaatctttcaaggact

SEQ ID NO: 22880 - DNA, 468 bp, Glycine max
cggctcgagaaggaactgagcagggagttagggttagagccattgcaggttaagtcttggtttcagaacaagcgtactcagatgaagacacagcacgagcggcatgagaagacaaatctcagaaccgaaaacgagaagcttcgagcagataatatgaggtatagggaggctcttagcaatgcttcgtgtcctaattgtggtggaccaaccgctataggagaaatgtcattcgatgaacatcacttgaggcttgaaaacgcaaggctaagaaaagagattgaacgcatctaagcaattgcagcaaagtatgtagggaagccagtagtgaactattcaaatatttctccttctctccctcctcgtccgtaagaactaggggttggtggtgctggttttggaggccaaccagggattggtgtggacatgtatggagctggggatcttcttaggtcaattagtggacccact

SEQ ID NO: 22881 - DNA, 281 bp, Glycine max
ctcctccatttctcagaaaccctctcgaatgactgagtcaatgcccgccgtggaaccgtcgccggagcctccggcgtccgatatcgtgttcgatgacttctccaccgacttcagcgccttccccatcccctccatggactcgctcttcaacactactgatgggacccccttcccctccgatctcgaattcggcatggatttcaacaacaacaacggagagtgcggggtcaccttcgacggttgctagtattagtttgttgggtttgtttgtctttatcatg

SEQ ID NO: 22882 - DNA, 429 bp, Glycine max
ttcttctaacagagcaatgaaatttcacaatcgaaatctaggactagataagttctttcttctttcttcctgattgtgtcgatgtattcaaaaatccgatagaaaatttttggatagtacatttttatagtaatagtataaaatgaaggttcttcacatttcacattattagtttcggactaaaaactaagtatcgattaaaatcggaatatggtaaattggtttcttagaattcataaaggagattttatatttctagaattcaattagatgccaaatctataaatatactttttgtggttgttgaagatattttttctattttcttctatattaattcaaaattaaagaaattgaaataacaattgaaataacaaagttatttttctttgtttttgttttaatattcatttttctttctaatagaaa

SEQ ID NO: 22883 - DNA, 474 bp, Glycine max
cggctcgagcaagctagcatttactggctcaacagataccggaaaagttgtactcgaactggctgcaagaagcaatcttaagccagtgacattggagcttggagggaaatcgcctttcataatatgtgaggatgctgatgttgacaaggctgttgaacttgcacactttgctctgttctttaatcaggggcaatgttgctgtgccggctcacgtacctttgtacatgagcgtgtctatgatgagttcttggagaaatcaaagaaacgggctttaaagcgtgttataggtgaaccattcaagaaaggtgttgaacaaggacctcaggttgaagtggagcaatttgagaaagtccttaggtacataaggtctggaattggaggccttgccacccttgaatgtgggggtgctagcttgggctcaaaaggcttctttgtcctgccgactgtcttctcaaatgttcaggatgacatgtt

SEQ ID NO: 22884 - DNA, 603 bp, Glycine max
  unsure (1)..(603): unsure at all n locations
aaagctaaaaggtaaggaacggcgttgttgagcggaggaagatgagcgtttcacatttcgcggttctatcgtcgtgttgtcgtccacgcttcgccccttctttgtcgcgtgcttcagccctccgttctcgcatccggtgttgtactactctcacttctacttcttcagagactcccactccaacctccgtcaagaaacgagtagtgtcgggagttcagcccacgggctcaattcacctcggaaactattttggcgccatcaagaattgggttgcccttcagaatgtgtatgatacacttttcttcattgtggacctgcacgcgatcacattaccatatgacacccaacagttatctaaggctacaaggtcaactgctgctatttacctagcatgtggagtggatccttcaaaggcttcagtatttgtgcagtctcatgttcgggcacatgtagaattgatgtggctgctaagttccacaacaccaattggttggctgaacaaaatgatacagtttaaagagaaatctctcaaggcgggagatgaagaagtgnggttgcccttttgacttatcctgttctgatggcttatgatatacttctata

SEQ ID NO: 22885 - DNA, 522 bp, Glycine max
cacagaatcacaattcatttcctcatcagacataattttttgtctagttttagttttgccgactcgcttcacattcgttatctatttcattttattttaatccttttcaatgaaagtcattgcggagtgatagaagagcgagattcacttggaaatcttctgaagagcttccgagtttgcgaatgagagaactcggcattgactcagagacggttcgttatattttcgtggccgatggtttatgctagattgaaataaatttgcattgactatgggtgtctctgggaagtggattaaagcattggttggtctaaagaaatcagaaaagccagggtcttctgagaaggatggaaatgttggcaagtttcaccatcagagaaggcatggtgttgaatttgataatggtaaatttccgaacgaattggataatgctgctactccacctgttgaatatgataatggccatgcaaaccttgatgcccactattcatcttcttcttcacaacaagcacatgatgctgc

SEQ ID NO: 22886 - DNA, 271 bp, Glycine max
tgtgacttgtgtgccaaattaatagaacctcctctattctattctgtctaattttctaacaataacaccttgacctagagcttgtggtatgatggtatcaatatcaagaagggttggagccgacccttaaatttgatgaagcgtgtgattcactgtttaattttggagtgccttcgatagctctcaaatgtgcctgtggcttgtagttgtgggcgtggcattagcatttgcatgtaccattattgaagcaagcgcaaggtccttacccttc

SEQ ID NO: 22887 - DNA, 434 bp, Glycine max
ttatcctcctcttcaaagaaaaagctccacttgtattgtattgtattgtcatgttacttctttctctgcaaatccttcgtattctgctctataaatgttaataatctgcaaattttggaagcgaattttctaaatcgctctgtctctctcgctgcaatggactgtgcctccgaagattgctccgataactctcagcgaccggactcacacaaggaccagcgagtctatttcgttcctcacaggatacgatatagtgctcaggattcaatgccggcggattcagtaagaagaagggaattgcgttcgcgtcttttgctggttcgtcctatgctggtcctatgaagattatcaatatcatctttaactcagatcttgtgttcagtcttctgagggaggacgattgcagtacattcgtgaaaatggcgaagttggtg

SEQ ID NO: 22888 - DNA, 318 bp, Glycine max
cggctccaggtcacatccctgaggaactatgataagtaacaaagctgaagtaatgacctcaggccttgtgggactgtctctctcttatgctttctccttgacaggatctcaaatattttggactcgatggtattgcaacttattaaactacattatctctgttgaaagaatcaagcaattcatccacctaccagtggagcctccagccatcttggaggaccaccggcctccatcttcatggccttcaacaggcaggattgatcttcaagccttagagattagatatcgtcccaatgctccattggtgcttagggcatc

SEQ ID NO: 22889 - DNA, 323 bp, Glycine max
gggaaccttactaccatcaccgcaagtggaagcaggggaagaagacgaccatcacgggttcgagctcgtgagcttgctcaccggctgcgtcgacgcaattggatcgagaaacgtcactgcaatcaaccatttcatagcaaaattgggtgatcttgcttcccccaaaggaacaacctcgataagccgcatttgcgcttacttcacagaagcattagccaatcagagtcacgaggctctggcctcacgtttttcacttcgcagccgccatcacttcacgcgacatggtggaggacgatgaatccgccacagcattaagacttctc

SEQ ID NO: 22890 - DNA, 369 bp, Glycine max
acagatgtgtgttagagtgaagaaagaggttgacattaacaaatcatagcatagcagaagaagaagaagaagagatacatagaaagaaagaaaaaaaaaatgagtttgagggaagacaatgaagagggaagggatctgaagaagccatttcttcacacgggaagttggtatcgtatgagtgggagacaatccagtgtgttcggttccacacaggccattcatcagtcctccatctctgtctttgcttgtgttctaatcgttgctttgggtccaattcagtttggtttcactgctggttacacctcacctacacaatctgctatcatcaatgacctaggcctctcaggctctgcgttttctttgtttggt

SEQ ID NO: 22891 - DNA, 470 bp, Glycine max
cacatatttgccagcattgaaatttgctcgagaacaaggtctttatgtaacacttcattgtggcgagttacctaattcaaaggagataaaaaatatgcttgacttccgtccccaaaggattggacatgcttgtttctttgaggatgaacactggagacagctgaagtcgtcgaacattccggttgaaatttgcttgacatcaaacgttaggacaatgactgttccatctatagatgttcaccactttgctcatttgtacaacgcaaaacatcctttagccctgtgtactgatgactcgggagtcttctctacctgtctctccaaggaatacaaaattgctgctgattcatttgggctgggaaggagggaaatgtttgagctatcaaggaatgctgttgagcatatattcgcagatagcaaagtaaaggaggatttaagaaaaattttcaattcagtggcaaaaaaatatg

SEQ ID NO: 22892 - DNA, 463 bp, Glycine max
aaagccagttccgcaaaaaactttccaacaatccatccttgaacgtgcctttagatctgcaaacttcagcttagagcaaaacaataaataaaaaatccaccttttctatcaacctctagctatatccatttttatccaaatgacagaaaaactttccaacaatccatccttgaacgtgcctttactatccgagtggaatcaccatgatgaggagaaagccatagcctctcatccttctaccaaaaatactgtgtccttctttcgcacatgccttaatggactcaatgcaatatcaggtgttggaatactgtcagttccatatgctcttgcatctggagggtggttaagcttggttcttctatttgctattgccgctgcagcattttacacaggcacgttgattaaaagatgtatggacaagaattctaacattaaaacctacccagatataggtgagcttgca

SEQ ID NO: 22893 - DNA, 377 bp, Glycine max
ttgaatctttcaccactatttgataggcatcaggattatgtaaagcggcaaactcgttttgtctcccgtaaaccagcaaaagttataatttcttcaattgaagctgttgcagagtcaatgggtcttaaggtccattctcgcaattacaaggtgaggcttgaaggcgtttctgcaaacagggttggacaatttgcagtggtcttggaggtgtttgcagttgcgccatcccttttcatggttgatgttcggaaggccactggggatacttttgactaccacaagttttacaagaatttttgtggcaaactaggaaacattatttggagaccggcagggactatgccaaattctaatctgcgcaacaaatgactttataa

SEQ ID NO: 22894 - DNA, 460 bp, Glycine max
ctaaatagagtggtaaactctaaactcagaatagcatcagagtttctctgagatttgctttaattcaggtttgaaaacaaactattacgcagaaaaagaaaaactcatatgggaatgactcttattgagttttttgtttcttctctttgatacattcacgatgttgaggaatactatctgatttgcttcaattgttattggtgagcattgaccctcttctcaaaatcttctctttatttctttctttccttcccgagaacttgagttcctagaaaaaagaacaatgattgagagagatagagagtgatggcaccaaatactgagaagtctagtaacaacgacttcaccttgttgcaagttcatgattcggattctcccatgtttccagagaagcagaaagccacaagccgcaagcagtttacttggtttcttctccttaaactccacagagttctgacat

SEQ ID NO: 22895 - DNA, 363 bp, Glycine max
tttacctgtgagcgcaaacgtgcacttgaaactaagcctgaacgaactccagcgagatcctccaaggatccccgtggtacttcaaaagatccccgtgggtcatctttgacaaaggaggggagatctacacgacgggactccccacatcatggagcattacataggcaccattcacctgttaaagaaaaacggagagaatatgtctgcaaggtattcccatcccgcttggtagacattgagagggattacctcttattagataagcgatacccccgactctttgtctctcctgaattctccaaggttgttgtgaactggccagaggaaaaccttaaactgtctattcatactcctgtcagtttt

SEQ ID NO: 22896 - DNA, 283 bp, Glycine max
gcgagaacgagaaagggaacgtgaaagggatcgcattatggagcggcgcgagaaggaaagggagcgagagcgcaaacgtgcacttgaaactaagcctgaacgaactcctgcgagatcctccatggatccccgtggtacttcaaaagatccccgtggtacttcaaaagatccccgtgggtcgtctttgacaaaggaggggagatctacacgacgggactccccacatcatggagcattacataggcaccattcacctgttaaagaaaaacggagagaatatgtc

SEQ ID NO: 22897 - DNA, 758 bp, Glycine max
cgagatgttgatcttgaagactatactgaagagttgattgttagtcttgacccatcaaaagctgttgccaataagatccccacgccgcctccgaagaagtatactgcaataaacatgcttgatggcaggaacagaattattgaatataagaatcctactctttacaaggatgatgaaaagttgaaggccttgagtgggatgaaagaaacagggtatgttcctgacacaagatatgttcttcatgacattgatcaggaagcaaaagagcaagccttgctttaccacagtgaacgtctagcaattgcctatggtcttattagtactccaccaagaacacctcttagaatcatcaagaaccttcgtgtctgtggtgactgtcacaatgccatcaagatcatgtccaggattgtagggagggaattaattgtcagagataacaaaaggtttcatcatttcaaggatggaaaatgctcttgtggggattactggtgaaagaatcattacttgaaatcctacagtagcatggacatatcattttctacccggcgtctccttataccgggaaaacaaatgtgcgtggaagctttaacactactaggataggagatgaaatatgtagtatgcccccatttagaatgtatttgcttcttgttcagagatattcacttaatctctctctctctactcagggctaatacctgtgatcccattaaaatttgctcttaacatggtttttgtatattggttttttggttcca

SEQ ID NO: 22898 - DNA, 285 bp, Glycine max
cttggttcaggagaatcaacaaattaacactagggagataatttcaatcatcaaattgtaaccatgccaatccgttcccgtgaacctgcacagaggccaggattgttagaccgtcaaagaccactacatgcagtccttggcggaggaaagcttgctgatatattgctatggaaagacaagatatcatcggcatcaatggtagctgggttctccatcatttggttcctctttgaagtggtcgaatacaattttcttactctactatgtcacatcctcatggccatt

SEQ ID NO: 22899 - DNA, 530 bp, Glycine max
gttgccgccatgagattgctagaatgatcattatgcatgattacccccttcacatggttgagcatccgggttttgttgcatttgtccaaaatctgcagccccagttcaatatggtgacatttaacacaattcaaggagactgtgttgcaacttacctgatggaaaagcaatgtgttatgaagtattttgatggattacctggacgtgtgtgtctcacactggacgtttggaactcaagccaatctgtggggtatgtgtttattactggacattttgtcgatagtgattggaagttgcagaggagaattctgaatgttgtgatggaaccataccctaattctgactctgctctcagccatgctgtagctgtttgcatttctgattggaatttggagggcaagctgttttctatcacttgtggtcagtcactgagtgaagttgcccttgggaatctcagaccgttactctttgtgaagaatccacttatcctcaatggtcagttgctgattggaaattgcattgcccgaact

SEQ ID NO: 22900 - DNA, 351 bp, Glycine max
acggaggggtatcatccgaaccccgtcccgttctcactgtctcattcaaagcgttttcgaccctctccgaccatgggagcctgcttttccgccaccaaagtaagcggctccaacggcaatggcgtcaacgtcaacaaaaagcgcagggggaccacgaagaagccgaaatcagagacggcgaaggcgaatccccaacggcacaaggcggcaagttcgcgccacgtgccgtgcgggaagcgcaccgatttcggttacaagaaggatttcaatcagcgttactcgctcggaaaattgctcggacacggccaatttggttacacgtacgttggaatcgacgaagccaatggcgat

SEQ ID NO: 22901 - DNA, 322 bp, Glycine max
tggagacggaggggtatcatccgaaccccgtcccgttctcactgtctcattcaaaggtcttttttcttcccttcttccttcctacttttattcaatttccaacctttttctctctttcttttcccaattgaatgacaacaactccaactacatagtaatattattattccaagtttgatgatttgatgctcctcgtgtttttcttttccatcttttaagcgttttcgaccctctccgaccatgggaacctgcttttccgccaccaaagtcagcggctcccacggcaacgccgtcaccgtcaacaagaaccgcaagggggccg

SEQ ID NO: 22902 - DNA, 274 bp, Glycine max
cgccactcatcatcgacccaccctttctcaactttgcggacagagggagttgctgacaccacccatcacctgttctcgttttgcctcacgatggtgtcgtaggcgacgttgccgttatcgtcgacggtgacaggacggattttggatccagggcagagacaaaacgagaaagctacatggtggctttgattctgctatggaacattgaggcaaagctcagcatctaaaaccctgtaactgtgaggctatagtctcttgcttgcacctttgcagt

SEQ ID NO: 22903 - DNA, 413 bp, Glycine max
ctcgagccgattcggctcgagattggaaatgtttgatggtgcataatatgattgtccagatacaccatggccgtcttagtgaaaatgactctagaagatatttccagcagcttattgacggtgtagattattgccacagtaagggagtttatcacagagatttaaagcctgaaaatcttttactcgattcactaggaaatataaagatttccgattttggtttgagtgcatttcctgagcagggggtgagtatccttcggacaacttgtaggactccaaactatgtagctcctgaagtactcagtcataagggttacaacggtgctgtggcagatgtatggacctgtagggttatcctctatgtcctactggctggatatcttccttttgatgtgcttgaactaaccacctta

SEQ ID NO: 22904 - DNA, 459 bp, Glycine max
tgtaggattcaggttttaagcctctgctcaagccgtatcagttggttggcgtcaattttttgctcctactgtatcggaaggggattggaggagccatattggcagatgaaatgggtcttggcaaaacagttcaggccatcacatatttaactttgttgaaacacttgcacaatgattctggtccacatcttatagtatgtcctgcttctgttctggaaaactgggaacgggaattaaaaaggtggtgtccatccttctctgttcttcaataccatggggctggacgggcagcatactgcaaggagttgaactccctgtccaaggcaggattgcctcctccatttaatgttcttcttgtgtgttattcactttttgaacgacacagtgcacagcagaaagatgatcgcaaaatcctgaagcggtggaggtggagctgtgtgctgatggatgaggcacatg

SEQ ID NO: 22905 - DNA, 432 bp, Glycine max
tgtgtatagtgaaaaggtgaaaactaccagcatctatattagagactctacgaacatttcagattatgccctacttctatttggtggtaatcttgtccctagcaaaagtggtgagggcattgacatgcttggaggttaccttcatttctctgcttcgaaaagtgtcatcgagttaataaggaaactacgtggggagcttgacaagcttctgaacagaaaaattgaagaaccaggatttgacgtttcggctgaaggaaagggagtggttgctgctgctgttgaattgctgcacagttaagtcatgagataatttctttttttccagggctaacatcatgttggtctgagtcctggcattcattagatattataattagcataattttggtagcagtttttattgattgctagcaatagtatttttctggaatg

SEQ ID NO: 22906 - DNA, 589 bp, Glycine max
cggaaagttatggaggttctcttggagttcattggggttaaaaacttaccagagggacaggaaggagatctctgtgttttattttccaaatcacagcctgatgcattttttgatgctaaaaggagactgagtattttatcagtgtctagagagaaacaggttgcatctttccggtgtgaaccaacaggagagctgctttttgaactcatgtcctcttcttcttccaagttatcaataagaaaatcaacaaagacacttggttctgcatctttctctatgaaagactatcttgacccagtttcaaaactctatgttgagaaatggttggagttggtgccgggttctggtactatgagctcaaagccaatcttgttacgagtagccatctcatttactgtcccagttcctgccccatatacacttgagatgactcagtctcgtccatgttccatgacatacatgtctcttcaaccttcctgttaggcgccaacatgctagaatctggacacatgtcacagatgacaatggcactagaatcatcagccttcgaattagcgatttgaagaatgagtgaacataggaaacctgg

SEQ ID NO: 22907 - DNA, 370 bp, Glycine max
ctttaacaaggattgcttagttgttcaatggtcaggagacaatccgaatagtgtggcaggtttgaccctaaatattccaggagatctcgccatcagccttggcactagtgatactgtatttatgatcactaaagatcctaatccaggattagagggacatgtcttccccaatccagttgatgcagaaggttacatggtaatgctggtatacaaaaatggatcccttacccgagaagatgtgcgcaactgtatgcaaacaaatcttgggatgttttcaataaatttttgcagcaaacacagcctttaaatggtggaaagttaggtttctactacaaggagcatgaaattctacctcctcttccagttggtt

SEQ ID NO: 22908 - DNA, 579 bp, Glycine max
tgttttactccagacggaagagaagagacgataatggcgggttctggcgggaaaaaggtgcaccaaatgatcgtcggtttcggcggcagtggcctcggccaggttgtcatcgccgtcgccgtctctttcctcgtccgcgtcttctccgctcccggcccggccctctcgccggagagcgaagctgacgacgtgccggagaacgattccgacgacgcagaagctccaacttccggcaaggtcacgccggtcacaatccagtggagaaacatcaattgctccctttctgataaatcttccaagtccgcgaggtttctgcttaaaaatgtgagtggagaagctaagcctggaagattattagccataatgggaccttcaggttcagggaagacgacgttgcttaatgttcttgcgggtcagctaacagcatctcctcggttgcatctgagtggcgttttggagtcaatggaaagcctggttccaagaatgcttacaagtttgcttatgtgagacaggaggatctctttttctcgcagctcacagtgcgggagacattgtctcttgctacagaactccagcttc

SEQ ID NO: 22909 - DNA, 343 bp, Glycine max
ttggaataaataattatggaatgcttgcttttttggctgcacgcttctacgggatgtaacagtgaggtcattttcctgggcactgaaggctttcttagggttcatgaatgggaaggctccacagactatattaaccgaccaaaatatatgtctcaaagaagcactatccacagaaatgccaacaacaaaacatgctttctgtatatggatgatagtagcaaagtttccatcttggtttaatgctgttttaggggaacgatacaatgattggaaggcagaattttatagactttataatcttgagtcagttgaggattttgaactaggctggagggaaatggct

SEQ ID NO: 22910 - DNA, 370 bp, Glycine max
ctatttttcatttttgaatacatggattgtaatctttatcgattaataaaggagagacgaaagcccttttcagaggaagagatacggtgctttatgaggcaagtgctacaaggacttagtcacatgcacaagaaaggattctttcatcgggatttaaaacctgagaatatgctggtaacaaatgatgttttgaaaattgctgattttggactggctagagaagtatcatcgatgcctccatatactcaatatgtttccacacggtggtatcgagctccagaagttttgttgcgagccccttgtaatactcctgcagttgacatgtaggcagttggtgctataaaaacagaacttttaactttaaccccca

SEQ ID NO: 22911 - DNA, 469 bp, Glycine max
ccgatgataaattacacgctcacttggctcgaatccgctggcgtcgaagaggttttcgttttctgctgttctcattcaaagcaggtcattagctacctcgagaaatctgagtggctctctcaacctaattttacggtaacgactgtagagtcgcagaactctgtcagcgccggagatgcgctacgtgtaatttatgagcgcaatgtgatacatggagactttgtccttatcagtggagatactgtaagcaatatgtcgcttactcaggcacttctagagcataaagagaggaagaagaaagatagtaatgctgtaatgactatggtcattaaacggtcaaaacctaatccagctatccatcagtctcgacttggtactgatgaacttttcatggccattgatcctaataccaagcaacttctgtattatgaggatagggcagatcaatcgaaaggaacactacatcttg

SEQ ID NO: 22912 - DNA, 358 bp, Glycine max
gcaccgtcgccgccggcgtccaattcggctgggccttgcagctctctctcttgacgccctacattcagacgttgggaataggacatgcgttttcttcgtttatttggctctgtggccccattacaggtcttgtggttcaaccatgcgttggtatttggagtgataaatgtacttcaaggtttggcagaagacggccgttcattctggcaggatctcttatgatatgtctggctgtgatattaatcggattttctgctgacattggatatgtattaggtgatacacatgagcattgcagaacatttaaagggacccgaacaagggctgctcttgtatttattcttgggttctggatgct

SEQ ID NO: 22913 - DNA, 393 bp, Glycine max
cttctttccttccaaccccacacgtcttcccttctcttgctacttgctatgctcatcttcaaaactcagccttactcatactcatgctgagccaaaacccaaacccaaccaccatggacatgattcctgggaagatccgaaaacgaggctgttcctcctcggcctcctcctcctcctccgtgctccacaactaccgcttcaagaggactattctcgtcggaaagaggggcggatccagtacgcccgtgcccacgtggaagctcatgagctcgagatctccgctccgggcattggcctcccccaaatacccgccgtcgcagaccggtaacaagccccgccaagctccggtctccgccaggaagctcgccgcaacgctctgggagatgaacgaga

SEQ ID NO: 22914 - DNA, 260 bp, Glycine max
ccaacatgcatttttttttcctctagtttttctaacgtttatgacttttctttcccttcttgggtagtcaggtcccgcagcatcgaaaacctggtctggttcaacatgcataggtagttgagtgcagtgattcagattgcttttttggctcttcgtgctttatttgcactcttcttatcagaaaccaagacaacaagagtttcacgttacttcatcatctctgtctctttgctacttcttttgtacacttcttagcagaa

SEQ ID NO: 22915 - DNA, 451 bp, Glycine max
cgagacttaagaaaatggagtctgaatatgactcagaaccaatcacttttattattaattgatcatctaatactaatcccttgtttgaatgcacagggaaaattatgaatcccgataagttcacccacaagacaaacgaagctctggtgagtgcccacgaaatagcaacaagcaacggtcacgcgcagttcacccctcttcacctggcgtcctctctgatttccgacaaggatggcattttctctcaagcgctttcaaacgccgccggcgaagaatccgcgcgcgcggcgctccgagtcatcaacaatgcactgaagaagctgccgtctcagtctcctcttccggacgaggttcccgcgagcaatgccctcgtcaaagccatccgcagagcgcagactctgcagaagaaacgcggcgacacgcacttggccgtcgaccaactcatcctcgg

SEQ ID NO: 22916 - DNA, 304 bp, Glycine max
actcgagccgaatcggctcgagccaaaacgctccatactcgatatagcttacaccacttgggccatcaaaccccaaccaattctaaccatttcttttcgttccgatcagtttttcgtctctctctgttttccgaaaccttaatctcttgcccgataagggaaaattatgaatcccgataagttcacccacaagacaaacgaagctctggtgagtgcccacgaaatagcaacaagcaacggtcacgcgcagttcacccctcttcacctggcgtcctctctgatttccgacaaggatggcattttc

SEQ ID NO: 22917 - DNA, 293 bp, Glycine max
tatgtggatggcattaaggagttttctgtaccaaatgatggtggctgccaggaccaaatgctatttaagttcagatcttctggtctatccaggagacaaaaaactcaatttggtttgatgatagtgatatgggtcaagatggatcagagagtgagaactcaagcacaaggacctctacaaagagcaaaaggagacctgagaaaagatcaagaaggagatcatcctccatggaaaaccttggccttatggatattggatacgtgatatattatcacaagccatgcaaaagtccg

SEQ ID NO: 22918 - DNA, 951 bp, Glycine max
ttttcgtccgataacaaaaggtaagaacaagaagcacagaacacaggttgcttgaaccttacacgtcagcatcgttccgtgtggagtgttgagagatggggaattcgttcggatgttcggcctccggcgagaggcttgtgtcggcggcgagggacggcgacttggtggaagcgcagatgcttctgaactgcaacccgtgtctcgccaagtattctactttcggtggcctcaattcccctctccattttgcagctgccaaaggccacaacgagattgtggcattgttgctggagaatggagctgatgtgaattccagaaattattgtggccagaccgcattgatgcaagcttgtagatatgggcattgggaggttgcacagacacttgtactcttcagatgcaatgttataagagctgattatcttagtgggaggacagctcttcactttgcagctgtgcatgggcatgtaagatgtattagacttgttgtggctgactttgtaccaagtgcaccttatcaagctatacatgctggcacagctgttgacaggggtggtggatcaaatgcgaaaggcaaacatgagcatagtgccctgtccaagtttgtaaataagaccgctgatggaggtatcactgcccttcatatggctgcactaaatgggtactttgattgtgtacaactgctgcttgatcttaatgcaaatgtgaatgctgtgacttatcattatggaacatcaatggatttaataggggctggaagtactccattgcattatggtgcttgtggaggcaatttaaaatgttgtcagatccttgttgcacgaggtgcaagtcgtctggctttaaattgcaatgggtggcttcctcttgatattgctaggatgtgggggcgtcattggcttgaacaattgctggcacccagttctgatgcctcaatacctacattctctc

SEQ ID NO: 22919 - DNA, 457 bp, Glycine max
gttgattagtaaggcgtagcttattgatggttttttatgggttttttttcccccccatttggggtgtttgagacaaagacaaaagacaagaacaagaagcaccgaacagaacagaacagaacacaacacatgttgcttgaaccttacacgtcaccatcgttgcgtgttgagtgttgagagatgggaaattcgttcggatgttcggcctccggcgaaaggctggtgtcggcggcgagggacggcgacttggtggaagcgaagatgcttctgaactgcaacccgtgtctcgccaaattgtggcattgttgctggagaatggagctgatgtgaattccagaaattattgtggccagaccgcattgatgcaagcttgtagatatgggcattgggaggttgcacagacacttttactcttcagatgcaatggtataagagctgattatcttagtgggaggac

SEQ ID NO: 22920 - DNA, 500 bp, Glycine max
aagaagagcaaaacttcattgtgctcatatgtcccatcaaccttgtgcaaccctaattcgacagagcagtgagctccctcctatgaattgaaacgaagttcagcgtggcagggaggaagaaggtagtagagttgtccggcgacggcgcaattctttccggtgacggcacggtggtcgcgttttattagccaattgcgtccactttttcccgcaacggtgaaattggaagcacaaaccatgtctgtttctgcgtcacaaaccgaagaacaagtctcaactaggaaaccaacaacactgtgtgaagaatgcaaatcgaacccatcgaaatacacgtgccctggttgctccttacactcgtgcagtcttccatgcgtgaagtctcacaaagagcgaactgggtgtagtggcaagaggaaccagactcagtttcttcctctttcgaagtttgatgacagtgtcctgttatctgactatactttgctggaggaggtgaagagggt

SEQ ID NO: 22921 - DNA, 905 bp, Glycine max
ctgagttctcaaaattgggtctttttgacaccaaagggcatgtcacttcatgcacccttgcatctgttgctgttatgttcctcattgtactctatggtgttctgaggtgcactagtgtgtgggctcatttgggttcaggcatgctcttagggttgctttggatgcaaagtgcttatgtgggccatgattctggccactatgtggttatgacaaccaatggtttcaacaaggttgcacagatcctctctgggaactgcttgaccgggataagcattgcttggtggaagtggactcacaatgctcaccacattgcgtgcaacagccttgaccatgaccctgatctgcagcacatgccggtctttgcagtttcgtcgcggttcttcaattccataacctctcatttctatgggaggaagttggagtttgatttcattgcaaggttcttgatctgctaccagcacttcactttttacccggttatgtgtgttgccagggtcaacttgtatctgcagaccattctgctattgttttcgaggcgtaaagtgcaggatagagccttgaacataatggggatccttgtgttttggacttggttccctcttttggtgtcttgcctgccaaattggcctgagagggttatgtttgtgcttgctagctttgctgtttgttccatccagcacattcagttctgcttgaatcactttgctgcaaatgtgtatgtcgggccaccgagtgggaatgactggtttgagaagcagacaagtgggacattggatatctcttgctcctcttcgatggattggttcttcggtggcttgcagtttcagcttgagcatcatttgtttccaaggctacctcggtgccaattgaggaacatttcgcctttggtcagtgacctttgcaag

SEQ ID NO: 22922 - DNA, 1372 bp, Glycine max
gtacttccttaatttgccaccctaacctactgcattattattctcttccccttaatttctatctccaatccctcagcaaaacgcagcaaatgggtcggcttaatctcctacttgtgtggtcactctcattaacactgtccctttattatctacacccaatctctgctcagctcagtccaaaccactatgctaaaacatgccccaatcttgaaagcatcgttagacaggccgttaccaagaagttccaacaaacctttgtcaccgtcccagccacccttcgtctcttctttcatgattgctttgtgcagggttgtgatgcttctgttttgattgcatccaccggaaacaaccaagcagagaaggatcacccagacaacctgtctttggcgggtgatgggtttgacacagtgatcaaagcaaaggctgcagtagatgccatccctcagtgcagaaacaaagtctcatgtgctgatattctggccttggccacccgtgatgttattgcactgtctggtggaccttcatacacggttgaattgggaagatttgatggtttagtttcaagaacttcggatgtgaatgggaggcttccacagccaacgaacaatttgaaccaattgaattcactgtttgcggcaaacggcctcacccaaactgacatgattgctctctcaggtgcacacacccttggattctcccactgcagcaagttcgccagtagaatatacagcaccccagtggacccaacactgaacaagcaatacgtagcccaattgcaacaaatgtgcccaagaaacgtggatcctaggattgccatcaacatggacccaacaactcctcgtaaattcgacaatgtttattaccaaaaccttcaacaaggaaagggcctcttcacctcggaccaaatcctcttcacggacccaaggtctaggaacaccgttaattcctttgcttccagtaccaacgttttcaactccaactttgtggctgctatgaccaaattgggtcgcgttggagttaagactgcaagaaatgggaaaattcgtaccgattgttctgttctttaagttaaggctttagttgtacgtagaaagtcgcaaacagtgcatgttttggaggtgaacacaaaacacacacacacattgcaattttattgcggggaatttgcacggggtagtttagattgactgttgttaataaatttgtttgcgaataattcgggagttgtaatttggatgttcgggaaaggaagggtaaggttgagtttttatttgttgtaatgtttccaaataattcgaacttttagaattgttcatataaataaatgttacccagagggggaaatcaccaaaaatgggtgcgggattacttt

SEQ ID NO: 22923 - DNA, 466 bp, Glycine max
cggctcgagcggctcttcaaattaagtctctgcattattctcttcccttttctatctccctctgcaaaaacgaagtaaatgggtcggcttaatctcctacttgtgtggtcactctctttaacacttttccttaattatctacacccaacctctgcccagctcagtccaaaccactatgctaacatatgccccaaccttgaaagcatcgttagacaagccgttactaataagttccaacaaacctttgtcaccgtcccagccacccttcgcctattctttcacgattgctttgtccagggttgtgatgcttccgttttgattgcatccaccggaaataaccaggcagagaaggatcaccaagacaacctgtctttggcgggtgatgggtttgacacagtgatcaaagcaaaggctgcagtagatgccgtccctcagtgcagaaacaaagtctcgtgtgcagatattc

SEQ ID NO: 22924 - DNA, 696 bp, Glycine max
ccgaaatgagaatccaaagttactgatggcagcatctgcaatatgtcttccagttaatccaatgatggtttcagttattcacactgggatgatggaggtagcatttgctagaagggcattgaaggatccagacttgagaatggctcacacagtgcataagacatcgtcgttacttggtggtatgctttttgtagctgatgatttatttcctaaaactccttaccttcatgctgcatggcatcttgctgctgctgttggtgtaggcacctgcaataagcttcttgagtaggtgtgcacactctattcgaaagctggaaactatgcattctgagtaagaatagcatcagcataatctgtcgacttaatttgtagaagcaatggttaagatcataaggtagtacattgtattttattggattcggttgaggatgtagatatgcaaattaggttccaaattattctacccctcttcaatttgtagttttatgttcattagttaaactcattggagaaagcgattcatgcagcaaaaatctggcacctattcttctccttagataaacatgcagttatatataaaacatcgtgcattataattctatctgaacatgtatgttgagatactatggagactcttgactttttagtttgaagtgtgatgggattttctgaagattggaaatatattatatcatg

SEQ ID NO: 22925 - DNA, 1023 bp, Glycine max
tttacgcgtgggcggacgcgtgggaaaaaagcagaacaacgttagtgaaccaacccaacacacaaagcaagagaaaaaagtatctcaatcaatcaacaaaagctcactttcataaagacacgcacacatattcttgttacacaaaatggaccaacaagagggtaacacgtggacaatgccaccgttctgggcggttgagcagcgaaaccgccgccgtcttcgccgctcttactctctgttgctcacctccacctccctcctcgtactcttcctcgtactcgtgctggtgttctcgctcatcgtggttccgacgttgcactcgttcgcttccaacatcttcaaacctcgtacagttaagaacagctgggactccctcaacctcgtactcgttctcttcgccattttttgcggcttcctcagcagaaacaacaacacctccgaaaccctaactccgcgctctcgcagaacgttctcgaacccttcaacgccaccatcagcatggtaccaaaacgattactctcagattcataatcgatcgtttaataggttgaggagctttaattcctaccccgatctgcggcaacagatcgccgccgatgaaaggttccggttttatgatgatacttaccttctccggcaccggaacatgagaactgagactgaagaagaagaagaaaaggaaataggaattgataatgttgccactgcgccgccgcaatcgccgccgcaacagggaatggaagctgttggaagaaatgtcaagcgagcatatcaagtggaaaccgtcgaggagcataaaaaggaagatttagatgcgcagatttcaccgccgccgccggcgacgagatcaaaaggtgttcgacggaatgtcaagcgaacatatcaagcggaagccgttgagaaacatgaaacaaatgattttcctgtgatggattcacgaccgccgccggtgacaataaccaaaggtgttcgacgaaatgcaaagcgaacatatcagccagaaaccatggagaaacgcgaaac

SEQ ID NO: 22926 - DNA, 815 bp, Glycine max
ggaggattcatatcctctctatgaacctggttcttgcaatattatcgatgaacaattcaattgtatccaaaatggaaggcctgataaagcctttcagaaatataagtggaagccaaaggggtgcagcctcccaaggttggatggacatcgaatgctggatatgttgagaggcaagaggcttatctttgttggtgattccatcaataggaatatgtgggaatctctaatttgcatcctgagaaacgctgtgaaagacaaaagcaaagtttatgaagcaaatgggaagagtccatttcagaggagaagcctcttattcattcatattcaaagattatcacttctccgtggagcttttcgtgtctccattcttggttcaagaaggggaaatgactgataagaacgggacaaagaaggaaacacttcgtctcgatttggttggtaaatcttcatctcaatacaaagatgcagatattctcgtcttcaacactggccactggtggactcatgataaaacttctaaagggcaggactattaccaagaaggtagccatgtgtatgctgaattaaacgttcttgaggcattcagaagggctttaacgacttggagcaggtgggttgatgccaacataaatcaatccaagtctatggtattcttcagaggctattctgcttcacatttcagtgggggacaatggaattctggtggacaatgtgacagtgaaaccgtgcctatcaagaatgagaagtacttgagggaatacccccctaagatgagggtattggaaaaggttttgaagaacatgaaagcccatgtc

SEQ ID NO: 22927 - DNA, 630 bp, Glycine max
aagagattgagaaccttgaatcttctcgtggtaaggttatgaaaaagctttccataactgttagcaagtttgatgagcttcaccacctgtctgcaagtctcctttctgaggttgaaaagctccaatcccagttgctagaaagagatactgaaatttctttcttgaggcaagacgttactagatgcactaatgatgctcttcttgcatcacaaatgagcaaccagagttctgatgagatctttgagttcttgatgtgggttgacacaattgtgtctcatgatggggtgcatgatatacatcctgatatgaagagcaacagtaaggttcatgaatgcaaagaaatacttcataagaagcttacgtctttattgtcagaattggagaatctaagggaagttgcagaaagcaaggatgcaatgttgcaaatagaaaggagcaaggtagaagaactgagccacaaaacagtaactcttgagacatccttacatgagaaagaattgcaattgaatttgcttgaaggtgtggaagacactggaaagggagctggcacaagctcagaaattgtggaggtcaaaccagcgatgaatgattggtcgccatctggtgcttttgtaacacctcaagttcgca

SEQ ID NO: 22928 - DNA, 461 bp, Glycine max
cagaaagaggattgagctttgagccagagactatggcttttacttcttcatgttctcttgcttctcagtttctccctcccatatatcattctgcaatcccttttcactcaacgaactgcacaaatttgtcattccccgctgttccgactccaagacaacaaccactgttgttttcttcaacctcaacttgcttagcagcagcggcggcgtcaaactcaaacagcacttcgaattccaataacaacaaccctgcttcagcttcagcttcgtcgaaagagaagaaagtagaagtggaagtggaagtggaggaggagctgccgtggattcaggaaaaggctttggacctggtcgagttcacgggctccgttacccaagccattcccgggcccagagtgggtcccacctccttgccttggattctcgctattcctctcacatatgctggccttactttcgtcatt

SEQ ID NO: 22929 - DNA, 381 bp, Glycine max
ccgaagcgagaaagaggattgagctttgagccttggggaagaggcagcagagacaataatggcttctacttcttcttcctcttgttctcttgcttctcagtttctccctcctcctagaaagctttctgtaatcccttttcactcaacgaactgcatacatttgtcattcccggctgttgtgactccaagacaacaaccactgttgttgttttcttcaacctcaacttgtttggcggcggcggcggcgtcaaactcaaacaacatttggaattccaacaacaacaacaaaccagcttcgtcgaaagagaacgtagtggaagtggcagtggatgaggagctgccatggattcaggaaaaggctttggacctggtcgagttcac

SEQ ID NO: 22930 - DNA, 660 bp, Glycine max
ctcgagcgtttgaattgccaactctttgccattaatgttcaaacataacacaacaaacacaaagaaggttcacaacaatgaccactctgtgatcattatttatttattcattagccgctcaacctttgaggcttgattgcttgaacggcatctttttgttcttgttctttcttcttcctctcttgcacttacatgggggctcgttgctctaaattctctttctgctggttccactctcacctcaaaccttctgtccttgaatcctctgaccaagaaaatggtgagaagggtgagagaaaattgtggccaagttttggtgagttcaatttggagcaactgaaggttgccacaaatgggttctcctcagaaaacatagtgtctgagcatggtgagaaagctccaaatgttgtttacaaaggaaaacttgataatggacagtggatagccatcaaacgtttcaacaagtttgcctggcctgattctcgccaattcctcgaggaagccaaacaagtggggagccttagaagtgaacgtctagcaaatttggttggttattgctatgaaggggaagagaggctgctagtagcagagtttatgccacatgaaactctggccaagcatctctttcattgggaggcacaaccaatgaaatgggcaatg

SEQ ID NO: 22931 - DNA, 579 bp, Glycine max
cacctacaacttgctacaacttacaaggccattcccacaatattgcatatatatagcaccccataaggcactgcacccactaccatcttaatttctccttcaattgctacttcaattctgattgcaaccacgacactactccaccttccaacatgggcggtatcagccttgaggaaatcaaaaacgaaaacgtcgatctggaaaaaattccagtagaggaagtgtttgagtcgctgaaatgttcaagagcaggtttaacatcagacgaaggagccagccggcttcaagtttttggaccaaacaaattggaagagaaaaaggagagcaaacttttgaagtttctgggtttcatgtggaaccccttatcatgggtcatggaagctgctgctataatggccattgctttggccaatggtggaggaaggcctccggattggcaagattttgttggtatcattgctctcttgttcattaactccacaatcagtttcattgaagaaaataatgctggtaatgctgctgctgcacttatggctggtttagctcccaagataaggttcttagagatgggagatggac

SEQ ID NO: 22932 - DNA, 413 bp, Glycine max
agcgtaccaaagactatgcagattagagggcatatttccctctttggaggccgcacatgcattggctatcttagataaattggtccctactctatgcaatggtactaaggttgttgtgaattgtagtgggcgaggagataaggatgcagcaatagtcttcaatcggggaatatatatttgacaaggaataacaaagatggatgaagacctgtgttaaataacgatttgacctagcttacgatgcctcctactcctgctatctctcagtcagagctgcacgattcatacgttgttaacggctaggacgtggcctcggtccatcctaaaaaacaccgtcattaactatcatcagatatttattcatgttactgtgaaaaagggattaaaggaaagtattaaactctttagagaga

SEQ ID NO: 22933 - DNA, 346 bp, Glycine max
agataagtgttgaaagacatgttggtgccacccagggggggagctttacttctcttataaaagacaatgagaaacaaaatgatgatgtccgacctcagtcagtttcagtgaatgatgatgtcatttctagttctggcctaagttgtacacatctttggctgcagagtagagttccactcggatgtattccatctcaatccacagccaccattaagcttgagctacttccattgaccgatggcataattacacttgactctttgcaaattgatgtcatggaaaaaggtgttacctacatccctgagcgctcgctaaagataaatgcaacatctagtatttcgaaggg

SEQ ID NO: 22934 - DNA, 394 bp, Glycine max
gaaattctcaacttcctgtgcagatgtattccatctcaatccacagccaccattaagcttgagctacttccattggcagcatacaagttttgatgaggagaaacataacaaaaaaacaagctaagttgcaagaaattatggaaatgctttgttttcctcctattagctcttttgttatactctcatcacctgatatatttttcatatatagaaaatgttaacatgtaatgaatgtgtgatacttaaattcatatccttaaaatttagaaagaaaacaaaaagacaaataagttttaagcaagggacaactatattgacaagctttatattactatactatgtatttttctagtgtgtaaattccttgattagaattagttcatattcatagaat

SEQ ID NO: 22935 - DNA, 291 bp, Glycine max
tatcagttccaggcatcatttaacagacttttcaattagccatgtcactaaagtcagttactgtattgactacatatctcatctatgcatccatagttgctaagtcagctatggatccctacaaggccctcaacatcatcctgaacccaaacggaaccctcacacgcttaagcattcctccacaaagccctccctcacacggatcccactctccccacagcggttctccccgaagatctcaccatcaaccaatccaagcacacctgggcccggatctacctaccccacaaa

SEQ ID NO: 22936 - DNA, 514 bp, Glycine max
cttcttccactgatccacctttttcctcgacgcgcagaatatctttttttttttttctctctctctcgtatatgtaaagacaaaaccaaaaccgtggatgtgtctctacaacccaccatttcaatctcttccctctctctctccctgtctttctctccttttccgtgtttatgcttcaccctttcatagatctgcctgaaaaaaacccctcaattccaaacccttgcgatccgatccaggtcaattaatttctctctctctctctctctctctagaatgtcttcccaacgcgcagatctagcgtgccggatcttcccggagcccgatgcctccgaaatcgaccacttcgaccggttaccggactcgctcctccttttggttttcaacaagatcggcgacgtcaaagccctaggccgctgctgcgtcgtctcgcgccgcttccactccctcgtcccgcaggtcgaaaaccgtcgtcgtccgcgtcgactgcgtcatcttcgacgacgactcctct

SEQ ID NO: 22937 - DNA, 410 bp, Glycine max
aaattagaggagtaagtatgtaatagggacaatagaggaagaatgagaggctctagcactgatccagctttttcctggaggcgcatgacataatatctctctcttctccaacctctctcatatatgtaaagacaaaaccaaaaccgtgtttatgcttcagcccttcatcatatagatctgcctgaaaaaaacccttgcgatcagatccagcccaattaatctctctctctagaatgtcttcccagcgcgcagatctagagtgccggatcttcccggagcccgaaatcgaccacttcgaccggctaccggactcgctcctccttttggttttcaacaagatcggacgtcgtcatagccctaggtcgaatacgatgtcgtacgcgtcgactgcgtcatctccgacgacgact

SEQ ID NO: 22938 - DNA, 321 bp, Glycine max
ccacgcgcacagtctaaaccgcgatctctcgaactcttgaggggcgtttccacttcttgtttgaggggcgcttccacttcttgttagaggcggcttctttctcgttggatgagctggttgatattttgaacgtgccagtggccttgatgatagccgactcggcgtgctccaagagccaccggatggtcttgccgtcgaacttgtggtcgatctcttgggtcagctggaagatccgggcgacgcaggcgttggtctacggcattggtctctccgaggagagacatggccaagctgcaggtcggcgtctccttggtctggtgc

SEQ ID NO: 22939 - DNA, 409 bp, Glycine max
gcgttctttgcagaactatcgaattgtcagtttgtttacaattcgtcacgggatccattctacccttacatttgcacaggctgctgcaaatgtaagggtagaagtgaccccgtcaccaattgtagcagcctgtgcatcagcaggcatcacaatcctcaatgataatgatcttggtaattgttcacagaaccactgtgtgcagtttgaaacagctacagtgcatggccttcatttgttggttcaccacagtgccatcttttctcctgaacttctggtccttagcatcacggtaattaaaaacagtaacacgcagaaacttggacagcttgtaaagttaatgttggtgtcaggggtttggctgttttgtttttcacctgtcaaagttttctatgcttcatgccatgtggta

SEQ ID NO: 22940 - DNA, 186 bp, Glycine max
aaaagaatgaagatatataatatatatatatatatggccaaagtatacaagttcattctagtgtaatgaggtcagatgttcagagggctatagacagctgacattataccgaaatccgcgtggatctcttaacctgatattcgtcacgtcacacaatggatactcttgtttataatgttacatttc

SEQ ID NO: 22941 - DNA, 416 bp, Glycine max
caaggatagagatcaggatagagatagagaccgttatagggatgatgggatgaaagacagggaccgtgaattccgagaaagggacaaatctactgcgattgccaacaaggatgtcttaggttctaagatgtctctatatcccagcaaggagaagtatttatccaaacctataaatgagctggacctttctaactgcgaccagtgcactcctagttaccgtctcttaccgaaaaattacccaatacctgtagctagccagaaaacagaacttggtgccggagtgttgaatgatcactgggtgtctgtcacttcaggaagtgaggattattccttcaaacatatgcgcacaaatcagtatgaagagagcttgtttagatgtgaagatgacaggtttgaacttgacatgttgttagagt

SEQ ID NO: 22942 - DNA, 824 bp, Glycine max
  unsure (1)..(824): unsure at all n locations
tagaggcccacaatcataacaaccagaaagcccccttctccttccaacccctccattttcaacaacaattcctctaagcatcgttcagacaagggtacaccacaacagcttttgttagtcctcaccaagcgatgagagttcccgttccctcatccccacaggccaacccaaaacccaccaataacgttgtccgtaccattgcccttcccaacctcaacaatagcaccacgccccccacgggcctgtgctacgagcccacttctgtccttgacctgtgccggagcccgagcccgggcaccgataagcccaccaccgatcactccgttctcgtcaccaactcccaagactatctcgacctggaagaccatgcgttgcacaacttggactgggactccatcatgaaggacttgggcttacacgacgactccgccacccccgttttgaaaacttttctccaccccgacgacgacgacgacgacgacaacaacaacaacccatcatgcgacgacttcacactcttcgaccacgcgcttgaattcaccactctctccgacatctactccaaccaaaactttggttttcgatttcaaccacttgcctcacgacttcaaccacctcaacggcttcgatttcatcgaagagctcatccgcgccgtcgactgcttcgacaccaagcagttacacgtggcgcaactgatattggagcggctcaatcaacgactacgatcgcccgtcggaaaaccactccatcgcgcagcgttttacctcanagaagctctccagagtcttctctccggttcgaaccggactccgaggatttcatc

SEQ ID NO: 22943 - DNA, 304 bp, Glycine max
ctcccttcatttcgaattttcatatatcacattcccttcactttctattctttcttcttcttcacttcaagacagccaaatgaacgatcttatgaccaaatccttcaccagctacgtggacctgaagaaggctgcaatgaaagaagatgttgatttggaagctggtgttgttgtttcttctgctactcctcgcaacgtggaacttacctcttccacaacacacttggacaccgacatgggtctcttcctcgaagaggctgagaaggtgaaggctgagatggggtccctccgtgacatcctcggc

SEQ ID NO: 22944 - DNA, 265 bp, Glycine max
cgtcgtacggcgtcccggcgaaacggcggtggagagggctcgtagttgcggtgctcggtctcgtcattctctccatgctcgtccctctcgtcttcctgctcggtctccacaacggtttccactcctccggatatatatatgaacagaagagtactccttcgaatgagaaaagtcttgaaagatatgatagacatgatgttggccataatgagtctgagggaggacaatcaagtcatgtggaggatcttatcacaaagtttgaacc

SEQ ID NO: 22945 - DNA, 299 bp, Glycine max
gcatttataaagcgcctgctggctgtttcagatcctagccaaatgaagactagcgtgaccgagactagtgcagctgaacttgcgaactgctttattggttgatggtggttgggtacagcattcgcaatattgaagttcgttatgacatggaaagagtacttggcgcccctccaaagctagctgaattgccgccaggtgaaaatgtttaagcagtctggagttaagtagttcaacaaagtactggtgtctcttagttgaagccaagtgccctaattagattttgcactttttttgttgat

SEQ ID NO: 22946 - DNA, 422 bp, Glycine max
aatacatctcaatgatatctctgtcaaatgtattgaaggaactggtgttcttttactatggtctgaccagtgggacggcatactaggccatgtcatgtgatttccatgaagagttccctccagctgttccataaatgatgcacatcatttagccattctttatgggattggattctcatatgcatgtagtgaggtttccctcgttcagagcatgaaatgaatctactgaaaaaatgtcatgtgatttctgaagggttcactgttagttgagtaacgatgcttgccctttgccaataaatattcgtgtaggtatccaagtttctttagcagtattgaaataacattgctttcattgagagttgaactcaagacctcccgcttactaaacgggtgctctgaaagctttgcttctttgttaaaaa

SEQ ID NO: 22947 - DNA, 253 bp, Glycine max
  unsure (1)..(253): unsure at all n locations
gtgtggactcaaggtgtgtcaaggcttctatctattgctgcagagaggaacaacagaaacagaatataaatatataatgaaaaattattgaggagatggtagtaattaagtatgatatgatataattaattaatgaacatggtagtagatcttttgatacatggtggggttggtggggttttaatccaaatgtaaaaatgggtaaattaaattgaagttcttctagttatgccanaaaaaaaaaaaacaaaaa

SEQ ID NO: 22948 - DNA, 491 bp, Glycine max
ctttaacatacaccttccaacattatttgtttttctcttctagcttccactatgtctaaaacgaatgtgagaagacatgctcttgagaagtgcaggagtgtgaaagagacacagaaagtattgaaccacaactttttcaccagaaacctcaagaaagtgtaccctattgggcttcagaaaagcacctcatctttgtctctgtcttcaatttcattgtctttgtcacaaaactcaaatgactcttcacaggctgattctttgactccactggatgaaaagatttcgctggcactgcgtttgatatcgccacgggaaagaagagaacctacaatagctgcttctaataagcctcttcagcagcagcaaccaccaagtccaccacccactactgagcctggggaattgaaaagatgtaactggatcacaaagagctgtgataaggcgtacatagaatttcatgatgaatgctggggagttcctgcttatgatga

SEQ ID NO: 22949 - DNA, 501 bp, Glycine max
attgtggtagtaatactaataaccagtgactaagcaaaaatggttcagatatcagtttcggtggtttcactctatcgccacccagttccgatggctctcctcgccgtcacttcgcgcgctcccttcctcttctccccaaaccctaaaccactttctccatcctctttctactcccacctctctctctctcctcgctctcccaggttcccttctctccgcttccgctctgccaccggagacgccagcgacgccggcaagcccgccggtaagatctccgacgagtggggcgaggactacgatcccgaggccgaagcattgacctccaagcttcccgactcggaccctcccaaggacgaggacgagtggcaggaaggaggggcgcccgacgccggcggctacgtcgacggcgggaacggaactccggtcaccggagctgaagatccggcggaggaggaggtggacgataagttggaggcgctgaagcgtgctttggtggatact

SEQ ID NO: 22950 - DNA, 523 bp, Glycine max
ctcgtgagtttagcagagtgcactcacctcacctagggttttgcatcagttttcaaccactatagcagaatggaacaaaatgcgtgcgaggaattgtcgaaaattgcttcggatttcaagtgcgagaagaaggttctcgaaacagttgatgaatcaatcgtatgccccactccacagaagaacgaggaacccttaatcgttaaattcagagagggacaaaccaaccttcctgaaaaatactctgcacttgtagatttgtttggtcacacaagctgttcactcaggttgctgcgtctgtgtaaaaagtctccaacttttcaaaatgtttgccgacaggttgaagttctttcgaagagggaattctcccatgcccatcttgcgcagatgaagtatatactccctaaaagtgtgtgtatagataaggtgcttgttcatgataagaaaagcttgtgtatggtgcctgatatgaagatcacgttgagatttgaggttgtgaaagattgctctggcgaatctgatgatc

SEQ ID NO: 22951 - DNA, 373 bp, Glycine max
aatggagaagctttgaagcacaaagctttccaggggaacatttctgattataatccacatacagattcatctacttctactgttgaggttgtccgtttggtggcaggcaacatggctactggacaactttacagtcatctaatacccctcacactacttcttgttgatggtagcagtccaattgatgttaccgattcacagtgggagctgtatattgtgtgtcagaagaaaactgatcagcagggagagatccaatataggttgactggttttactgctgtttatcgattttatcactatcctgatgattcccgattgcgactaagccagatactggtattacctccttaccagcacaagggttatggtcgat

SEQ ID NO: 22952 - DNA, 471 bp, Glycine max
ctttcgcgtgacaaacaacagagtttatttctttttggttccttggttcacgctggctgcaaggcttgtgtttggtgggagcagcttctcaccgtgacgctgctctacgaagacgacgacaacctcgtgtgacaacatcaaataatgggaaaaggaaacatggaactcgagacaaacaaggtctatgactacgaggatgcacgaggggacgttgaagtcccagataccgctcatcagataagcactgattcatggtttcaagtggagaagctgaatctatggaaatggtaggaagtaggaagaacgcaattaacccatgctttttctttaacaacaaaaaacatgtagaggtcacgggcaaataattgaattttcaaaactacccttttgtttttacctattgattgtctacgagctgagtcaaagtttcgacttgtgtgatacatttatgtctgaattttgactttattc

SEQ ID NO: 22953 - DNA, 817 bp, Glycine max
gacttacaacagagtttatttctttttggttccttggttcacgctggctgcaaggcttgtgtttggtgggagcagcttctcaccgtgacgctgctctacgagggcgacgacaacctcgtgtgacaacatcaaataatgggaaaaggaaacatggaactcgagacaaacaaggtctatgactacgaggatgcacgaggggacgttgaagtcccagataccgctcatcagataagcactgattcatggtttcaagtggcttttatcctcacaaccggaatcaacagtgcctttgttcttggatatccagggaccgtcatggttcccctgggttggatcgggggtgtgattggtctaattcttgctaccatggtgtcactctatgcaaatgctctagttgcttatctccatgaattaggaggacaaaggcacattaggtatagagatcttgctggatttatatacggtaagaaagcctataatctcacatgggttctgcagtatatcaatcttttcatgataaatactggctacatcattttggccggttcagccttgaaagctacttatgttctattcagggatgatgggctgctgaaacttccatattgtattgccataggtggatttgtgtgtgcaatgtttgccatctgcattcctcatctttcagctctgggaatttggctaggattttcaacagtcttcagcctggcatatattgttatatcatttgcgttgtcgcttacagatggattacaatcaccgcctcgagattacgagattccaggagatggtgtaagcaaaatctttacaataattg

SEQ ID NO: 22954 - DNA, 391 bp, Glycine max
tagtgcaaaagctcctgatcagaaaaataaaattgttagccaggtgaagcaaccaattacagataaacatgaactggttcaaggtaagtctgttgtcaatgatgcaactgtaggaaaaaaatttgataagcaaacccctggagaagaaactaatttgcctattgggaggagaaatttaattgcttgtccaagaaacaatgaaaggattttaaacatggataaagatgtatctggttctgctaagtgtcatccggtcaatgcaccagagaaggggattgattcagacaatcctagcagaacaattactgaatcctccaattacaacaatactaccaatttagaattgatcaaacaaacacaaaaatctcggggtgattcacttcaaacatct

SEQ ID NO: 22955 - DNA, 393 bp, Glycine max
caaactttctctctctctcacacacacgctccttttgattcgcaccaacttaccatcagaaatttacattcacatcatcccaacaaaaaaaaaaattaaattctccacacattttactttctccgcaactttctcagcactctacactcccatttctgcttccatgactgaaccacacaaacgtagcaatctaaagcttcgacttcaaccttttttcagtaaagagagagctgagtagttctcagtaagaagcagctggaaaaaaaattaaaaaaaaattctcactccttctagggttttgttttattttgcattgaaattgaaatcccactactcaaaattcaaaatcccaaaccttctctctagaaaaagaaacagttttttttttttaat

SEQ ID NO: 22956 - DNA, 315 bp, Glycine max
cagtaggtggatttctgttagaattgtccaataaagacaaagtaacccttttatttcactgacccaaatcatctaatgattcaattgcactgaaaaataaaaatccttgcctttcccaattagcattttattcacctaacccatttcctattttatttccccacttaaaatgatatttttttcttcttccactaacctgttgaactgatgctagccacgcagggtttacctggcgtgggttggattgaaagttgaaacatatcctacttgagatagtttgtggaatttaatattttgagtaaaccccatcacttt

SEQ ID NO: 22957 - DNA, 482 bp, Glycine max
gcgatttacaccttcatatcaatgtggtttgttggtggcctgactgcctttcatttatatcttataagtacaaatcagactacatatgagaacttcagataccgatatgatcgacgggccaacccgtataacacaggagtgttcaataatttcttagagatattctgcaccagcattccccaatcaaagaacaatttcagggcaaaggtgccgatggaaccagtattacctgctcgatcggtgggtggaggctttatgagcccgagcatgggaaaagctgttgacgacatagagatgggcaggaaaaccgtctgggccgacatgggtagtactgctcttgatccttctgaaggtcaattaaatgagcgcgtggcagtaaaggatggggaattcggtgagttgtctccagaaattaggacaacagtggacgaaacgagtgaccgtgccggaatacatcccaggagatccagctggggaagaaa

SEQ ID NO: 22958 - DNA, 519 bp, Glycine max
atggaagcttcatcacctcactctctcaccatgcagaacccctctgcttacctgtcatgctttcttatcctcttgatcattcttttcccaacccacgcacgtgccgacctccccggcacgtgggagcttctcgtcccggacgccggcatcgcctccatgcacaccgccgtcacgcggttcaacacggtggtcctcctcgaccgcaccaacataggcccgtcccgaaaactcctcccaaaaggccactgccggtcggacaaaaacgacgccgtcctgaagctcgactgctacgcccactccgtccacctcgaccttgccaccaaccaaatccgccctttaaaaatcctcaccgacacctggtgctcctccggccagttcctccccgacggcaccctcctccagaccggcggcgacctcgacggcctcaaaaagatccgcaaattctccccgtgcgacgacgcttcgtgtgattgggaagattctccttgcgattgggaagagctcgacgacatcgaattg

SEQ ID NO: 22959 - DNA, 317 bp, Glycine max
gaagcttcatcacctcactccaccaatccccacttcgccctctctctctcactctcaccatggagaacctctcatactttctcttccttctctttctcttcgcaacccacgcacgtcccgacctccccggtacgtgggagcttctcgtcccggacgccggcatcgcttccatgcacacggcggtgacacgcttcaacacggtggtcctcctcgaccgaaccaacataggcccatcccgaaaactcctcccgaaaggccactgccgctccgacaaaaacgacgccgtcctgaagctcgactgctacgcccactccgtc

SEQ ID NO: 22960 - DNA, 981 bp, Glycine max
aggttatcgaacagctcaacaaaaccccggctagggtctcgctgctagagttacttatgagctccgagcctcatcgggctctgctagtaaaagtgctgaacgaggctcacgtggcccaagatatttcggtagaaggcttcggagggctggtaaacaatatcactgccaacaactatcttgccttcgccgaagaagaaatccccgccgaggggagagggcataataaggctttacacgtatcagtcaagtgtatggaccatatcgtggccaaggtactcatcgataatggttccagtttaaacgtgatgcctaagagcactttggacaagttaccattcaatgcttcccatttaaaaccaagttcaatggtggttcgggccttcgacggcactcgccgagaggttaggggagagatcgatctcccagtacaaataggccctcacacctgtcaagtcaccttccaaataatggatattaaccccccctacagctgcctgttggggcgcccttggatccactcagtgggagttgtgccttctacactccaccaaaagctgaaattcgtagtggaggggcacttggtcatcgtgtcaggcgaggaagatatcttggtaagctgcccatcctccatgccttatgtggaagccgcagaagaatcgttagaaaccgctttccagtcttttgaggtggtcagcatttcctccgtggactccctctttgggcaaccttgtctgtccgatgcggcggtaatgatggcccgagttatgttggggaacggttatgaacccgggatgggtttaggcaaagacaatggtggcataactagtctgataaaaacccaagggaatcgtgggaagtatggtttaggctataagcccactcaggcggacatgaaaagaagcatcgcgggaaggaagaacagtggtcagagctcgcgttggaaacaagaaagtgaaggaaacccgccctgccacataagta

SEQ ID NO: 22961 - DNA, 397 bp, Glycine max
gctggcatacgaaactgtggccaggatgggattaatgaaattaaattcctgatcaaagaggcgcacaaacgaggaatagaggtcatcatggatgttgttttcaatcatacagctgaggggaatgagaatggtcccattatttctttctaaggtgtcgacaacagtatgtattacatgttagcacccaagggggagttctataactattcaggatgtgggaacacgttcaattgcaaccatccagttgtgcgacaatttatagttgactgcttaagatattgggtaacagaaatgcacgtggatggttttcgctttgatcttgcttctattatgaccaggagtagcagtctctgggatggagctaatgtatttggtgctccaatagaaggtgacttgt

SEQ ID NO: 22962 - DNA, 533 bp, Glycine max
ctgcagcgaagttagcagctgagaatgctacggaagagattaatcaacttaaggaagaagctaaagagtggaaatcaaagtcagaagattgtgaaaaggaaatccaagagtggaagaagaaagcttctgcagccacaacaaacatatccaaacttaatcgtctgatacactctaaggaggcacagattgatcagttgaatgtgcaaaagcaggaaatattagaaaaatgtgaactagaacagattagcctcccgatcatactggatcctatggatactgatagctcagtaccaggtccatcttttgactttgatcaactaaatagggcactgaaagataggagacactcagacagggataaaattgaggtagagtttaagcaaaaaattgatgccttgatatctgagattgatagaacagcaccaaatttgaaggcattggaccaatatgaagctctgctagaaaaagaaagagctgtaactgaagagtttgaagctgtcaggaaagaggagagggaaaaaacacagagattc

SEQ ID NO: 22963 - DNA, 501 bp, Glycine max
gcggttcaatttccggtgaaaccaccaccgtctgctacccttccttggtccacgtcgccataaccctcgacgtcgactacctccgcggctcaatcgccgccgtgcactccatcctccacaactccctctgtccggagaacatcttcttccatttcctcgtctccgacaccaacctccaaaccctagttgaatccacgttccctaacttgaagttcaacgtctattacttcgatccgaacatcgtcgctcacttgatctcctcctccgtgcggcaggcgttggagcagcctctcaattacgcgagaaattacctcgttgaccttctggagagttgcgtggagagggtgatctacttggactccgatctggtggtagtggatgacgtggcgaaactgtggagcgccggtctggactcgcgtgccatcggcgcgccggagtactgccacgcgaacttcaccaagtatttcacggcggggttctggtctgagtcgaggtgtcggg

SEQ ID NO: 22964 - DNA, 687 bp, Glycine max
ttgagacgtgctggaggggcacagggtggtgttcgacgagcgagacgtgtcgctgcacggggagtttctgagggaggtgaaggagctggtggacggggaaggggtggcgctgccgagggtgttcgtgaaggggaggtacgtgggtgggttggaggagttggtggagctgaacgagacgggtcgactcgggaggatattgaatgcgacgcgtgtggagagggggattgggaggcaaacgtgtggaggttgtggtggggctaggttcgttccttgcttcgactgtgctgggagttgcaagcttcttcacagagagaggtgccccaattgtaatgagaatggcttggtccactgccctgcttgtatttcataacttccatatctgctgtttaattttgttattcaaatcaccactagaatcatacatatttcacaccttgtctctctctctaccatcaacccttccacccaatatttttggaccatcttaattgttaccaatctagttatggggttaaagactctcttttttttattatcatacgcagataaatttaccttgcgcaccttaacctgcacttagtttcatgttaaggttagaaaagttcaaaagcaatatattaaaatcataaaatgtatgtctaccgaattttaacgataagaataatatttgaacttatatattttttt

SEQ ID NO: 22965 - DNA, 646 bp, Glycine max
ggagatttctcagttgtcaacacccttcggcacttcagcacagcgtgtggcagcatatttctcagaagccatatcagcaaggttggtgagttcatgcttagggatatatgccactttgccacacactcaccaaagccacaaggtggcttcggcttttcaagtgttcaatggtattagtcctttcgtgaagttctcacacttcacagcaaaccaagctattcaagaagctttcgagagggaagagagggtgcacatcatagatcttgacataatgcaagggttgcagtggcctggtttgtttcacattctagcttcaagacctggtggagcaccttatgtgaggctcacagggcttggtacctctatggaagcacttgaagccacgggaaaacgcttgtctgattttgcaaacaaacttggccttccctttgagttcttccctgtggctgagaaagttgggaaccttgaccctgagaggctcaatgtttgcaaaaccgaagctgttgctgttcactggttgcaacattccctctatgatgtcactggctcagacaccaacaccttgtggctcttgcagaggtaggtgaagaaagggttttagttttaggtccatttcattcattcattcatttatttaattctattc

SEQ ID NO: 22966 - DNA, 629 bp, Glycine max
tcattacccaataatccccactttctataccattgccgtatcgaccttttttgtattacaaccggccgaacacgacaacagcgccaatacaactttactttatacctaaacaccaaagtggaaacctacactacagttcaatcgaatctaccttgagctgtgctggatctcttcttcttcttcttctttcaccttaggctaccgagttaatggatccgagaggtgtactgatattagtggcggttctagttgcggaaattggctctgtcgccaacggaaatttagtgttcccggtggagcgtcggaaaaggagcctaagcgctgtcagagctcacgacgttcgccgtcgcggtcgaattctctccgccgtggatctcaacctcggcggcaatggtctccccaccgaaaccggtttgtattttacgaaacttgggcttggctctcctccgaaggattattatgtgcaagttgatacaggaagtgacattctgtgggtgaattgtgttaagtgctccagatgtcccaggaaaagcgatcttggtatagatttgactctttatgacccgaagggctcggaaacttcagagttgatttcttgtgaccaagagttttgctctgccacttatgac

SEQ ID NO: 22967 - DNA, 691 bp, Glycine max
  unsure (1)..(691): unsure at all n locations
ctccaaaatgcatcgtggaattggtttcatcacttttgcaagtgcagattctgtggagaatttgatgtcagaaacccatgaactgggaggttctgctgtggtggttgatcgagctactcctaaggatgatgactttaagccaatgggcagaatgccgccgccgccaccgccaccgccacaaggaggaggatatggcgcatacaatgcttatatctcagcagccactagatatgcagcacttggtgctcctactttgtatgacaacctggcccaatttatggaaggggagacccgtctcggagaactagtaagacaatttttgtcggccgtcttcccccagaagcaacttctgatgatcttcgccaatattttggaagatttggtcgtatattagatgtttatgttccaagggatcctaagagagcaggtcatagaggttttggacttgttacttttgctgaagatggtgcagcagatcgcgtctctcgaaggtctcatgagatatgtggacatcaggtggcaatagattcggctactcctgttgatgatgcagggcccagtgggaattttatgatgaatagtatggaatcttttgggggatatggtggtcctgtgcgatcttatgggaggatgtatggtagcttagactttgatgattgggggtatggnattgggagacgatcaagagcag

SEQ ID NO: 22968 - DNA, 754 bp, Glycine max
ctcttcacccatcaaaaaaaatcttttccctttctctctagaatcttcctcatcccctaccttaaattgcttctaccctaagccccaagtaacgtttcactcattcacattcacacactcaatgaagggagttacagtgaaagttgaagaaacaatggcgtatgctaatgctgcttcaactagcccaacaacatcttcaaacctctccccgcaacccatggaagggttgcacgaggtgggtccccctccgtttctcaccaaaaccttcgacgtggtggaagacccatccaccaacgacatcgtttcgtggagcagatcccgcaacagtttcgtcgtttgggactctcacaagttctctaccaccatcctgcctcgctacttcaagcacaacaatttctccagcttcgtacgacaactcaacacctacggttttagaaaaattgatcctgacaagtgggagtttgcgaacgaagggtttttggcggggcagaggcaattgttgaagacgataaagaggaggaggcacgtgacagtgacacagacacagtcacacgagggaggaagtggggcttgtgttgaattgggggagtttgggttggaaggtgagatggagaggttgaggagagacaggacagtgttgatggctgaaattgtgaggttgagacaacaacagcacaactcgagggagcaattgttgtccatggagactaggttgcaagccactgagaagaaacatcaacagatgatgaatttt

SEQ ID NO: 22969 - DNA, 499 bp, Glycine max
ccggaattgataacaaatataacggctgattcattcaaaattgaatcttataacctatcagctaaatatttagctaattgtactattttgactgccacacccaagcatggagcttcttatgtatagagaagtattcttaaagctatgggaagcttcatgcaggatttggccctcagttggcagctggaaattcatctttctggttagaaactggctggggtttgacccaactaactacttttctcgtttttgttacacatgtaaagtaattaataatgcaggtactatgttaccaagaaagttaaatctcaattaaatgcgagaaggattgctgaaggattgagcggtctaatgtcaaaggctattgacagagggctctataggggtttcttagtgggcacaagacagttgaagttagcatactccagcaggcagatgacactatatttttgggagaggccactatggaaaatgtaagagcaatcagagcaatcagagc

SEQ ID NO: 22970 - DNA, 479 bp, Glycine max
cgaccaaactcactcttaacattatttatagctatggttgaacagtgagcaccaaactgaattgaaattgcaccaaatccacaaaaggcagcacacttacacactattatgttcattgatgctataaacacacttgtgtgtgaagttatgattcctagaaaagaaatattactatccttttgaaaatcatttgaaatttttaactccatcttcctcacctctggatctgatcttcgcacggtgccatggatcgaatcctgaaagcggcgagagcctctggttctctcaacctctccaatcgctccctcacagaaattcccgacgaggtttaccggaatctggaggggctcggcggcgacgacaagtggtgggaggctgcggagcttcagaagcttattctggctcacaatagcattgcatcggtgaaggaagatctgaggaatttgccttttctttctgtgttgaatcttagccacaac

SEQ ID NO: 22971 - DNA, 426 bp, Glycine max
gcgaaaacgaacaagaccaaaacgaggtcgtttcgtttcacaggcttcctgattccccggaatacccctggtggcaagtgtctccgttgttccgcagctacctggagggagatttggattcggagaagttgagggattggtttctcggaacattgctagctggggacttgttctgaattcattcgcggagttggagaagccttattttgagtttctgagacaggaattggggcacgatcgtgtgtgggcggttggaccgttgctccctgaggacgcgaaagaggagcgaggagggtcgagttcggtgtccgtgaacgacgtcgtttcttggttggatgaaaaggaagatttaaccgtggtgtatgtctgtttcgggagcatggctattctgtccaaggatcatacggaggcggttcaaacagcgtt

SEQ ID NO: 22972 - DNA, 496 bp, Glycine max
catggcgtcactaggcaccccagcgcatgttagcagtaacaagaagcccttgcatcgttggagttggaaggcgaagcgtgtgaggtgcgcagtgtcaccccccacatggcgtgaagggcggcgcacggtgtcgttgtctcttgttctctcccacttgcttctcattcctaaccgtgatactgccctagcaagtcctttcgataagtatgttaagagaaaaaagcttgatcctctggaggtttatataccagctgtcatacttacagagtttcagatcaaggacttagaaaacattagaggatgaggaaccccaatttgccctctgccggtctctacttcgttctgggcctgcagcatcacttcgtgtaaatattagagcagtaagtgaagccttccttcaacttcttagttcttattatgaatgtgataatgtattttatctatcgatcttttcttttctttttttttaccccccactattaagtcatttaaaagc

SEQ ID NO: 22973 - DNA, 661 bp, Glycine max
gcgtcactaggcaccccagcgcatgttagcagtaacaagaagcccttgcatcgttggagttggaaggcgaagcgtgtgaggtgcgcagtgtcaccccccacatggcgtgaagggcggcgcacggtgtcgttgtctcttgttctctcccacttgcttctcattcctaaccgtgatactgccctagcaagtcctttcgataagtatgttaagagaaaaaagcttgatcctctggaggtttatataccagctgtcatacttacagagtttcagatcaaggacttagaaaaaacattagaggatgaggaaccccaatttgccctctgccggtctctacttcgttctgggcctgcagcatcacttcctgtaaatattagagcagtggcacagtatgcatctgacagtggctatggttaaacggcattcaatgatgttgatgaatgtctgaggtcgctggaagaacttgattccttgcttcttcatgcatcaagaaatgatcctgaagcctcagtcaaatcaatgaaggcaaaaatcaattctgcccttggcgctctggacagcctcttacaaaccgtaccttctgatgtgctgagtaaaggaaaggttatagctgattcatacagggaaccggaagacgaggaaacagggagtttggaccctgatt

SEQ ID NO: 22974 - DNA, 323 bp, Glycine max
aaaacatagaattgttgaaggaacaaaacgtgtgtgtctgtcttacaaggtttagtagtgactatggagcagagcattggtggacaatctagcatacaatgcatatttctacgcaaggactgcttctcctcaaagctcgcgtctcttccaacttctccttccgagatgccctttggtcacaaccgttggtttcgcaggttgtcggtttttccacgtttgcaactatgtcaagggctgagaaagggtttctccaaaaacatggcttgcagtgtcagtgtggataattgtgatacggttcatccagcaacagatgcttatgctgg

SEQ ID NO: 22975 - DNA, 277 bp, Glycine max
tttctcctcagaatctgaaagaacattcctatttcctacacaacactacacggtcctggtggaagagtctcttcactctccatgcaacaacgttggcgatgtctccttattctctctctgtgttagcctctgtctcccccaaaatgcgcacccttctttctttctcctcatcacactctccacatcttccaaaccacaacataactagatccaataataaactctctcattccatcaatggactttcatcatgcccttcttctcctttgctccccag

SEQ ID NO: 22976 - DNA, 587 bp, Glycine max
gtctatttcacacgcaccttcacttccacatgtgtcgcttatatctcctcacttaagcaccctcttatttggcatatcagtagctcactttggcttgttgagagcaattcagcaaccacaggccttagctgcaactaaaggtaggagagcaattccattgccgttgcttgttattagttcattttcacaaaatggaagagagcaccaagaggaaatacactaatctgatccatgaactaatccaaggaaaggaactaacaaagcagcttagtaaccatctggtttcatcttctccaatgtcccatcaaaccaatgaattgtttgttgagaaaatacttttgtcctatgagaaagcactcaccatgttgaactgggggtctattgtgggagaagccaaaaccaccagtctcaacatcatggattcccgttgttcttttacaaatagtgaaagccccagaagtgaggtcgtggaccgtgaatttgagcacaaagctgtcttcaagaaaagaaagaccatgcccagatggaccgagcaagtgaagatttgctcaagaacaggacttgaagggtctttggatgatggatat

SEQ ID NO: 22977 - DNA, 285 bp, Glycine max
ccctaacaaaaccccactctcattcatcgatggggaagaagaaggatagaatcgttcttccaccggagcttccgccggagattcccgacgaggaagttgaagtttccgacgatgacctccaattcgtcaaggagaaccgcgcctatgcctccttgctttccaccttggacacccgttcaatcaccaagcatgttacacgggttgctgatgccaaagacgatgcattggagaaacgttatgagaaacgcatgcaaaagaatgctctcaagacagaaaaagaagaaa

SEQ ID NO: 22978 - DNA, 739 bp, Glycine max
gtttctgctttgtttccattccatgtgcaccttatttcctaacactgcaccttctctctctctctcttctctcagttcctcaatgattcacgggctgattcttcttttttgtgatcggcagaaataagagcaccaaaccagtatgcactagaccaaagtgaattactgcaagctcaaacagtcaaccccactcattctccttctattagtgtgggacagaatagtaaacgaaagaagagctatggcactggatttgtcaagagtataggttttctccattcctatattagcaatggttgcagaatcatggtttcgtagtctgtggaaggctcctcggaagcatgatgccaattccgagaaggtggtcattgaagtattagcatttgaaatagcaagcttgatgtccaagctagttaatttatggcagtctttgagtgataaacagattgttagattcagggaggaaatcacaaattcggtgggcataaaaaagcttgtctcagatgatgataatttcattgaacgtttgatctgtttggagatacttgagaacatggcacacgtggccgagtctgtggctaggcttgctaagaaatgcagtgatccaattttgaaaggttctgggaatgccttttatgagtttatcactacaggcagtgatccatatgggtgggaattcactggcaagaagatggaaaaaaagattaaaaggatggaaaagtttatatcaactaatgca

SEQ ID NO: 22979 - DNA, 439 bp, Glycine max
gatcaagaagaagtaggaactgatcccaatgggacagaatttgtcatagctacaaaggattcaccagaactggatgcatccactctggtaattggaagagtaataggagggatggaggttgtccagaggatcggtctggttaaaaccgtacaagagaatacaggatctccatactttagggtggcaaagctaataggagccaagagagctgttgtagcagaaagaggattcaaccgcccttattcaaaggtcattgttacaaattgtggtttaatggagtaacccaaaattgtattcactcccttctctagttgatttccagtgtatgtgttagagaacatatatcacactcataacaatctccattgtcattcaaccctatgtaacgtctgccatttgtatttcaaatgaggaaaaaaaaatattacagctcggttcc

SEQ ID NO: 22980 - DNA, 889 bp, Glycine max
ctcaatgccagaattggacgaagtaatgtggagctcatcaataggctaccacactttcgagggtgaaggtcatgttatgttcataggggctgatgtcaatcatccagcttcccgggacatcaacagtccatcaattgctgctgtagttgccactgttaattggcctgctgcaaatcgctatgcagcacgtgtttgtgctcaaggtcatcgggttgagaaaattttgaattttgggagaatttgctatgaacttgtttcgtattacgataggctgaacaaagtcaggcctgaaaaaattgttgtctttcgtgatggcgtgagcgaaagtcaattccatatggttctcacagaggagttacaagatttgaaatcggtgtttagtgatgcaaattacttcccaaccatcactattattgtcgcacaaaagcgacatcaaactcgattttttcctgtgggtccaaaggatgggattcaaaatggcaatgtgtttccaggtacagttgtggacacaaaagtagtacatccttttgaatttgacttttacctttgtagtcactatggaagcttgggtactagtaagcccactcactatcatgtcttatgggatgagcataaatttaactctgatgatttgcagaaactgatatatgacatgtgctttacctttgcaaggtgcactaaacctgtatctttagtccctccagtgtactatgctgatctcactgcatatagaggacggttatactatgaagcaatgaatcaaatgcaatctcctggttcagctgtgtcgtcttcatcatcacagattacttctttgtcaatttcttcaacaggctcaagtttaaatgatccggggtattacaagttgcatgctgatgtggaaaatata

SEQ ID NO: 22981 - DNA, 332 bp, Glycine max
cacttataaaaccctcttttctgcttcttcgtccattggcattggctttcaatggcgaagtgcatgaccagttcttcttcttcttcctatgcactgcttctctttttcttctgctttctacaactggaggctattttggaccctgctgatttcctcgctctgcaaaacattcgtaaagctctgcaagacatgcctgcttccgatttcttctcttcctgggatttcaccgcagacccatgcaacttcgccggcgtttactgcgactccgacaaggtcatcgcgctcaacctcggcgaccccagggctggctctcccggcctcaccggccgcct

SEQ ID NO: 22982 - DNA, 521 bp, Glycine max
ctcttacgtccgctttccttcatgatcacccaggtgcccaaaatgcattcttcaacttgcattcttggtggggttttcactgataattcaattcctctttctggaaatgtatatattgatgttgtgttagtttcataaaaattggagaatcatcaaggaaacatggctcattttgaaaaagatgaggtgccaatgctgtcagaaacacatgctcgactatctgatgaagttgtggattctaatttccggaggcttgtatctaggacacgaagtgcttcaatttctattcctatggcctccttggaatcatatgagaaagaaactaatcttgtgggacatactggtccactttgtagtgtgagaaaaaccccctttgtgcagatgagtggtccactgtatgctaccaatggaactggaaatctttcacgacagaatatagttgcgacacgaaccaaagtagtggagagcaagacagaaaagttttctactttcaatggcacagatgaaaatcgttgggataa

SEQ ID NO: 22983 - DNA, 415 bp, Glycine max
ttcctacgcgtccgcccacgcgtccgctttcacacttcgttttctttatcttcttaactcgacttcactttccttcatgatcacccagctccccaaaatgcattcttcaacttgaattcttggtggggttttcactgataattcaattcctctttctggtttcataaaaattggagaatcatcaaggaaacatggctcattttgaaaaagatgaggtgccactgctgtcagaaacacatgctcgactatctgatgaagttgtggattctaatttccggaggcttgtatctaggacacgaagtgcttcaatctctattcctatggcctccttggaatcatatgagaaagaaactaatcttgtaggacatactggtccacttcgcagtgtgagaaaaaccccctttgtgcagatgag

SEQ ID NO: 22984 - DNA, 597 bp, Glycine max
ctcgagtaccttgagtggcagaaagccatttattcagttggtgtatctgagatgaagagatcgcctctgcaattgcggatatctatgtctgatgggatgtctgcaactagtaatggttcttctttgcaacaatcagatatgagtttgatcccagaaagaactcttccttcctcaccgagtcctttgtacagccctcataccaaatcccctggttttatgaaaggcagtttagggcaacctactgcaagaaagcaacttatcggtggacattctatggttgacaattctaggggtttgcttcattgggcgcaaagcattagttttgttgcagtttccatggaccatactttacaactagttctcccagcagattcatcaactcctggttacatagaaggtttcactccagttaagtctcttggttctacgtcttctgcatatattctaattccttctcctagcatgcggttccttcctccaacagttcttcaactccccacatgcctcacagcagagtcaccaccactagctcatctgcttcacagcaagggttctgctcttccgctctctactggatttgtggtttcaaaagcagta

SEQ ID NO: 22985 - DNA, 356 bp, Glycine max
agtgaagaggaaactgaagagacctgtagcacaaagccacctgtgaaaagcaagttctcaaggacttctaccttgggaagaatagaatggtgtattgaagagaaactttggagatctgaggaaaagggaaatggagttggggaattggaatctgtttcggatagtagctcaccttcaaggtatgagaatggtccattagagaataggtatagaggtatatatgacagtgaacattgggtgaaattgagaaatggagtgcgcaggctgtgcagacaccctgtatttcaattgagcaagcccactaagaagcgtgcaagtcttggtattgtaaatactagggaaggaggtggagaggc

SEQ ID NO: 22986 - DNA, 582 bp, Glycine max
gaggatgatcttgtcgactgttggtcgtggaggtgaaggagatgtcggacagaggattcgggatgaaatccttgttatccagagaaataatgattgtaaaggtggaatgatggaggaatggcaccagaaattacacaataatactagtcctgatgatgttgtaatctgtcaggcactaattgattatataaatagtgactttgatattggtgtttactggaaaacattgaatgcgaatggaataacaaaagaacgacttctgagctatgaccgtgccatccattctgaaccaaattttaggagagatcagaaggaaggtcttctgcgagatctgggaaactacatgaggaccttaaaggcagttcattccggtgcagatcttgaatctgctatttcaaattgtatgggctacaaatctgagggtcagggcttcatggtaggggtgaagataaatccagtgccgggtttgcctactggttttccagaattacttgagtttgtcatggaacacgttgaagagaagaatgttgaaccacttcttgaggggttgcttgaggctcgtcaggaactccaaccatcact

SEQ ID NO: 22987 - DNA, 1324 bp, Glycine max
ctcgagccgatctcaacgagtcgctacacaaactcgagtccttaacttgagcgctgattgacctcgcattgttgctgctataagtgggctgtatcatgaaattagtcaacgtgggggcaaggacttgttagcttctgaagtgaaagagttgttatttggaacaaaattaaatgacacaaatatcaaagaggaacagatagcagacatgttaaaagtttttgaccgaaatggtgaccaaattataaccaaggaagagtttgtcactggcttaacagaatacattaaccaatcaaagcatgctctggatagacaatacctccccaaagaatctctcaacaaaatgtatcagacttttatcaagccatggattgaacacgtgagaaaacaacgtgaattgaagggacatcttatatctgaagtcttgaagcatgctcagaatgatatggttggccggctgcgccaagatgatggcacacctgacaaaattgctatcaaaaggttgtttgaggaaattgatgttaaccaagataaccacatttcaagatctgaattggaaaaagtagtcaaggacatccagtttggcaaggctgtagaaactgaggaggcagttacaaaacttgttcaagatcttgatctcaacagagatgatgaaattagcgagaccgagtttgttgaaggctttacaaaatggatgaactcaaattccagccaagctgctaactcaaaatcttcgtctcacgaaattcgtcgaacctgggaagatgttgaaaaggtgatggaagagaatcaaaccaaaggagcatctgcatggttgacggctataggatatgtggtgttgggagttactatactggctcttcttgcagaacccttaatagcaagtgtccaaaaattctctgaagaagcaggaatttcatcatttttcatctcattcattttagtccccctggctacaaattttagagaagcaacctcagcaatcaaagaagctagccataagaagaccagtaatacttctcaaacaatgtatgagatttatggagcagtgttcatgaacaacattcttggctttgtggtgatctctatacttatatacatgcgtgagatcacttgggaattctccgctgatgtgctagtcgtggcaatagtttgtgctgtaacgggcctcactgctagttttcgacccacttttcctctttggacatctttccctgcatacctcatgtacctagtagcattgcttttggtcttcgtcctcaaagatgttctcaattatgtttagtgaccaggctggcataacaaaccatggatgtggaatatgttg

SEQ ID NO: 22988 - DNA, 471 bp, Glycine max
ctcgagccggttccaccataacctccctttccatttggataatctaccaaaatgttccacaaatattttttaaataagccttaagctcaatcaaatttcaaacaacaaattaacaagaaggagctaagaggaagaggatgatagcgggttatgtttgattgatgtgttacagtgatcatcaatatgagaatgttgcctgtttgctcagccaccccaagttattccacatcttcccagattcccttgtttgggggattgcacccaattcgaaaggatcttgagagcagatgtgtggctgaagaaggtgtgcatttggcttcacaatatggagctcattcactgagaaattcatttgcagtgcaagctacaaagacagtattgggcagtttttcttctacaagtgaatcaggataccttacaagcacgtggggttattcaccagtgctgacagatggacatcattcactgagt

SEQ ID NO: 22989 - DNA, 298 bp, Glycine max
ctcgagcgaatcggctcagggataatctaccaaaatataccacagatatttttaccgtaaaaccttaagctcaatcaaatttcaaacaacaaattaacaataagaacacgcaaacgcaaaggagctaagaggaagaggatgattgcgggttatgtttgattgatgtgttcagtgatcatcaatatgagaatgttgcctgtttgctcagccaccccacgttattccacatcttcccagattgccttgtttgggggattgcaccccattcgaaaggatcttgagagcagatgtgtggctg

SEQ ID NO: 22990 - DNA, 316 bp, Glycine max
gtgattgattcgagaaggagattattattgagagagagagagagataaagcgggggtgtgaaagagacggagaaggtctctctgaagccgtagttgagagttgagactgagatcgatcatctgtcttacttagatttcgcagcagagagagagaatgggagaagtagcgcgtggtggttgttgccctccgatggatctgttccgttcggagccgatgcaactggttcagctcatcatccccattgaatccgctcaccgcactgtctcctacctcggcgaccttggcctccttcagttcaaagatctcaatgcagat

SEQ ID NO: 22991 - DNA, 678 bp, Glycine max
cacccccaccttctcaatttcttagccttctgctttgtattacatctttgtttcaggtttcatttgattgattcttttcttcaattctggtttgtagttgtttatatctgactcatgtttctaaatccatgaacagcatatgattttcagtgtcttttccttttccgaaggaggaaaaagaagaaaagaaaaaaaagcttggtgtgagactttgagagtcaattggttggttgagttctcaatttcttgtggcagttttgttgaacccatcaatcctttctttctatgtatgtacacatgactgtaccatgattttaatttggaaatgaagtagttcggttcagttgtggagggtgaattttggtgtggatttcttcttgctctttaccttctttgctgagatggaggaacataaatctgttatctccacctgtgaacaagatcaacatgtggttgctgccgctcagcacattttgaaggcactagcagcaagtaagaatgtatctgatgacttgagaaaaacccttttggatattgagacacaattgtcttcaatttccatagtcaatgagagaaaaggaagagaaatcaagcatttagagaggcagcttaagtgtgttgaagacaaggtaatgaggtgggaggcaaacccttccaacgagtcttctgagtatttga

SEQ ID NO: 22992 - DNA, 297 bp, Glycine max
gttgaatttttattctgttcattcgccttaagacaataatggggtctgtttgctcggctgagaaaaataaaaacaaagaggttggagggaaaaccttggggaagaagcttaagaagttaaaaagcattgcaaagggaaaaggagattgttattcaaattcaaggactagtgatcgtggtagaaagcaaaaggagcgaaactctggattttccagtgaattcaacttatccaatcctagtcgaaaagaaggaaaagaggacttccagagaggctccttttggggaagagctagtgaga

SEQ ID NO: 22993 - DNA, 344 bp, Glycine max
agtgtaaacctgcttctccctcatctcattgagagtagaagacagcaagggctagttagtgatttggtcttccctctgaaccagatggagttgttatgcactgccgacgcgattctcccctcacgcagcctctctattcccacaccctattcgctacccctcaaaacctcccttccgttcccgcggcttcaacttccccaaaatcgagagattacgagggttgcagccctgtgtgagtgtgagtgaaggcagttccgctgaggctgaggtgttggaggagagccgaattcgtcgagttggcgacaagctgattggggtgttcatggtggacaagcccaccccga

SEQ ID NO: 22994 - DNA, 467 bp, Glycine max
cggatgcgtggttggacgcgtggggggagattacactagtggtagcagcggcggcaatggctctgctgggggaggacggtcgcggctacgaactggctcggaagcttgacacgtgcggcgtgtggcgaacctggctcggcgacgccacctacgccaacttcgcacccttcctctcttccccttccgcctgggactccttcatcacctccaccactcacatccctctccaactcagagtccgcgccctcctcttcgataaagccaccgtttccctctccctaaaccctaaccctaaccctaaccctatctcctatctccaacgtctcaaccctatttacctccaattacacgccgacgacgtctacttcaccctcgacgccgactccaagaatcagtcaaagccttcttcctcgactggatccaggtacgttgaatctcaacttcccgaaacgtggtttaatcaagta

SEQ ID NO: 22995 - DNA, 363 bp, Glycine max
gattaaggcgcgggaccaaaagactttagagggagagtacactactccgttcggcggaggaagcagcggcggcaatggctatgctgggggaggacggtcgcggctacgaactggcacggaagcttgacacgtgcggcgtgtggcgaacctggctcggcgacgccacctacgccaacttcgcacccttcctctcttccccttccgcctgggactccttcatcacctccaccactcacatccctctccaactcagagtccgcgccctcctcttcgacaaagccaccgcttccctctccccaaaccctaatccctctctctctatccaacgcctcaaccctagttacctccaactgcacgccgacg

SEQ ID NO: 22996 - DNA, 390 bp, Glycine max
aaatgctaagaacaaagatgcgccgcgagtacagatagatagacacctatcaatattcaatctatcaaaacgctctttgttccgaaggcaaacacagatctatatgaaagagcaaaaccagtacactctctattttttctttcactaaattggattcctagaatctcagtggagccaattaaggctctgcgatatgcaccatacgttattcggtgttgttgtgcttttgggcggcgagattgagtgggagaaggagagataattcctcactcaaatttacatatcatcattgtaatttattgttttccattctgctccccttttgattgcattgcctaaatatccagcaacacgtatcagggtgatggcagcgacggcggtgacggagac

SEQ ID NO: 22997 - DNA, 643 bp, Glycine max
caaattatagcctgagtctttgtgtgtacaagttccaccaaagccaccccaaattcttcctcatcaaatcaacacatagcaaactaacgatccaaactctttcatttgcaacatcaaaatgagtgaagatggcattgactacggcggaattgtgacggcggttatagcagctgctgcggtggtcaccatagtcagatgtttatttgctgccatggttgccatagccagatgtttatatgccgcaatgatcgccatagccagaagtttatatggcaacactaagcgacaacaagagtcattcgatgagcacgaagaaactgaggatgacgaagaatctgaggaggcagacaatgggaaatggaagaaacctgagagtggttgggtgaagctgaatgtggatggttcacgtattcatgaagaacccgcctctgcgggttgtggtggggttataagggacgaatggggaacatggtgcgtgggctttgatcagaaattggaccccaacatttgtcgacaagcccattatacagagttacaagctattctaacgggcctgaaggtggctacggaggacatgatcaatgtggaaaaactggttgtggagtcagacagtgagcccgcggtgaacatggtgaagagtagg

SEQ ID NO: 22998 - DNA, 502 bp, Glycine max
cccacgcgtccgaaaacccttggggcagtttttctctcctctcttaaacctaaaacccgactccgtctccgtcgtccctctcactcagccaccaccgtctcgctcaattccgagttggctattaaacaaaggttgggttgtgaaaaatgagtttgatatcccaaaacgctagcactaaaaatgtggtcaataagagcaagagggaggttgaagatgatgttgagaatagtgatactctgaaagtgaagaagaagaagaaatatgacgagggggaacaattggcaatggaacaagtgaaagagatgaagaagcttgagaactttttgtttggttctttatattccccacttgagtttggaaaggaggaggatgaagttgaacctccgaaggctgctgaaaaggtttctgatttgttcttcactgaccgttctgcggatagcgttctcacggtttaccgggaagaagatgctgacttgtctgagggaagtcatgatgatgatga

SEQ ID NO: 22999 - DNA, 599 bp, Glycine max
cccccccacaaagaaaattttccatttaccattcttatgcaatcccaccctccaatcccacatttgtgcatttgttccattccaatttctaacttcccatgtacaatatccacctagcatagctataacatacacatcatttatcacccaacaacatcattcacatatctatacacaagatcgagagcgagagagagaagcaaaaaaaacaacaaccttaatttgaattttcctatatcctataatatttttctctccgaccaggccttttttgaggatggaatattcaaaggaaattcttagcaatggcaatgcaaatggttcattgaatctttgcaatggtagcacggacccacttaactggggcatggctgcggaagctttgaaaggtagccaccttgatgaggtgaagcgaatggtggaggactaccgtaaccccgtggtgaagttgggtggcaagagcctcaccgtgtctcaggtggcggcggttgccacccggcaccacggcggagttacggtggagctggccaaggagacccgccacggtgtcaaggccagcagtgactgggtcatggatagcatggttaagggcactgata

SEQ ID NO: 23000 - DNA, 291 bp, Glycine max
aaccctcccaacaccaacaagctcttcttctgcgacatcgagttcaaggagtcccagctctccttctcccagttcggcgtcaacgccctcccccacatccgcctcattgggcccaacatgggcctcaaggactccgagtccatggaccagggcgacttctcccgcctcgccgactccatggccgagttcgtcgagtccaagactaacctctccgtgggccccatccaccgcccccccctcttctcccgcaaccagctcgtcctcttaaccgtcttcatcctcctctggatc

SEQ ID NO: 23001 - DNA, 473 bp, Glycine max
cttttaattggtataggcgatgtaccgtctgctaaactttctctgaggtgcaaccacaaatgcataaataccctgacactattttcgcagatccagcaaatgatcccattgtccctgtgactgtggctccaaaacattatttattcaattctaaacatccagatatgaaacatatgcatggtgaaaattggaacaacactgtacttgtagatggtaatgctggtgccaagttccaagtaggaatagcaacgttcccaaatgttggcatgaatttagcgatgcaaaaaattgaagaggaaattcctttcccccctggaactgagttaacagaaatattggacattgagctcccacctgaagatattgggaacgcattgcagcttttagagttttgcagagtgtttggaaaggctcttgatctcaagaagggagaagctgatgccattttacgagaattagtacgtaaacaaaat

SEQ ID NO: 23002 - DNA, 287 bp, Glycine max
tcgggaaggacaagaatagaacccgtccaaggctccgggaagggaagagagaattttgaatattgaatcgaaccgcagcaaataagcttcaccgtaacttcgtggaatcaaagctattaagttcccaacaccacaatttaaaaagcaaggccttcgcagttgttttcaccacaacaaattcgtcgccaattccaaagagatacaccatgaggctattgaaggttgccacatctaatctgaaccaatgggcgatggacttcgattgcaacgccaagcaaatcaaagag

SEQ ID NO: 23003 - DNA, 619 bp, Glycine max
gttgaagccaagaaacattgaaagtaactggaggatgaagcctgagagatggagacaccccttgttaaggcctctttgacatgtacagattttggctttgaagttaacaagagactgaacaaaaataatacagaattatgcggctatttttccctctatgaaatcctcatcttgctacctaataagtctgatcaacaaacgacaggttcatataggcagccatagcaacaacaaataagccattttataatgaaacggttctttccttttttcttgtccatgtttttgaggtgtcgcaattgcagagtcgaatttttggttggtgtccagtgacaatcaccaagtactggatacctacccattatgtctgatatttattccttgcctcttatatttgttgggtctgggaatttttggtactatatgttaatgttcctatctttcaatatatattcttatgatttatattcttatgattaattttgtgtgaactattatagtcttttgaatttctgattatttataactgtaagactgtaactagataatgattgtttttgaattttgattcagcacgcaataagaaaaaagaaacaacttttgaaattgcaaaaaaaaa

SEQ ID NO: 23004 - DNA, 795 bp, Glycine max
gttttattaaatgctttgtaggttcagaagaaggtacaccagattcagtgaatccatccgttgtagatgatgatgaagaagaaggacttccatcacctcccttggatgaaggggctttctttgtcactcaggctggttcaatggagctgtcacagttctttgatggcatggacgacgatggaaatcctcgaccaactggaccattcagcaagaaccatgagaatggcagaaagccagcttttgacagccatgttttagagatgaggaagttgcagccttcccatgacacagtcgtcattaacagagatgttaagagtcagcaacaagcaaaggaaaacaaggctgctgtcatgcctgtgaggccaaataaacctgtaacagctgattccgggcctggcagacccccaaaatcaaatgtgcagcgaaaaagtaatatggagccagagatgccgcaaacaaatggagaacaattcaatcactaggaggcctccatctgctcagttagataaatccaagcgttcagatgacgatgcagtccaagtaaagctagaagccaccaagagaaaacttcaggagagctatcaacaagctgaaaaagccaagaggcagagaacaatacaagttatggaaataaacgatcttcccaagcaaggtttgcaccgaaatacacatttcaaacctggatatcacagtaggcattgggctaatggtcgaagataaagctattattctatggtggaccttcagatttaacagtatttccaagctgtttgttccaatgggttgaagattggt

SEQ ID NO: 23005 - DNA, 542 bp, Glycine max
agacagtgaaggaaaaattgatgaaagacaatgcaagtgcaaagttggttgcttcctcatattctcctccatgtgggcttattcattttggaattagatctgctgttttaaatcctgagttgcctcagaattctcgcctccatattcttgaggaattcaatgcgggcctgtttgattatctaattgcaacagatcttagccagtcaaaggaaaaggatgaagtgcctaaggaaagtaatgttggatcatggaagtctaggcaacatgctaagataaaattagattctgaatttggagttgtaaggggaattgactttaaaaatgtatacacggttataaactttgaaatgcctcagagtgttgcaggatatgtacatcgaattggacgtacaggaagagcatacaattctggtgcttctgtctctctggtttccacggatgaaatggatactttagaagaaataagatcttttgttggggatgatgaaaacaaaggcacaaattccattgctgagtttcccctcctcaccaagaatgcagtt

SEQ ID NO: 23006 - DNA, 699 bp, Glycine max
tatactcttatcttcttttgggcagagaggcttcactcttgagtagccatggcctccttaagctgccagtttcattccaccagcttgttgaattctaagaatgtcaacagaaggaggaaacgtttcattttttgctcagcacagcctacacaaaacaatattaaggttgtgattaatggagcaaccaaggaaataggaagggcagcagtagtggcagtgactaaggccagaggaatggaggttgcaggagcggtggatacttgtcatgttggggaagatattggaaagattgttttcaattcttctagatatgtggcatggaagagccccttgaaatacccataataaatgaccttactatgattttgggctctatatctcagtccaaggcagcaggagttgtagttgatttcactgacccttcctctgtatatgacaacgtaaaacagggcgtcttggttgcaccaaccctttccataggatcaatattattgcaacaagctgcgatttcagcttcttttcattacagcaacgtcgaaatcgtggaatctagggctaatgcaaatgatcttccatcagcagatgcaaaccaaattgccaacaatctctccaacctgggccaaatctataacagagaagacccttcaacagatgtcttggcaaggggtcaagtcctaggagatggaattcgtgtacaca

SEQ ID NO: 23007 - DNA, 317 bp, Glycine max
ctgagtcacacgctctgatcttcatgaatctaggaacctgcgccgcgggtgcaccgtaccgttgggtgcaccttctccctcacgaaggaaagagaagatgtgcgagtgtgagagtgagagcgaatgcgagtgttggaggaggaaaaggagatggcgaaacggcgtcgtatttggacatgtggaagaaggcggtggagagagagaggaagagcgcgagcttcaactcaatagcggaccgcgtggcggcaaatactgatgacaacaacgacgacgatctggagaagaagaccagtgagttccagaagctcctccaagtc

SEQ ID NO: 23008 - DNA, 679 bp, Glycine max
acagctcgagcgctcgagaatataggagagagacagcaaaaggagcaaaaatgtatagtgctgctacagctgctacagttgatgttcagctgactggaaaagagggagaagaaaaggtcaagttgcacacgcactcttactgttgtctagattatgcacagatatatgatgtggttaggtacagaatacatcgcatgaagaagctgctgaaagatgaattggacaacaagaacacaattgaggaatatatctgtagaaaatgtggaaaaagatataatgctctggatgcattgcgattagtatcttttgaagatgatgacttccattgtgaaagttgtaatggaaaacttgaggtagaaagtgacaaatttgttgctcaagaagggggtgatggagatgaaaatgcaagaagatggcggcatgaaaagttaaaagacatgcttcagaagatggaggcacagctgaagcctttgatggaccaactcagccgggtgaaagatttgcctgttccagaatttggcagtcttctagcgtgggaagctcgagctagtgctatggggcgtgcagccaacggagatatgtctggtgattctaaaatgtctcagcttggatataatggagcaccaatgccttatagtggagatactaaggttgtggtggacttcaatgggactgaaga

SEQ ID NO: 23009 - DNA, 369 bp, Glycine max
ttctgattctcctacatcctcacaaagatgcaaaccgagcactcttctctcgtttctcagctgctcccttattgtgatttattatgttaagtcccaaataatgtcttctaagagagcctcatcagttacagttagttgtcttttgaagttgtgcaaaggatgttgctcacacaaaggccttagtacattgagtgctgttagtactgctgctgaaaggacagatttacagttttctggtggttatcaaaatgatgattcttcaggttaccagcaaaatcgtgttgggttttatcaggaaagccaaaataaggttgattctaatgagcttttgaataagcaaagacctgattatgtttcccaagcaaatgc

SEQ ID NO: 23010 - DNA, 464 bp, Glycine max
gtccctcaatttttcttgtccttgatgctcctccttagtcctcctcagcctcaacttcaacctttcttcacttcccttcacatggcagtggctcttgtgaaaccaatttccaatgtcactcccaaatttgtcagcagccccagaatgggatcacactccaaattcagcaccataataagaatgtctgccactgccaccccaccaccatccacctccacaaagccagcaagcagcaagaagggcaatatcaaggagaccctcttgactccaaggttctacaccactgactttgatgagatggagaccctcttcaacactgagatcaacaagaacctcaaccaggatgagtttgaggcactgctccaggagttcaagactgactacaaccagacacactttgtgaggaacaaggagttcaaggaagctgctgacaaacttgaggggccactcaggcagatctttgt

SEQ ID NO: 23011 - DNA, 280 bp, Glycine max
tagcttctgaagcgtgagggcgatggaggaaagaaagccactcaaactctacttcattcatttcctagcagcgggtcacatgatccctctctgcgacatggccacactcttctccactcgcggccaccacgtcaccatcatcaccaccccctccaacgcccaaatcctccgcaaatccctcccctcccaccctctcctccgcctccacaccgttcagttcccctcccatgaggtgggtcttcccgacggcatcgaaaacatctccgccgtctccgacttg

SEQ ID NO: 23012 - DNA, 600 bp, Glycine max
acaaaacgtacatccaagccaaccgagtttgccttttctacggtctcgtccttcttcttaaactacgagttgcattcaacaacctcttccacgaatttcttttctctcgacgagggtaaactcgtaatgttcgtttcgattttttccaaaagcgcctgcgtttcttcccgagcgaaatcttcttttcttccacgaaccttggattcatttcagtagcatctttcagggtttatattccattgaattttacaactttttattttggtaattccattattgagaagccgaggcattggggtaaaggggagaactggttttcaactgtgaactgattgaattaccttgtacggcagtttcaagaatggtctgtccgggttcaacgaaattgtctcatgacgttaggttctacagtaatactggattctgtagtttccatcataaccggatgggggtcggtcgattacatttggtcaccttaaatctttcaccatgtagtttgaagcaagactcttcagcactccatcttttaagtagaccacatgccccaataaggcatgtgccttccagatgtaatgttttcatttgtcagtctgtcctaat

SEQ ID NO: 23013 - DNA, 374 bp, Glycine max
ctaggcttcagaccgtgaaccgcaaactcactgcaatgaccaagttgttgatggaggagaatgatcggttgcagcagcaggtgtcacagcttgtttgtgagaatggttttatgaggcagcaattgcatactccatcggcaacaactactgatgctagttgtgattcggtggttaccactcctcagcataccctgagagatgctagtaaccctgctggactcctatcaattgcagaggaaactttgacagagttcctttcaaaggctacaggaactgctgtagattgcgtccagatgcctgggatgaagcctggtccggattcggttgggatctttgccaggtcacaaagttgcagtggagtggcagctcgagcc

SEQ ID NO: 23014 - DNA, 276 bp, Glycine max
atgcaacagaggagtatgcagggatttcctggtattgactgtgagcctaatctatcgaatcagcacaatgtactgggatgacaagtatggaacccaaagtgtgtccaatgaggtagttagtgaaatgagagaattctcagcaaggacaatcagaatttgacctcaaattctttcttattagatgatgatctgagtctggtgtagcggaactggagaaatggatagtcaatgcaacagaggagtatgcagggacatcctggcatgactgaattatat

SEQ ID NO: 23015 - DNA, 383 bp, Glycine max
aaacacatttggtcacagcatactccactctctctacctcagagacttattaagatgaagcccaagacttgcgagctttgtcatcaactagcttctctctattgtccctccgattccgcatttctctgcttccactgcgacgccgccgtccacgccgccaacttcctcgtagctcgccacctccgccgcctcctctgctccaaatgcaaccgtttcgccgcaattcacatctccggtgctatatcccgccacctctcctccacctgcacctcttgctccctggagattccttccgccgactccgattctctcccttcctcttctacctgcgtctccagttccgagtcttgctctacgaatcagattacggccgagaagaagag

SEQ ID NO: 23016 - DNA, 270 bp, Glycine max
gtcaagggaagaataacgcaatacaacacaacgcactcactctacctctgatcccagacagaagagggtggagtttttgtcatactccctcaatttttagcaagtcaaaacatcagaagaatcattttctttttttaatttttgaaattaacgttcaggcgaagatgaagggtaagacttgcgagctttgtgatcaacaagcttctctctattgtccctccgattccgcatttctctgctccgactgcgacgccgccgtgcacgccgcca

SEQ ID NO: 23017 - DNA, 418 bp, Glycine max
cccacgcgtccgatggatgatgaattaggaaatttaattatgatcttattttcttctatcacttttgagctaacattagttagggatattatacattcgggcacgatgacaccctgtgtgttagatctcatttttaaacttcatataattctttttcgggcgatctaagatgttataaccatggaattattggtcaaattttagtttctatataggtatattggaaaaaaactatgatcgtcaatttctgctcccgcatgtatctcctatttttacatgtgtaatgattagtgtacactgcattctagagacataataagtgaaaggagatgaaaggacaaagattaaaaacatgaaaataagttaatataagaaagagatatttaggatttttttacaataatgaacaatgacaaac

SEQ ID NO: 23018 - DNA, 299 bp, Glycine max
cggctcgagagagaaatcaccacattttgtactaaacctgcttattagtttcttaactagccttgtttttgtgttattttgcatggcttccaagcaagaaccaaagctctctttgacccttctagtggacaaagaaagaaactgtgtggttgtggctgaagcaagtggagacttgatagacatattgttcagttttctcacccttccactcggaactatcataaggcttgtgtcgaaaaagcaagggcacgacgaagcagacgaaattggttgcataaacaatttgtaccaaagcttgg

SEQ ID NO: 23019 - DNA, 339 bp, Glycine max
cgagctagtatctaaggtatcaacaatatggtatttctcatttttattattgtcaatctgaacaaattattatacacagtattgtttagccctgtacttttgtgctctgatcaaataagtgaagaacttggtgtagtataatcgtgcattccttgttttaaagagttgagagcttcttcttatgtactaaggttactgactgaaggtcttctcaattaataaactgttcagagcgaattgtaaatcttgccagacaaatctctacttcgtttctgaagtgtttagttttgataaagttcaataggaggaagatctattaatgttcaaaaatattgttga

SEQ ID NO: 23020 - DNA, 297 bp, Glycine max
tctcttgctatgctatgggccactagtccccattggctttgtccgtttctttttcttggctcttttgcctttccccttctccttttccattcacacaccacactcttccaaacccactgtttcagtttctgctaacacccctctctcagtgcccccatttcttcaagctcaatgtgttagggtttccctccttttctcagagcttgcatttcccagctacacaagatagaagcctctctgggtgcttcattacgctccaggatcatggcatagctccattttgcgttgagtttaaca

SEQ ID NO: 23021 - DNA, 425 bp, Glycine max
gacacaatgataatctattcatacaattcttgattaatataataaaagaatgcttttctctttttgcatgactaatctcaaatttgcaaatgtattaactttgcttgttcctgtcagatttgtgaatgttcactgctatttgctcgactagaagtgcttaacatttctggaaaccgtcttactgatgcatgtggatcttatctttcaacaatcttaaaaaactgtacagctctttgtagcttgaatatagagaactgttgtgtcacatctagaactattcaaaaagttgggatgcattggactcaagatctgtacttgcccatctatgtataggatacaacagcccggtatctggaaatgctataattaatcttctgtccagactttctaccctgaaaaggttttctgagttgaatatgagtggt

SEQ ID NO: 23022 - DNA, 649 bp, Glycine max
agtggcatgtgccattactacatcatagtcatttcctattttctctttcagagatctgagctccaacatgttaacaggttcaatcccagattcatttcaggatttgggaaatctaaattacttgtttctgactaacaattctctaagtggaccaattcctgattggatactgagcataaaacagcaaattgatttatctttgaacaatttcacaaagacttctgcaaataattgccaaaggccggatctgaacttagcttcaagcctctctcgcacagcaagcacttcaatatcttgtttgaagatgggccaaccttgttcaggaaaaccccagtttcattcactgttcataaactgtggaggacctgaaacaaagtttgagggcaatgaatatgaagctgacctcagtccacttggcatttcaaactatgttcctggtaatagtggcaaatgggcttatagcagcactggagtatatctaggaaatgcaaaagctgattatatagcaacaaatcagctatctttggatattaatggccctgattactaccacacagcccgcatagctcctctgtatcttaattactatggcctttgtatgctgaacggcaattataaagtgaaacttcattttgctgagatagcattc

SEQ ID NO: 23023 - DNA, 459 bp, Glycine max
agtgctcgatctcgagccgaatcggctcgagcggctcgagcggctcgagctcgagtcttgccttttcagctttcattgcccaaccttgtagtgtggccttgctgttttctcaatgagaaaggcttttactctgcaacgcgcacttttgcgcttctctgttgcgttgttgctggttgccagcttcacttgtgctacttctgttatggcaataactgaagtttcagggaatgaagtgaatacagatgggaagcttgtaaatgaagaactagcaaaaacaagccaacaaggatatgacaaagaagcaaaatttaaaggatttttttcaaaacctattccaaaaccaatttctgttgttaagcctattcctattccactatataagtctataccaaaatcaattcccatagtgagacctatcccaaagtcaattcctaatgaagaagaaaaatttaaaggact

SEQ ID NO: 23024 - DNA, 823 bp, Glycine max
cgcaccgtagcagaaaaaggaggtgatgagagagtgcgggctgtgggagacatgctgagattactcgcggagaggctgaggatccggttcgagttcaaaatcgtcgcgactcagaaaatcgccgagttgactcgtgagtcgctgggatgcgatgcggacgatgttctcatggtgaacttcgcgttcaagctgaacaagattccggacgagagcgtctccccggaaaaccctcgggacgagcttcttcggcgcgtgaagagactcgcgccgcgcgtggtgacggttgtggagcaggagataaacgggaacacggcgccgtttttggcgcgcgtggcggaaacgctgtcgtattacggcgcgttgttggagtccattgaggccaccacggtggggaaagataacagcattaacaactcagaccgagtcagactcgaggagggactgagtcgaaaattgcataactcggtggcgtgcgaaggaagagatcgcgtggaacggtgtgaagtgtttggaaaatggcgcgcgcgtatgagcatggcggggttcgagttaaaaccactgagtcaaagcatggccgagtcaataaaatcgcgactcaccacggccaacaaccgagtcaactcgggactgactgtaaaagaagagaacggagggatttgctttggttggatgggaagaacactcacggtcgcatctgcttggcgttaactcggctcgctttttttccttttttttttttaatttggttcggaatattattatatatcacattgttactatattttaacgtcatctagagataatggaaaggccatagatttgg

SEQ ID NO: 23025 - DNA, 383 bp, Glycine max
aaaaacaaacaatcagaaaaaatctcgtgtacatgtataaattgagaactcccatatgggaagcaacacaacctagagtttgttgttgtcttgttgagaagtgcaatacaaggatggcaggcactctctttcgtttattcgtgattcttctagggctttctcatcttgtgtgcttgaaagcagtcccagttacaagaactgaaaaccttatgcaaggtcaagttcaccttactctggtagaacaaccacaaggttatgcacggagagcaaactgtgcactggtgatggtaccaaccattcaccggagaggactggaatgtggaactccacgactattccccatcagggcctaatggtcgtcacactccaagagcaccatagtg

SEQ ID NO: 23026 - DNA, 500 bp, Glycine max
ttttcacgcgtccgcccacgcgtccggtcgtgccggtgtcggtttccggtgatttggagattgaaatcaccggaattcagcacgattcgaggattgttagctctggtgatttgtttgtgtgttgtgtggggagaaaaaccgatgggcatttgtttctgtctgaggctgataagagaggtgccgttgcggttgtggctagtaaagagattgatattgaggacactttggggtgcaaggctttggttattgtggaagatactaatgctgttcttcctgctttggctgcctcgttttttaaacaaccttccaccaaaatggctgtgatcgcgataactgggacttatggcaaaacgaccaccacctgtttgattaaaagtttgtatgaggcgatggggctgcgcaccggtatgttgaactcggttgcttcatatgtacatggggataataagatggacctgggtaacatggtgccggattctgttttggttcagaatttgatg

SEQ ID NO: 23027 - DNA, 468 bp, Glycine max
cgggcggcaacaatgtgattgatacctcgggccgtaatctaaaccttggttctgcttcttctcgggcttctgcttctgttatgcctgctgccatcagcaccaatccagccagttctcagcaacaaatgcagcgaaatcagcagcagcagcaaattcttcagcatcagaagcagaatccatttgcagctgcagctgccgccgccgcggcggcccgcaacaagaccccatcaaccagcaatggcagtgtttactctgataacctcccctctacatcttcaatggctaataagtttcccagtgccgtatccgcatttcctcaaagccttgtacagagcagtaacaccgttgctcagtcacctcagtggaagaactctgtaagggcaacgaccacttcacagtcgcccccatccatggcttcaacaacacgccctcatcagtcaaaaacttccacagcagcaggtcgttccc

SEQ ID NO: 23028 - DNA, 281 bp, Glycine max
cttttcttctcctctttctttctttctctttagctttcattttccctctagcccttttctcgatggacacggacggtgtcgtttcgttcaaccatgtctcgccggaggattcccacgaggttcatgtcttggccgtcgacgacagctcgttgatcgaaaggtcattgagcgcttgctcaaaatctcagcttgtaaagttacggctgtggatagtggaatcagagcactgcaatttctggggctggatgagcagagaaggacctctgaatctgatggttttg

SEQ ID NO: 23029 - DNA, 748 bp, Glycine max
gatcgatcatgggttggtgggaccctgatgtaatttacatatttctaatcatattttgttaatgttcttgattgtaggataacattggagttacgttgattgtcggaatgtatggtatacttccatacagaccttggtgatcccttctttggttgttactgtgatatgtagatagtagattaaatttgtgtatttgtgtgtattctttgtgatctccttctttggttgtctatttgtgttttctttgtaatctcagccttgagtctcaaaacgtctattttggtattccaatgtttatcttccttttcttgacactgtaaaaccaaaagtggccgagatgtcgtcagccccagaggaaagttgacatgagttgacgatgaatcatacccaaattgtagattgattaaacttcggcaaaatagagatacgcagaagagacaacaaattgagtaaaaaataactcatctaattactaaggcaggaagttttacaactgatcttgttcaagtggcaaggttgaaggttatacagaagatcgttgaaaagttccaaggtttgaaggaaattatggaaaagtgccaaagaaaattacatgtcgaagaggacgcctaattagttagcagattccaatgtcttctgtacaggattttttcttattattctatctgtagttgcaccgttttctagttggtcctggttaatgtatatattaccccttttagagctattttgttattgttttattatt

SEQ ID NO: 23030 - DNA, 365 bp, Glycine max
gtttaaggaggcattggttagtttcaagagggcttgtgagttgcagcctgtggatcgtgaggcctcattttagaacagggaactgtttgtatgttcttggcaggtacaaggaggccaaggaggagttcctcttggctcttgagtctgctgaggctggagggaaccaatgggcttacttgctaccccagatttatgtcaacctcggcatcgcactcgagggtgaagggctggttttgagtgcctgtgagtattatagggaggctgcgattctttgtcccacacattttagagctttgaagctcttaggtagtgctctttttggtgttggggagtatagggccgcggtgaaggcattggaggaggca

SEQ ID NO: 23031 - DNA, 462 bp, Glycine max
ctcgactcgagcgaatttacccagtcagcgctcgagcccgagccgcgggaatccttcaagccgtgatatcttccatgctgcccccaatgttggtcattctcaggactttgtaaggaaagatatcaaggagtggttgaactggctgcgcaatgatataggttttgatggatggcgtcttgactttgttagaggtttctctggtacatatgtaaaagagtatattgaagcatcaactcctgtatttgccattggagaatattgggacagcttgggctatgaacatggaagtttgtgttacaaccaagatgctcatcggcaacggataattaattggatcaatgcaactggtggtacttcatctgcatttgatatgacgacaaaggggatacttcattctgctctgcataatgaatattggagactgatagatctcaagggaaccaacaggagtgatgggatggt

SEQ ID NO: 23032 - DNA, 369 bp, Glycine max
ctgtacctgtgcttgtgggacctgtttcttacttgttgctgtcaccaccagctaagggtgttgagaagtcattttcccttctttccctaattgacaagatccttcctgtctacagggaggttgttgctgaattgaaggcagctggtgctacttggatccagtttgatgaacctacccttgtgaaggatctcaacacccaccagttacaagcatttacacatgcctatgcagagctagagtcaagtttatctggttttaatgttctgattgagacatactttgctgatgtccctgctgaagcatacaaaacactcacctctttgaaggctgttactgcatatgggtttgatattgttcgtggaacaaaga

SEQ ID NO: 23033 - DNA, 326 bp, Glycine max
gatttaatggataaagcttatgagcggtttgtgatcagaaaggaaggaagtgcaaaacagaggaagcgaattaaaaaatcctatgatgcaaaggcccaacttttggagggtggtgaggatgatgatattgttcaatccaagtatgattcagatgaagatcagggtgatcaagaagcaaatccattgatggtgccacttaatgatgaggcagagctcacccaggaggagatcatgaataagtggtttagtcaggatgtctttgctgaagctgcagaggaaggagactttaagaaggatgagagtaaagatgaaatttatatagatga

SEQ ID NO: 23034 - DNA, 321 bp, Glycine max
ccgggagaaacgatcacatacggttagttgatctagaatgataagcggcaccctctgcgctgcgcaaagttttatccaatttctctatagattcgttcattccctttagtattaccctgtgcttctctccaacctctcatcatctatctatttgctccaaacatggatgctaaatctcggatctcgcccacacgtctgacagataagaagtgtgtgccatgcaatctgaaggaattgcgaccaatgagtgaggatgcagcacacactctaatgccacaggttgctgagtggaatttggtaaacgaagatggtgtcatgaag

SEQ ID NO: 23035 - DNA, 398 bp, Glycine max
caaaacgcacagttttagtcttcaccatttttcgctgggctaaaatcctaaaaccctaaacccatatatcgccgaaagaacagagtagcactatcagagcaccctgccatggagaacactagcaacgacgctggcgtcgaagccctacggctgctgaaagcgacggaaccgccttcatttctcactccgaacccagcgctgtcggaagctgctcgtaccgcatcgcaatacttgttctcttccctaaaaccgttttccccaaaatcgccactggaccaactccttgtggacggtttcgacgcagaacagatatggcaacaaatcgacctccaaacgcagcctctattatccacccttcgccgccgcgtgaagcagctggtcgaaaatcccgaagagat

SEQ ID NO: 23036 - DNA, 487 bp, Glycine max
gggaagatgagaagtgtgagcctgagaccagagcttcacattccaatttgttcttcaaaccctccatcatgtgtcaaacccatcaaattagtggtagcatcatcgtatgggaaaaatttgaaaaatccaccttccaaatttgcaatcactcttagagagcacagaacaactttggagcatgcggcgaggttgccattactgaaacatgattccggtattgtggtaatgggagcggtgtgtgtggtggggatattggcggtggttctgagcgaggaaaaggccttggctttgggcccagaaggcccacttgtggaagagttttgggacaacgtgaggagatatggactctacgctctcaccgtcagcacaggtgccctttacaccatcttccgccctatagcagaacttctcaagaatcccatttccgcaattctcatccttgctcttttcgggggttcaatcttcattgtttctcaagtcctctctg

SEQ ID NO: 23037 - DNA, 384 bp, Glycine max
ctcttggtaacattgctattggtaatcttccaaaatacttgccatttatcttggatcagattgataatcagcagaagaaacaatatctcttgcttcattctttgaaagaggtaattgtcagacaatctgtggataaagcagagtttcaagagtccagtgtggagaaaatacttaatttactcttcgaccactgtgaaagtgaggaagagggagtgcgcaatgtagtggcggagtgtttgggcaaaattgctcttattgagcctgtaaaactcatccctgcactcaaggtaagaacaaccagcccagctgcatttactcgagctactgttgtcattgctgtgaagtactctatagttgagcgtcaagagaagatagatgagatta

SEQ ID NO: 23038 - DNA, 358 bp, Glycine max
attctctctcatcacctttcctcactcgtacgtcgtcgtttccccgatcccggcgaatcgaactccaacggttctagaaatcggcgaagaccaactgcgactagcgccaatgcggagttcgaattccgaatcctaagacggaaactggaatcgctggttccgcgatcctccgtctccggcgccggtgatgactccgcaggtcgcgttgtagctcgcgactgatctcgccgaagcagaggttcgccgtctccagcttccggccggaattgcgtccctgaattgttccgtttttttatttgttgttttcgagagttgaaattcgtggtgcggcgaaacgatgtcgtccaaggtggtgtac

SEQ ID NO: 23039 - DNA, 190 bp, Glycine max
atcgaaagcagaagcagaagcaggaacctgagttgacgcgaatggagggagaatcgatggaagacgcttggtgcagagaaacagtgccaaaggtattgacacttgtctgttccacattacctctgtctctgtctcacacaaacctcgtttctctccttctggtctctccctcccttcatcgcacccttct

SEQ ID NO: 23040 - DNA, 995 bp, Glycine max
  unsure (1)..(995): unsure at all n locations
gtttatctgatttcaatttggctctggacttgggtttcttgaccaaagctagaaaatacacatttttcaagccaaagtttatcttctatgctacatacttgtctgagaaaattgggtactggagatacataaccatatacagacatctcaaggccaaccccgagtttcaatgttatcccatttttaagtactttgagaactggtgccaggatgagaacagacatggagatttcttctctgccctgatgaaggcacagccacaatttctaaatgactggaaggcaaagttgtggtctcgattcttctgtctatcggtttatgtcacaatgtatctcaatgattgccaacgtacagctttctatgaaggcattggacttaacacaaaagaatttgacatgcatgtcatcatcgagacaaaccgcacaactgctaggattttcccagctgttcttgatgttgaaaacccagagttcaagcggaagttggaccggatggtggagataaacgagaagattattgctgttggggagagtgatgacatagcggtggtgaagaacttgaagaggatcccactggttgctgcattggtgtctgaactcttggcaacatatctaatgcctccaattgagtcagggtctgtagatttggcagagtttgaaccacaacttgtgtactgaagttgtgtataaattgattaaattccttatgtccttttgatctccatcaaaatgttcatcttgagtgttactagtattggtgctaaagtaaaatatggttgtacaagacagtgaggaaacatttaccatgatgaggtcctttttagtattaatcatctttttctcccatccttccttttgtatttccttttttgtttttttagaacatcattaggagtcttacccttatgagttacctatcaggaaatgattctttcctcactcttatgatcccattggaaggtctaagcagcaaacactgatcctattgcttntagc

SEQ ID NO: 23041 - DNA, 1121 bp, Glycine max
tcgcagtctctcttttgcctttagaaacaggtattcgacttcttgttttttttgttggaaacataattgttataaattctcccttctgacttgtgcagggagtttcctataaaaaatgggaaggctttaagctttatatacggtagcaaacagttgaaaacaaaggggggtctggcggctagaactgccacaagcaacgtgttctgtagtgctggttacaagtgtgcaatgagggcactccaatcccaatgctgcagcccggatgaagtgatatttggtcctgattttttccaatcactgtactgccatctgctgtgtggtctgattttccgggaggaagttgagtttgtatcttccacatttgcacatagcattgtccatgcttttagaacctctgaacatgtgtgggaagagctgtgcaatgatatcagagaaggggttctcaccagaaatgtcaccgttccttccattcgaatggccatgtctaaactgctcaaaccaaaccctgaattagcaaacgcgatccacaaaaaatgcacgggattgagcaactggtacgggttgataccggagctttttcccaatgcaaagtatatttatggcatcatgaccgggtcgatggaaccttatttgaaaaaaatgagacattatgccggggagctgcctttgttgactgctgactatggatcctctgagggatggatagcagcaaatgtgaacccacaacttcctcccgagtatgccacttatgccgtgcttcctcacattggttactttgaattcattcctctcttagagcttgagaacaccaagcctctgggcctgactcaagtcaaggttggtcaagagtatgaaattgttatgacaaatccagcaggtttataccgttatagattgggggatgtggtgaaggttatgggattccacaattcaactccagaactcaagtttattcgaaggagcagtcttctgctcaacattaacatcgacaagaacactgagaaggatttacaattagccgtggaagctgcagggaagttgctagcagaggagaaactggaagtagttgacttcagtagccaggttgatttatccaaagaaccagggcactatgtcatctt

SEQ ID NO: 23042 - DNA, 572 bp, Glycine max
acagaatcgtcatcctcaaaatttatgattatattttctttctctacttcgtcactacctctttctcatgagagagtatgttactgcgcaaagaacaacaaactaattaggtactgaccatttccgtctatatataaggccaataacccaacacgttctataaacatatagtgactaacctcccactgaagagtaattggtggattccagcaatggccgtggttcatggcagttgggtcaagcttgatcaaagaggagaagggcaaggagcgagaagctcacatgctatagccatagtagcacagaaggtgtatgcatttggtggcgaattcgtgccacgtgtccccgttgataacaaacttcacgtgttcgacctagagactttgacttggtccgtggctgatgcatcaggggatgccccaccgccacgtgtcggtgtcacaatggccgtagtgggagaaaccatatatgtctttggtggaagagatggtgaacacaaagagctcaatgagctctattcttttgacacaagggccagcaattggggccttgatttcaagtggcgatattgg

SEQ ID NO: 23043 - DNA, 302 bp, Glycine max
cagagaatgacaggatcttctttggggtacccattttctcctacaaggaacttcaagaagcatcaaacaattttgaccccactagaaaactaggagatggaggctttggcactgtttactatggaacactaagagatggaagggaagttgcaatcaagcatctatttgagcacaattacaagagagtggagcagtttatgaatgaaattgagatccttactcgcctacgccacagaaatcttgtgtccctctatggctgcacttcacgtcacggccaagagctactgcttgtatatgaatac

SEQ ID NO: 23044 - DNA, 529 bp, Glycine max
gtccaaaacggtatcgtattttaaataaaacgtaataaatgaggtgtaagaaacacttaccggacctcaccagcaccatcggcgtgtgcgcttcgtgcctccgcgaacgcctccagcctctcctcgcagcccaggcccaagcccaatcccaggcccaatcagaacgttccaccaccaattccaacccggataataatcatcatcgtcgaagaaagcccaagcccaagcccgaagaaaaccctccgccgctcaatttcccgcgctcggtggctccctatgtgagtcaccggaaatacgactaccaacggcttcgggatagggtgttctacagcacgccgcaggtgagtcggcgccgcctgcgacggcggaactgctttggagaagcggaggcaccgccgaagggtctggatcctctcgaacttattccgagccagatcgaacaagaccgaatcttcgcacgaaccgcgtgaggatccgacgggtcctcatccgccacagtcatggttttcgacaatcctctatgcgcgcc

SEQ ID NO: 23045 - DNA, 684 bp, Glycine max
caaccactgagttcacccctcaaacgttaattaattacaaggcttatgtctattttcagtatttttgacatcttcgttctcctgatttttgttggctttaactttaaaccaccaattctgttccccttgtttcttcatcattagattttaagtgccatgcattgatataatataaatatataacttcatttaattaatgcaagctattgagttttgagtcgaatctattagccacaaaacacacacacacatattctcacacaaactgcaaccatggctactaccttatgttacaattctcttaacccttcaacaaccgttttctcaagaacccatttctcagttcccttgaataaagagcttccactggatgcttcaccttttgttgttggctataactgtggtgtaggatgcagaacaaggaagcaaaggaagaaagtgatgcatgtgaagtgtgcagtggtggaggctccaccaggtgtttcaccctcagcaaaagatgggtatggaaccaccccttcgaagaagcagcttcgtatacttgtggctggtggagggattgagggtttggtttttgctttggctgcaaagagaaaggggtttgaggtgatggtgtttgagaaggacttgagtgctataagaggggagggacagtataggggtccaattcagattcagagcaat

SEQ ID NO: 23046 - DNA, 492 bp, Glycine max
tcggacgcgtgggcggacgcgtgggcggacgcgtgttgttcctctcttctcctgaatcatatgcagtgcggattttggtccgaatcggtgaatccccaaaatgggtaacagcagaaagaagcaccgtcgtgtgcaagactcgccgtcttcttcatcctcttcgtcctcggactccgaccactcttcgcggcggcggcggcggctgaggcggcgcgagaaggagcggcgcagaaagagcgagggaaaggatgagcgaaggagtaagaagagagacaaagagcgcaaaaagaagaagaggaggctccacgattccgatgactcctactcttcggaggagggggaacacgaacaacctagggttcagcctgaaactgtcttaaccgaaatgatgaaagagtttcccgatgtcggcaacgatttgaaacagctcttgcaaatgattgatgatggacaagctgttgacatacagggtatatcagaaaaatctttagc

SEQ ID NO: 23047 - DNA, 433 bp, Glycine max
gcatactgatttcaatgctctcacaattgttttgcagtcacaagtttctggtctccaagtgatcaaagatgggaataacaggtactgcaatccatttcccatctttgatcacttggagaccagagacttgtgatcaaagatgggaaatggattgcagtacctgttattcccaatgcatttgttatcgacctgggagatcaaattcaggttcttagcaacggaagactcaaaagtgtacatcacagggctgttaccaacaaattgagtccacgggtgtcgatggcaatgttttatggcccaaacgtggacactacaattggcccaatccagagacttgatagatgaagaacacctcccagataccgaaattatcgcttctctgagtttcttgaagaattcttcaaacaagaaggcacgaggaggatggttaaag

SEQ ID NO: 23048 - DNA, 535 bp, Glycine max
tgggaacttcctctcatggaatgagaggtttaatgtgattctcggaacagcgaaggccttggcacacttgcaccattccaacattattcactataacattaagtcaaccaatgtccttcttgatagttacggtgaaccaaaagtaggggactttggcctagcaagactgttgccaatgcttgatcgatacgttttgagcagcaaaattcagagcgcactcggctacatggcgccagagtttgcctgcaagacggtgaaaatcaccgagaaatgcgatgtatatgggtttggtgtcttggtcttggagatcgtcacagggaagaggccagtcgaatacatggaggatgatgtggtggtactatgcgacatggtgagaggggctttggaagaaggcagggtggaggagtgcattgatgagaggctccaagggaagttcccagcagaagaagctattcctgtcatgaaactaggcttaatatgtacttctcaagtgccatctaacaggcctgacatgggagaggtagttaacatattg

SEQ ID NO: 23049 - DNA, 459 bp, Glycine max
ctcggcctaactcgtgtcgtgcattttctttttccgcgtttgctccattctttcatttgtcttctgtctcttaattattttctatctctaagtgcgtccgcaaaggggtaacctttttcctccgttgaacacggtggagaaggtttctccactgccttttcacacctcaacttccctcggtcttcacttgcttctcgaacttcttcctttttgaagttattaattaatactaggttcttattcggtttctagatgtcttaggaacaggagcacagcaaaccacccctctctttcaaagcacaacctaagatgtcttgttcttgatttcttgctatctcaaattgcctctacaagcaagaagaagtggagtctaattgaacgctggagtggtcaggatgggatttgaaatcgagtggaccttgagtggttaccttgatgtacaatgttgagttgccttgg

SEQ ID NO: 23050 - DNA, 778 bp, Glycine max
gataattgtaaaaaattggatttgggcgtattgttttgttattagttatggttcaacttcaatgacatagtaaattgtctgtttttgttagatgggattccaatttgctggcaaagctgtttactctgcggtatggatagctgccttttcactctctatggaattgctgggcttctctacccagaaatgggttactgcaggaggtcttgggacagttttgttgacccttgctggtcgtgagatatttacaaacttcctttcaagtgtgatgattcatgcaacccgaccttttgtggttaatgaatggattcaaacaaagattgaaggatatgaggtttctggtacagtcgagcatgttggctggtggtcaccaacaattattagaggtgaagatcgtgaagctgttcacattccaaaccacaaatttacagtgaatgttgtgcggaaccttagtcaaaaaacacattggcgaatcaaaacccatctagccattagtcatttggatgtaaataagattaataacattgttgctgacatgaggaaagtcttagccaaaaatcctcaagttgagcagcagaggttgcacaggagagtgtttttggacaacataaatcctgaaaatcaggcacttttgattctggtgtcttgttttgttaagacctcacattttgaagaatatctgtgtgttaaggaagctgtactgatggatcttcttagagttattggccatcaccgagcccgacttggcacaccagttcgtaccctgcagaaaatatac

SEQ ID NO: 23051 - DNA, 327 bp, Glycine max
cttaccttcagccattactgttatggactggagcaatacttatttgcagagcattggagccattaatcctaccttcagaaactagccagattgttaaggaacggcttttgaattttgtaagatcattatcaacagtactggcctttgcctattgtttgtcaagtgtaattcaacaagtgcagaaattcttagccgagagtactgatgcaagtgcggcgagaaatatgggattccaataatttgctggcaaagctgtttactctgcggtatggatagctgccttttcactgtttatggaattgctgggcttctctacccagaaatggg

SEQ ID NO: 23052 - DNA, 288 bp, Glycine max
ctcaatttagattcaatgcattgtgtttaaattaaaaggtgggaagcggaacaaaaggggtttaggtcaaggttgtgacagggaagagaatcaatggaagacggtgagattgaagagggatcaattggcggtgtagaggaagaggagcaatctccagaaccgcacaagtcggaggaatctccctacgaaatgttgcgcaacagcaaggcttccgtggagagcatcgtcgccgatatgctctccattaaaaaagagggtaaacccaagcaactccttcgagatctcgtt

SEQ ID NO: 23053 - DNA, 280 bp, Glycine max
tctgaggaagatctgaagaagaaggtagcagaatggttgatagggaagagttatctggtagtgcttgatgacatctgggataccaaagtatgggatgaggttaaaggagcctttccagatgaccacataggtagtagaattctcataacaagtcgcaacaaagaggtggcacactatgctggaactgcgtctccctacgaccttcccatcctcaatgaagatgaaagctgggaactcttcacaaagaagatttttcgaggtgaagaatgccgtctgattt

SEQ ID NO: 23054 - DNA, 331 bp, Glycine max
cacacacacacacactagcttcactctcaagccgactctactcactctagtggaccgctttaactcttcataattccatttcattgcacatttgcacccttctcagttctctcaatcatatccatggcaacaaacgcaaactgcgaaatgcccctcacacaccaccctcattggttctctccaaaatccggaatttaccacagcaaacacgcccccgtggaccttcccaacgacccttttctcgaccttgtttccttcattttttcccaccgccacaatggggtttcggccctcgttgattcttcatctgggtgttccatttcctacccaa

SEQ ID NO: 23055 - DNA, 281 bp, Glycine max
tatcgtcccctgagaataatgtgaacggcgtattcaaaatctctccattctttttgtttattttcctcttctcaagctaatgtatatttaaaggagtgacgggttatgttgtcaggatgcaattctacaatctataaataatcagatagataatgtcaagcccttgttagctttggcgaaatattgatttggggatggaatatgaaatcgattttctgaagttaaaaaaaaaaaaagaaaaaaaaattaatgggggtcattgctttaaccttaagaagaaa

SEQ ID NO: 23056 - DNA, 412 bp, Glycine max
  unsure (1)..(412): unsure at all n locations
gtatatttaagttctctaataaaaaatcctgacttctccatgtcattagctgaagcagttgtccgcaccatcactggccagcaaaagcaacaagatataaaccttaatttggatcttcctgaagagtgaaatcaatcattttttccccaaaagcaataatgcaagtgtaaagatgagttttagttcagtgaattgtaggcctatagcactaaaaaagtgaggaaagcacggttaagaaacatttagttgttttcattttctgtttccactttaattacaaaaatattagtttgtttttactttagaagaaaaannnnnnnnnnnnnnnnnnnnnnnnnnnnnnnnnnnnnnnnnnnnnnnnnnnnnnnnnnnnnnnnnnnnnnnnnnnnnnnnnnnnnnnnnnnnnnnnnnn

SEQ ID NO: 23057 - DNA, 289 bp, Glycine max
tctgatcactgcgtgcgttcttccttggctaactctgcgggaatatcagactattgttttggtacctactgatttgggagtcgtggagttgggttctgtcagaatgttacccgagagttttgaactcttgcaggctgttaaatctgtgttctccacgccgattcccaaggttttggtgaacacaattcgcaatcagacacattttagagagaaacttgctgttagaaaaatggaggataataggccttggaacaacaacaacgttagttttccgaatgtgcggagcatg

SEQ ID NO: 23058 - DNA, 546 bp, Glycine max
ctcgagccgctcgagccggattactgcgtgcgttcttccttggctagctctgcgggaattcagactattgttttggtccctactgatatgggagtggtggagttgggttctgtcagaatgttacccgagagttttgaactcttgcaggctgttaaatctgtgttctccacgcagtctccttcataccaaggggtgagtgtgagcaccggtgggaatgctgttttccctggtttggcaattggggatgctaataaggtagatggaggagtttcgattcccaagggttttgtcaacacaattggaaatcggacgcatttcagagagaaacttgcagttagaaaaatggaggataataggccttggccaggccatggccaccccgaccccaatgggaacaatctccacaacaacgttagttttccgaatgtgcggggtaatagtcttcatgtttcgagttgggcagtgaattcggatctgaggcagcctggtccccttgagatttttgctcctagggcccccacgagtagtgtcctcgcagagctggct

SEQ ID NO: 23059 - DNA, 448 bp, Glycine max
ccctcgagccgctcgagccgctcgagccgtgagtgactaatacagaccaaggatgagtttggtagcgggctcatacgagaaattcatctggggcttcaccctccgctcccaatcccaaaccctaacccctctgttttcttatccttcccacctctcctccatcaaatccgtcgccatctccggccccgtcgttgcctccggcggcgaggacgacaccatccagctctacgacctcgccgccgccgcctccctcggctccctccacacccactctgccaccgttaccgccctctccttctacgcccctccccagctgcctcttcccccgcaacctggtgttcgacgacgccgacggcaacgtctgcatcttcgacgccgatggcttcgtccacctcacgaccatgtacgtccaccgcaacgccgccataaacgaccttgcccttcaccc

SEQ ID NO: 23060 - DNA, 586 bp, Glycine max
gaggtgaaggagatggaaatggagggtgtcgtgattcggagatgccagaccgtgaggtgaatgagtcggagatgccggaccgcgaggtgaatgagtcggtgaatggaaactcgggtggggggaacgatgcaatggaagcgggggaagagtttgatggagggataatgtctaaagagcaggtggtggatgtatcagatggggtgaactacagtgtggctggattgttgagtggaggtcagaagtgtggcggcaatgatgataagggcttggtgttggatccatctggtggggatagtgatggtcgaaagaggaagagagacatgttggatttgtctgatggtgatagtgatagtgatagttctgatcgtaagaggatgagagagtttgcgttggatatgctgagctgggttacaggtgccgcaaagaatccctgtgatcctgaagttggttcaatacctgaaaaggcaaagtggaagtcttacagtaatcaggaggtgtggaaacaggtgctgttgtttcgagaatcagcgtttctcaaaagaggttctgatccaagcagtgaacaacgtagctggcagagtcagaa

SEQ ID NO: 23061 - DNA, 505 bp, Glycine max
cagtttcatcattttttctttttttctctcttttggtacattggaaagaaagaaaggaagcttcaatttcttccaataaagcgtgtttttgaacgtgcttttaaggtatatatatatatacataactacatataccaaaaaactgatttgcagctgaaattgctttcgttcattagtatttagtttttcacaagctagggaagacatgggagaagtggctgatgaaggtcaatatttcagatcagaaatagctctattgaattactcggatgcaaccttcaaacccccactttcttctctgttgatacacattgatccactcataatacccaatggccacacttgttctgcatcagaatctgatccatcacccacttctcagcaccatcagcaggagcagcatcccaaagatgcctggcttccaatcactgaatcaagaaatggaaatgcctattatgcagcctttcatattcttaattccaacattggattccaggctctcatg

SEQ ID NO: 23062 - DNA, 340 bp, Glycine max
ggctcgagcggctcgagcagaaatttatgagaagacaactggttttgcttgttcaggttttatcatctttccctgttgtctttgcccccaccaaacaagagagaaatggaagcagcatgggccacaagtctgactctgatactgatactcgctctgatgtgtccatggcaggcgctgacctggttatggttgacgccaaagagactagaaaagctgctaagagagcaaggccttcaagggaatccatacacactttttggtggagactccaaggagtttctgaagatgagaaaggaagccttatccaaacccatgaatctctctgatgacataataccac

SEQ ID NO: 23063 - DNA, 642 bp, Glycine max
gcttgccagctttactcggcaatggtggcaacatatataggcagcaacccataaaatattattatgataaattgaaaattaacgtaaaggggttgattgcacatccttttttctttctgggttggaagaacttttccgataaaagattgtttcacccaaaaaaaaatggtgctggatccagcaaggctggtgctggtgctgttcatcggcacctgcattttggccatcaatggtgacacagatccaaatgacgttacttctctaaaggttttgtttcaaagtatgaactcaccttcccagctaaattggaatggtgatgatccctgtggacagtcgtggcaaggcatcacttgctctggcaatcgagtcacagagattaagttacctggtcgttcactttctggatctttgggttaccagctagaacccatgtcatctgtgacaaacctagacttgagtaacaacaaccttggtggcaccataccataccaacttcctcctaatctgcagtacttaaatcttgctaataataatttcaatggggcaatcccctattccctttctgaaaagacttcgcttatagtcctgaatcttggtcacaatcagctccagcaagcacttaatggtgatttccaaaagctt

SEQ ID NO: 23064 - DNA, 294 bp, Glycine max
tactccctcgccactttcttcctaattctctcaataagggttttacttttttgcttaaacccgcggccatggcgacgagggcagcagtggcggcgccgcgcgtttttcggcggtttttctgcacaaactcagcctctccttctttccccttcgttcctacgccgcctcctggcgccacccccactccaactcgacccacggcggagccaaccccaacctcttcgtctctggtcttagcaaacgtactactacagaaaggcttcgagaggagtttgcaaagtttggtgaagttgt

SEQ ID NO: 23065 - DNA, 293 bp, Glycine max
atcgagccgttttttttttgggcatagattattcgtgatagatacaaagctcaccataatactatagtacattgtacataacacctctattttgcatataataataaacaaattttaggcatagaggcaaacgactatggaagaaaaccttggaaacacccgacataaaagttcgtacacaggagttaggccaagtagacactgggacaccactaatcaattgaaggtcttggggacttttactgtttcaatcattcaatcaaagattgcatgattcttaagcctaaatagag

SEQ ID NO: 23066 - DNA, 439 bp, Glycine max
ggtggggagagagagcgagtggatgtggtgttccggagaagttggaatggcagcggttagtgttagtgttactgtgagagtgaggtggtgcactcgaaaaccacccactccaactccaaccagattcagcgttaatgctctgtttggtgattggggatttgggaatagaacaaggaactcccttcagcagcaattcacgttcactcttgctgatagtaaagtgataagcgtgtcggttgtttcttcgatctcagatgttgcatcgagcgaatgggacgcttgtgctttggatgcgactggccctgacaacttcaatccattcctttcgcatgcctttttgtcgaccttagagcactctgcttccgctgtcagggaaactggttggatcccacaccacatcgttgccaaagccaacaacaacagcaacaacaacgttgta

SEQ ID NO: 23067 - DNA, 293 bp, Glycine max
gagagagcgagtgagtgtggcgttccggagaatatggaatggcagcggtgagtgagagtgaggtggtgcactctgtttggggatttgggaagttccatgacaagttcaatccattcctttcgcatgcatttctctcaaccttagagcactctgcttccgctgtcagggaaactggatgcatactacaccacatcgtttccaaacccaacaacaccaccattctcgccgttgtcccactctatgttaattcccattcctacggctaatgcttaccattcttatggatacaacta

SEQ ID NO: 23068 - DNA, 169 bp, Glycine max
tctgtctcctccttctccttctggaaaaccccaacttgcactctgttatgccgacgcatgaatgaatctttcctctccgaaaccctaaccaatggtgggacccaaacggcacttcctcccactgatcctcatctccctcgccgccttcatcttctacagcttccaccac

SEQ ID NO: 23069 - DNA, 399 bp, Glycine max
gtttgcccaaaaccttatctgacttaacttccacactgtctgtctcttactctccatctttgtgtcacatgaaatttgttctctgaattttgttttgtttttttgacatcattccaatggcagccatcatcccctgccactactgtgcttccctcagtcctagatggttcaattccaacaacacacattctacgcgtttatcctacccacttcgaggactccgaggtttgaatgctcgttgctcttaccaaccaccccatcattctgaatctccgaacaaccataatgggaggtcattttccttgaagcagtgtgcgatatctattgcactggcggttcggttcataacaggagttcctagattggagggtcccaccattgctcaagcagctaaatcct

SEQ ID NO: 23070 - DNA, 301 bp, Glycine max
ccatcgcctcgtggcggatctaacaccagcctcggtcgctccgtccggtcaacctcacgcggcggaccgcctctcgtccaccgatcaggctccactccggaatcgcgaaaaccagcaccgaaattggaagatctaacaggaacagccttcttaccagccgcccaactgtccacatcatcagccctagacgcaccaccaaaaccgccgccgacgccgccgcagccgcagccaccaaaaccgccaccaccagaaccgccataaccgccgccaccaaagcgattctggcgaccggaatcgaagg

SEQ ID NO: 23071 - DNA, 542 bp, Glycine max
agacttggaggcccatgttgctgattttggccttgccaagttcttgtacgaccctggcgcctctcagtccatgtcctccattgctggctcctacggctacattgctccagagtatgcatacactttgaaagtggacgagaaaagtgatgtgtacagctttggcgttgtgctgctggagctgataatagggaggaagccagtgggagagtttggagacggggtggacatcgttggatgggtcaacaaaacgagattggagctcgctcagccgtcggatgcagcgttggtgttggcagtggtggacccaaggttgagtgggtatccattgacaagtgtcatttacatgttcaacatagctatgatgtgtgttaaagaaatggggcccgctaggcctaccatgagggaagtcgttcatatgctctcagagcctcctcactctgctactcacactcacaacctaattaatctctagttaattaagttatttgctcatcgatccagaatcacttcttttcaaaataaattaacacagacgaaaactg

SEQ ID NO: 23072 - DNA, 827 bp, Glycine max
gggttttggttgggataggcgatggtgtttcaccatctgctgctactgatctcattgccaggtcaataccattagaagagcgctcacgtgcagtagcattggtttttggtggtttgagtgttggaagtgttatggggcttcttttggctcctccccttatccaaaatcttggttgggaatcagtattctatatatttggtctcttgggaattgcttggtttttggggtttcaagttcttgaaggaggtgaaacacaattaaatgcagaatctctttcatcccaagatatcatgacacaatcatggaagacttctctaagagaattgaatggctctttgaaggatgtaccatggaaggcttttttccaaaatcgtgctgtgtgggctatgatatatgctcatttctgtggcagttggggtcactataactgtctatcatggcttcccacattttttagtgaggagctgaatctaaatctgactgaagctgcatgggtctctattcttccgccactggcttcaatatttgtgactagtcttgcagcgcaattagctgacaacttgatttcaagaggagttgaagccactgtggttcgaaagatctgccaatcaattgcatttttgtcccctgcaatctgcatgactctttcctcgctggatctagggctaccgccttgggagattgtggggattctcacaagtggtttagccctctcaagctttgccttatcaggactctattgtacccatcaagacatgtcgccagaatatgcaagtatacttctgggtataactaatactgttggggctgttcctggaatagtgggt

SEQ ID NO: 23073 - DNA, 424 bp, Glycine max
ttggtgactactacttggatgagctggtggatcgcagcctggtgcaagtggcgagtaggaggagtgatggtggtgtcaagacatgtcggattcacgatcttcttcgtgacctctgcatatcagagagcaaatcctgtaagtttttggaggtttgcacggaggtaaacattgatactctatccttgagcaatcctcgtagattgtccttgcaatgcaaagcacggcctaatatctgtacaaaaaaatttaatcaatcatacactcgttccttgttcttctttactgaaattatgcacacacgtggcattccaaagagcatcaagaatgctcgtgtgctgtattcaaaatccaaaggagcaatgaattactcactgcatagtacttttaagacgatgatccatctaaggtatttgagaatagacac

SEQ ID NO: 23074 - DNA, 517 bp, Glycine max
catggaggtcttcacaagcatcctatcatctttaccgtacaagtgggaatttctgcccatctgatcatgtgactatgttgatggatgatttgttgagtctctcgttgcatagctatgaaactgtccgcctgcttgctgggaaatctctagtgaagctgatcaagagatggccatctatgatttcaaaatgtgttatcactcttacccataacttgcaggataccaatgccaaggaatatgcagtgttggggtcctgttcagtccttgcctcacaaacagtactcaagcatttgacaacggatccaaagtcattctcttcatttatcttggcaattctttcaagttcgcatcatgaatccttgaaagctcagaaagcaattaatgagctttttgtgaagtacaacattcaattttctggagtatctagaagcctcttcaggatctcagacaaagaaaatcatactggtgggctggggttctcagatttggtttctcagattggctccatgagttttga

SEQ ID NO: 23075 - DNA, 288 bp, Glycine max
ttatagaacgccccattctctgttcctctctgttctctgttacgtttcggatttcacttctaaagccccaaatttatcatctttttccaaaccccattattattccccctccaaaacctcgttcccattttcttcattcgtcgcgttttattttcgattcttgaggcgcgtcgccgatctccagcggcgcatggcgccggggacaatggcgactgccgccggtgcggcggtgatgctctactacgtgctgagcaggcggatggcgcggaaggaggaggacgatggcga

SEQ ID NO: 23076 - DNA, 513 bp, Glycine max
cgaaaacaaacacaaaacgcaaaaccagagcctctctctctctctcgctctgtttctctccacagaagcagagaatgcatcgcttcatcgtcctcaccattctcctctccctcaccctcgcagatggaggttccattggagttaactacggtcgaatagcgaacaaccttccctccgcggttaaggtcgttcacctcctcaaatcgcaaggactgacacgtgtcaaagtctacgacaccgacccagcagtgctccgggcactatccggatccggaatcagagtgacggttgatcttccaaaccagcaactcttcgcagcagccaaagctccctcctttgcatcctcatgggtcgaaaggaacgtcgccgcgtactaccctcacacccaaatcgaagccattgcggtcggcaacgaggttttcgtggacccacacaacaccaccgcagttcctcgtacccgccatgaagaacatccaaaaagccctcaccaaacacaacctcgacaaagacatt

SEQ ID NO: 23077 - DNA, 327 bp, Glycine max
atacacacactctgcacaccacattcccagtaacatcgtcaacaacacaacaaacacaaaccctctctctctctctctctctctcccgctctgtttctctccacaggagcagagaatgcatcgcttcatcatcctcaccattctcctttccctggcactcgcagatggaggttccattggagttaactacggtcgtatagcgaacaacctcccctccgcggtgaaggtcgttcaactcctcaaatcccaaggactgacacgtgtcaaagtctacgacaccgacccggcagtgttacgggcactatccggatccggaatcaaagtgac

SEQ ID NO: 23078 - DNA, 521 bp, Glycine max
tctcgagcgaatcggctcagtgaaattgttcctcatcaattgttcgagaaacttccatttcttagatatgtgatatacacaccgacatatcaccacctacaccactctgataaggacactaatttctgcctcttcatgcctctctttgattcacttggcaataccctcaacaaaaattcatggcaatcacacaaactactaagttcaggttcaggaaacggtgacatggtaccccattttgttttcctggcacatatagttgatgtgtcatccagtatgcatgctcaattcgtctatagatcctttgcttcattgccatacacaacaaggttcttcttgctcccaggcttgcccattacttttctagttttgctagcaatgtgggcttggtccaagacctttttagttagtttctactatctcagaggcagacttcaccaaacgtgggttgtacctagatgtggctttcagtatttcttgccatttgctactgagggaatcaataatcaaattgagcaagc

SEQ ID NO: 23079 - DNA, 560 bp, Glycine max
gtccttctatgattgcacaagtcaagcatagcttaagacgatcacttcgaaagggattgcctaggctggaggccacatattatatgtctttctacgaagaagattcttcacatgatgaaaaattgctaacatttgcaaaactagattttaatatgttgcaggagttacatcagaaagaagttaacaatgtgaccaggtggtggattaagaatttaaatgtctcaacgaaattgccatttgtacgagataggattgcagaatgttacttttggattttgggaatatactttgagccacaatattctcttgctagaaggataacaacgaaagtaattgctctatgttctgtcattgatgacatgtatgatgcctatggaaccattgacgaacttgagcttttcaccaatgcaattgagaggtgggatatttggtgcttggatgatctcccagaatacatgaaagtatgttatatagaaattttgaatgtttatgaagaaatagaggaagagatgagagtacaaggatgagtatattgcatcaagtatgctaagaaagagatg

SEQ ID NO: 23080 - DNA, 372 bp, Glycine max
atattttttgactttccagactcaaatctaaatccaaaaaaaacaaaacgcgagccaaacatttgtctccatcaaaaagcactgcccttacgtggtgccttcccctgccactttttttctttagcatccaaccggaaaaaaaaaatagtactctcacagtctcacctcacttgcccccttttgtctatggcacaagatggtgtcttaaaactgtgtgatcctatttgcacttgaaaaaagttgcaaccttttggttgtgagtttttctctgactcagcaacatgggtcataggccaccagaacagccaccatatttactctcagagccaaacccaccattcccacccactactactgttcgatctgatagtt

SEQ ID NO: 23081 - DNA, 493 bp, Glycine max
caaaatacaacaagttcttacaggcaagtggatcactggatctggatgtgacttctcctaaacaactcaaccgaaggctctttctgaaacagctagctgtggacttgtgtactagtgagcgaaggatattatttcgtgctcaatacatactgcgaagaaaactgagggacatgagggctggtgaattaagggccctaaaaatattcaacggtttccggaatcttttccaatgaggccattcactggtgcattattttctgccctggtttgcccttggttgttttgaaaaaacctatctcacccttgagcatcatgaactttgttcaatggtaccacctaattgtgggaaacaggtccagtcttcagtttttattgatcaatatagaagaagcaagataagaaatagaaaaggtaaggaatgattgtaatataggcttgctatgtatttattgatccaaataaatttttcttttcctatgttaaattttcgatg

SEQ ID NO: 23082 - DNA, 280 bp, Glycine max
tgcagccaaagagcatatctattatcggctggtccagttccttgtcataattcttgcaatacttgtgatagttggtttgctggaattcactaaattcaaattcatggatattttcactagcctgttggcattcatacccacgggctggggcctgatatcgattgcccaagtattccggccgtttttgcagtccactatcatttgggatggtgttgtttcagtggctcgtatatatgatataatggttggagtcattatcatgtcgcctgtggcactacta

SEQ ID NO: 23083 - DNA, 304 bp, Glycine max
gaacggaaaagatattgtaaaaagagcatctgcaaaagataaggagacactcactgccattcctactcttacaaaccttcttcagaacttcaactcttcgatctcctccactttgcgcatcgtactctctctctttctctctctctctcttaccttctcaactcaacatcaaaacaatatcaattctaataataactcattgcacacgtcaaatgaatagaagaagataattttgcaatatcacgtgattttgaagatgaatatcgatcgatatcgtgtccggtactactatttcagctttaca

SEQ ID NO: 23084 - DNA, 344 bp, Glycine max
tttctgatacatttcggcgtatactcataacatctcaggctgagattcttccctcattggacgacgaacaaattgtaaatataccatatagtggtgaatgcctaattcaagggaagaacaaaatctggattggcatatctcgtgctgtgggttccaagtgtgaaagatgctggaattattcagagcaggttggttcatttttggaccaccctaccctctgcagccgctgccacgatgttgttgctgttcagatgccccctcaagtagcagcagtcagttaaattttagaagcaaagtttgaattccaaaatatcattttttgttcactactgtctggcattatg

SEQ ID NO: 23085 - DNA, 439 bp, Glycine max
gtgagaatcatgtgaagtgccgccactctctctctctttctctctctatctgtctctggttcaatcaacaaaaagcttcaatctttaacaatccaacacacaacaaaacaaccccacttctgttttgttttgcttaaattattctgagaaagtttcttcttttcttcttgttccaatggctgctgcaactgccccaagattcatcaagtgcgtgaccgttggtgatggagctgtagggaagacctgcatgctcatttgctataccagcaacaaattccccacggactatatccccactgtgtttgataatttcagtgcaaatgtggttgttgaaggcataactgtcaacttaggcctttgggatacagctgggcaagaggattacaacaggctgaggcccttgagctacaggggggcagatgtctttgtcttggctttt

SEQ ID NO: 23086 - DNA, 362 bp, Glycine max
atcatatgcaattgaacagctttctgaggcaatgtctgctagttcagattctgataaactgcctgatggggttccagctgatgcgttacgcctatgctcggagcagctctctgggagctacgattcaaagtttggtgggtttggatctgcaccaaagtttcccagaccagttgagataaacttgatgctatatcactccaaaaagttggaggatacggggaagttgggtggagctaatggcagccagcaaatggttttctttagcttgcaatgcatggcaaaaggcgggatgcatgatcatattggagggggatttcacagatacagtgtggctgagtgctggcatgttccacacaacatac

SEQ ID NO: 23087 - DNA, 320 bp, Glycine max
gctacgtcttctcctctcccgttacccgaacctccacttcctctctccgcaaaccacccccaaacgccgtatctccttctccacactcccctcctcaccttactccgtttcccgccacgtcacctccaacgtctctctccgcacctcgcgaatccgcgcaactagagaagaatccgcgttggccgagcgactcaacgacgtcgaatggaccggaaacggcgccgccgccgctgctgctgacggaaatcgcgcctccgttggtggatacgttaacggcgctactaacggaagcttggtgaagtacggctacgacaacggaa

SEQ ID NO: 23088 - DNA, 511 bp, Glycine max
ctacagcttctaataaatccttgacaacttcctcctcttctaattcaattcaggctctagctatgagcgtaagcaataacaatataatgagctttaaagctctaaccttatggtgcattttgttgtctttgttgcaactatctctaggagctgtaaggcaccgtattaggtttaacgtagagtacatgtatcgtgagccagattgccatgagcacgttgtgatgggaatcaatggccagtttcctggcccaaccatcacagctgaagctggagacacccttgagattttactcaccaataagctctccacagagggaacagttattcactggcatggaattagacagtatggaacaccttgggctgatggaactgctgccatttcacagtgtgctattgctcccggagaaacttttaattacacatttacagttgacaggccgggtacatacttctatcatgacactttggtatgcaaagagcagcaggactgtatggttctctgatagtg

SEQ ID NO: 23089 - DNA, 502 bp, Glycine max
ggcagtacagtggtgattggtgaagtgaatagcggggagatgcagaagggcaactatcaaaccgatgcgttcattggtgccgaagggaagcagcagaagcatgacatgtctatgccttacccattcactcactcaaacccatagccataacctactggctactaccttctcttcttctctctataatagtaacaaccgtaaccccctctttcaattattctccggtattctccggcctcgaattcgagcattttccaccgacttcaggagcgcccccacaccaactgcttcttcttctgcctttgcccaaagcatggcgaatttcgacgctgattccgtcacttaccttaagcagcgagatgccgcggagatcgacgagacactcatgggtccacttggcttcagcgttgaccagctcatggagttggctggtttgagtgtcgccacttccatttctgaggtttacaaaccgagtgagtatagtcgtgttcttactatatgt

SEQ ID NO: 23090 - DNA, 495 bp, Glycine max
ggtggttggtgaagttaatagcggggagggagatgcagaagcgcaactaccattggtgccgaagggaagcagcagcataagcatgacatgtctatgccttacccattcaatcactcaaactcataaccataaccataaccttccacacgctactactaatatctcttcttctctccataaccgtaaccccctctttcaattattctccgtaagtaaccaattccctcttctatctcgcgctttgtttcagagtattattctccgacctcgatttcgaccattttccaccaacttaactgcttcttattcttcttctgccttcgcccaaatcatggcgaatttcgacgctgattccgtcacttaccttacgcagcgagatgccgcggagatcgacgagacactcatgggtccacttggcttcagcgttgaccagctcatggaattggatgttttgagcgtcgccacttccatttctgaggtatacaaaccatgtga

SEQ ID NO: 23091 - DNA, 396 bp, Glycine max
ccaagatttgaaaaagctatttgaagcctggtatgaaaaacggcaaatgagaaagatctattccccacttctggaaggactgctggcactatacctaggtttcgagtggatccaaaatggttacgtgacagactgataatattcttgctcccattatcacacatggcatatattccactgtgatattgggacatggcctttggaagataaatgaccaccggcgtagactacgtcaaagaatccaacagctcaagtcagaagaaaaaaactccaactagattttgaaatatcctccatgtccatgactgattttggttttaaaaaaaagtgtatattagtgttgttgttgtataaaaagaatatatgtatactcacccaagtttggtctcatacata

SEQ ID NO: 23092 - DNA, 590 bp, Glycine max
atttcgatgaagaatagttagagagtgctgtgagcttcagcaaaatgcgcgccctagcagctcagttctctaattatttatgcagaagaaaagttggggtcaatctgcgatctcgtaatttttcatcatataacagtaaagatgagctaaccatcgaggaagaagctgagagaaaagttggatggctattgaagacgatattttttgtcactgcaggggtagcaggataccatttctttccttatatgggagagaatttgatgcaacagtctgtttcacttttgcgtgtcaaggatcccttgttcaaaaggatgggagcttctagattggctcgttttgcggtagatggtaagttttgctatctatatctttctgtcactaattgcttgctattgttattttatgacccttatttctttggtgcatgacatatattgaacttttattaatcattagtcatttgcatattagagtagttgttttctagaacggattcctattcttgtaacaagcataatttcattatccttgtgctttacactagtgacatttagtcatttagtattaatctcagcttattcttgaaatga

SEQ ID NO: 23093 - DNA, 281 bp, Glycine max
aattgaactccgaatccattaagcaattcagtgaagctgaaggtatatgcggaccgcatgtcccaaccatcccgtgcgattctcatattttacaagtattttctcttattatctttgcttttcctttcttattttatttttggaatttgaatttggtctctgccgcatgtcccagtgaatggaatagattttgaggatgtcaaagtcgatttatcccatcatcaccagctatctccccatttccgagtgattaaccctttaatgaaagtccctgctgttgt

SEQ ID NO: 23094 - DNA, 603 bp, Glycine max
ctggatgaatgcttgtttcactgatggtatccatttagcagctgagggaagcaaaattgtggttaaggagatattgagagtgcttaaggaagcagaatgggagccatgcctccactggaaatccatgcctactgaatttgcagaagactcaccatatgatcttgttgctgctgatgggaaaactacactgaatccttctgagtggactttttacagagagattcagtgggattaggttgttaggttatcaactttaatcataatcatttgctctggcctccattcaggagccaacctttctgccagatcctgcaggatttagcagtttcatatattatatacgttctgcttagacatgttgagtggttatttggtgatatcattgccctatattttagatagtctttttttattattcatcaggattgttatttcataattcagctgaaagttaccttaatagaatagatccattcttccatagctatctgcaaatttcattagtttcatagaatggtatccaactcctaagaaattattttcatctgtatggaatgtataaggaatgacccacaataattcattatttcaaaacttgaagat

SEQ ID NO: 23095 - DNA, 1019 bp, Glycine max
atacatacaccctggccatactcatactcaggcttcttcttcgtctctccggcgttgactatctttctttgagagagtaacgcaatggaacaaccactcaccgaagccgtggaatccttatccgtctccgaccctgagatcccccaatcatccaatcccaatccaactcatctgttgacccccgatgagaagtttcaaattgtgaggagcgtcggagaagagtgcattcaggaagacgaactccttaacctcctcaccaaaaagcccgaacccgtttgctacgatggcttcgaaccctccggacgaatgcacattgctcagggtgttatgaagacaatcaatgtgaacaagctaacttctgccggttgcatcgtcaaaatatggattgctgattggtttgccaagctcaacaacaagatgggaggagatttgaagaaaattgagaccgtgggccgttacttgatcgagatttggaaggctgttgggatggatctggagagtgggaaaagttgagtttctgtggtcctccaaagagattaacgccagagctgatgagtactggcctcttgtgttggatatagctcagaagaacaatcttaaaaggattatcaggtgtagccaaataatggggcggagtgaacaggatgaattgactgctgctcagatattctatccatgcatgcagtgtgctgacatatttttcctcaaggccgacatttgccaattgggaatggatcagcggaaagtgaacgtacttgccagagagtactgtgatgacactaagaggaagaacaagcccattatcttgtcacaccacatgttacctggtctgcagcaagggcatgaaaagatgtcaaaaagtgacccatcgtcttccattttcatggaagatgaggaggctgcagtgaatgtgaaaataaaaaaggcttattgcccgcccaagatagtggaaggaaacccatgcttggagtacatcaaatatcttgtcttaccttggttaaatgagttcacagtggagc

SEQ ID NO: 23096 - DNA, 292 bp, Glycine max
ctcgactcagccttcttcttcgctctctcgctctgactgccgccgccgtgcgttcgtctctctctggcgttgactttttttttttgcctgtgagagagtaacgcaatggaacaaccacccaccgaagccgtcgaatcgttgtccgtctccgaccctcagatcccccaatcatccaatcccagtccaactcatcttttgactccggaagagaaatttcaaattgtgagaagcgtcggagaagaatgcattcaggaagacgaactccttaacctcttcaccaaaaaaccggaac

SEQ ID NO: 23097 - DNA, 538 bp, Glycine max
atttagcttcatccctagctactagctagcactttcacttccgttaatttaacagtagaccattaacttgaaaatttcaaaacaccgcatcaaaattttcttctgaaggcactaccgaagaatggctgtttttgcatcttcatcatctttacaaacccatttgcattcctcgctcttggcaccttcttttgaaggtgcacatgatcacaactcgtggtgggtgcgagcgagatcacagaaacgcattggtcaaagattacacacacaggacatagctagagggctgagaataaaagtccagagtgcagcaacaaaaccagcaaaatctccagctgaagaagattggaaggttaagcgagaatttctgcttcagaaaagggtaagaagtgtggaagtaaaggaagctctgcgcctccagaaagaaaacagctatgtattacttgatgtaagaccagaagcagagttcaaggaggcacatcctccaggtgcaatcaatgtgcaaatatataggctcataaaagagtggacagcatgggac

SEQ ID NO: 23098 - DNA, 335 bp, Glycine max
tagcagagcatagtagcatcttcattcatctctacagcacaaaaaagaaagaaatccaacccgtgaagaaagcaaagcaaataataataataataaaaaaacgtttacccccttttgtctgcgcgtgcgtgtggatctggcaagaaaacaaggaagggagggttcattgcggatctgaattcgcagtgttagggctttgaagggtttttccattttcttcaatggccacgccctttcccattcccgtcaccgcagctcaggttggaacgtacttcgtaggacagtactatcaggtgcttcagagccaacccgagttcgtgcaccagttttactcc

SEQ ID NO: 23099 - DNA, 366 bp, Glycine max
cttttacgatgttatctctctctctctctgactctatctctctctctgtgcctcactgattgagtgaaaccagtgccagtgaaacctttttttccttcctcgccccctttttcttccagatccaatcaaaaccaaaacccctacgctgattctcatgttcaattacggtcgtttgctcaattcaattcccctctccgttgcttaggtctcatctcaatttctcgcagatttagccgttcatggacgccgccgtgaagccggagacggaatacgcggccgtttcgacggatcagcctcggaaagtttcggtggtgaatggatacattgtctacactcgcgccaagaggtcactggattcgtgcaacg

SEQ ID NO: 23100 - DNA, 1014 bp, Glycine max
ttcgaattgggcacaaatctgagcataaaagaagatcattgcagctggtgattttaggttatttcattatggagcatgtgattggtggcaagtttaaattgggaaggaaaattggtagtgggtcttttggggagctctatttagctgtcaatgtacaaactggagaggaggtggctgttaagctggaacctgtgaagaccaggcatccacagcttcactatgagtcaaaactgtatatgcttcttcaaggaggaacggggattccccacctcaagtggtttggagttgagggagactacaatgtcatggttatcgaccttcttggaccaagtctggaagatttattcaattattgtaatcggaagttcacattgaagacagtgttaatgcttgcggatcaattgattaacagagttgaatatatgcattcaagaggtttccttcaccgtgacataaagccggacaattttctaatgggtctaggacgaaaggcaaaccaagtgtatgccattgactatggccttgcaaaaaaatatagggatcttcagactcataggcacataccatacagggaaaacaagaaccttacaggcacagcacgctatgcaagtgtcaacactcatcttggaattgaacaaagcagaagggatgatctggaatctcttggttatgtgctcatgtatttcttaaaaggaagtcttccctggcaaggactgaaggctggcaccaaaaaacaaaaatatgataaaatcagtgagaagaaaatgtcaacttcaatagaggtgctctgcaagtcatatccctcagaatttgtatcgtattttcactactgccgaacgttgcggtttgaagacaagcctgattattcatatttaaagaggctttttcgagattcatctatccgagaaggctatcaatttgactacgttcttgattggactatattgaagtatccgcagactggtggcagcagctctagaggacggcatgaaagtggcaaggcagctatgcatg

SEQ ID NO: 23101 - DNA, 332 bp, Glycine max
tctcgagccgaatcggctcgaggagagggctatctgaaaatcgcattgataagaaagtttaatgatggaagcgggaactgctctcagtctccgactccacactcgcattcccattcccatcaacactgccaattcaaataccttattattccaacctcgcttcactctttcttctcattctccttcttccttttccgcttacagttacagaggccccacaccaaaacgccccttcctcgccgactgggtctcccaaaacgacgacctcgttcgcaccctcccaatctacgtcggctctgcctccctcttcgccgtcctcctaaaccgctccc

SEQ ID NO: 23102 - DNA, 347 bp, Glycine max
caaatggcgatgaacattcagctgacaccttttatttctaatccccgacaaggacaactcctgaaccttaattttccaaacaaacattcaacactcacttgttgcgctattcgtaattcagacctcaaactatctcagactcagagacttgtccatcacttcaatcccaaaactcccatagaggaagccgttactcccccaacatcatggtacactcatccctctttcttccaccttgagctcgatcgtgtcttctacagaggctggcaagttgtgggatccacagagcagataaaggatccccgtgactatttcactggaagactaggagatgtggaatatgtggt

SEQ ID NO: 23103 - DNA, 860 bp, Glycine max
cggtcgcgtgggctcacattgtgctgctgcgccactcaggatggtggaacctgcatatactgtgacatctgacagtgaaaccactggtgaagaaaaatcgtctacttttcctgaaatagcaattggcattgatattggcacatcacaatgtagtgttgctgtgtggaatggctcccaagtggagcttttgaagaacacaaggaatcaaaagattatgaaatcatatgtaaccttcaaagataacatcccttctggtggagttagcagtcaactctcccatgaggacgagatgttgtctggagccacgattttcaacatgaaacgcttgattggaagagttgatactgaccctgttgtccatgcatgtaagaatctcccatttctagtgcagaccttggacattggcgttcggccatttattgccgcattagtgaacaatatgtggagatccacgactccagaagaagtcctggcaatatttctggtggaattaagagcaatggctgaagctcagctgaaacgaagaataagaaatgtggttcttaccgtcccagtttcattcagtcgatttcagctaacccggatagaacgtgcttgtgccatggctggccttcatgttctcaggttgatgcctgaaccaacggctgtggctttgttatatggacagcaacaacagcagacttctcatgagaatatgggcagtggaactgagaaaattgctctcattttcagtatgggtgctggttattgtgatgttgctgtcactgctacagcgggtggagtatcacagattaaagccttggcaggaagtaccattggtggtgaagacttgcttcagaatatgatgcatcatctgctac

SEQ ID NO: 23104 - DNA, 354 bp, Glycine max
ctcgagccgctcgagcggctcgagcgtctctattctttccccactgttaggaacaacaccacgccacccttgtttacgaacccgtcgacttgatgactcatcacaacgccaccaccaccgcctaacgacctagagcaccttctctctcctctaattggccattgcttaagttgacttgctgcgaaggttgctttgatcatttgaagcgcctgaaaatcgttgtgcgaattttgagggttctgttcttgtaatccgaaaatggccgcgattcggaggcgggtgtggcagttatcttcaatcgcaggtttcggggcttcgagatcggaagtgtcgtcgtcattgtcgtcgtcccaa

SEQ ID NO: 23105 - DNA, 539 bp, Glycine max
ccagacacgagtccagcaagaagctccccgattctcgttggttcaatttacacaggcccagtgcggttggcgaggaggaaacacagaaaaagaaggagaaattctcaagcaagattcacctccgagtgtgtcttgaggccggctaccacgtgcttgatgagtccacgcatttcagcagtgatcttcagccatcctccaaacatttgaggaagaaaaacattggaattctcgaacttgggatcctgagtgcccgcaatttgctgcccatgaaggccagggaagggaggactactgatgcatactgtgtggccaagtatggcaacaaatgggttcgaaccagaactctgcttgatactctctcccctcgatggaatgagcaatatacctgggaggttcatgatccgtgcactgtcatcacagttggggtttttgacaaccaccacatcaatgggagcagtgatgccagagatcagagaattggaaaggtgagaatcaggttgtcaactctggagactgatagggtgtatactcatttttat

SEQ ID NO: 23106 - DNA, 374 bp, Glycine max
gctcaatgtgactaactgactatacacgacccattcaatttagttcactcactcattcggtggaagcacttattttccctttcgagtattaagcatgtaagtctcctcaatctgtttaccagctaaggttccagttcgcgtgaagtcactgcacacgaacccagcaaccgtaaacgaccccacttccacggccaaggtggctgctcctaagtgggcccagaagacaataactttgcctccccttatacgtggttgtcatttaatcacttctaagatagtgaaagaagttcggcaagaattgtctgaataccagtgtggcctggcccatctcttcttgcatcacacaagtgcttctcttaccatcaatgagaatt

SEQ ID NO: 23107 - DNA, 471 bp, Glycine max
gattcattggctgcagtgcgtaatgccacccacgctgcagctcgtattcatcaagttttcagaatgcaatcatttcagagaaaacaactgaaggaatatgatgatgacaaacttggattatctgatgaacgtgctctttcacttgtaaaaatgaatatgaaatcacacaagtctggaccacgtgatgagcctgtccatgctgctgcagtacgaatccaaaacaaattccgcagttggaagggaagaagagaatttttaatgattcgacaacgcatagtaaaaattcaggctcacgtgagaggtcaccaggtcaggaaaagctgtgggaagataatttggtccgttggaatcttggagaaggttattttacgttggcgtcgaaaaggtagtggtttgcgtggatttaaaccggaggccaattctgagggaactatgatacaagatgtatcttcaacagatgatgactatgat

SEQ ID NO: 23108 - DNA, 343 bp, Glycine max
tgtcacatgactgatattcagaaacttatgggctgtcttctatggacgggaaagcttgatcgatctccttaccatgcattactatcaccatctaactgggataagttggctgaggaacttaaaaggcagttctgcaatcttttgggacagtcgtataatagtccattgagcgtgactgtagcagcaggggtccaggttttgccaccactcctcaaatttatgaatgtcatggcagggaagaagaatgaatggcagtctatgaaccagttaccggtgccggttgagttggaccgtgagttccagttccattctatttgtgtttgacctgtctccaaggaacaag

SEQ ID NO: 23109 - DNA, 431 bp, Glycine max
tggttactgagccgaaataagagaacatggcatttgcagttagggctttatgggcagtgagaaagagttgcagaggaagtcctcgccgttattgtttcagcaaacatgcgcattcaaattcaaattcacattcaaattcaaatccccttctcttgaaattgcttcaggttccgaactcgcacattaaaacgacgctggatcaggaaatggcttcccttcaaagctcgcaacgttcttgggacttccttattacctctctctccccttcttcctccgacaaagctcgattgattttggaatggattttggagaagatgctgaaagaaaatgagaaagatcgagatctcttctctgaactcatctttctatgtggaaaagtgaaggacgtgatgctaggaatgcgtgtgtttagttttatggaggctactgga

SEQ ID NO: 23110 - DNA, 557 bp, Glycine max
catttttccactcagaatatcaacaattttattttattttattttctatgtcatttcatttcttattccaattcaactttcacctacacaagtttctattcaacgggaattggccatttgaatggcacagttattgtctccagtgtacacagagcctctcaaatcgaatttaagttccataagctcatggaggatactaccaaagactgcaactccttcgaactttgtaacacacaatggcaaacgaagagggtgtggcagggtaagagttgctgctgaggaaaaatcattttctacgagtgacactgttgcagatgactactatgcagttttgggtctgcttccagatgccactccagcgcagatcaagaaagcgtactacaattgcatgaaagcttgccacccggatttgagtgacaatgatcctgaggctacaaatttctgcacgtttatcaatgaagtatatggggtgctcagtgatcccatccagcgtatgatttatgatgaaattcatgggtattctttgacttcaatcaatccttttctagatgattcta

SEQ ID NO: 23111 - DNA, 644 bp, Glycine max
tggagatgttgttgtccttgacatctcagcaacaaccattgatcaagatgaatcaaatgttaaaagtattccttctgctgaaagtaaaggctttaattttgatacagaatatggtgaaaaagtattaccgggtttccttgatgtataattggaattcaacaaggtgaatcaaagtcttttcctcttgtatttcctgaaacatggaaccaagaaaatcttcgaggtgttcatgctcagtttactgttgaatgcaaagaacttttttacagagatttacctgagctggatgattctattgctgataagcttctccctggatgcaccacagtggagcaggtcaaagacttgttgttacagaaatgccaagaggtggagcaaacagctagagaacaagccactgataatgctatcttagatcaggtttctaagattgtacaagttgatatacctcaatccttgtttgaggaacaaggaaggcagctttatggagccaacctattagaaatacaggcaaaaatgaaactaaatgagcagcagctggcgactctgtcaagttcaaaggctgtgaacgaatttcttgagcatcagaaggaaaatataacaaatttgataaaacagagtctggcagttggcgatatatatag

SEQ ID NO: 23112 - DNA, 998 bp, Glycine max
caacaaaccaacagaaggctccccaacgtgacactaaaagcgaggccaaagctcagaaaaacaatataatacgaattagtccagctgcaaagttgctaattactcagtatggattggatgcgccgaccttgaatgcaactggtccttatggcaccctactgaaaggggatgttctttctgcaattaagtcaggaaaactgtctccaaaacctgcttcatctaaagaaaaggcatcgtcatctcaaagtcatcaacaagttgcagcttcccaagagtcaaaatctgacttaaaaaagtcagatgcttatgaagattttcctaatagtcaaattcgcaaggtgatcgccaagagattattggactcaaaacaaaatacaccacacttatatttatcatcagatgtcatactggatcctcttctttcccttcgaaagggtcttaaagagcagtatgatgttaaagcttctgtgaatgacattattgtcaaagttgtagctgctgctctcagaaatgtaccagaagcaaacgcatactggaatgttgagacgggtgaggtggttttaaatgattctattgacatatgcatagcagttgccactgagagggcttgatgactccaataataaaaaatgctgatcagaagacaatatctgctatctcctcagaggtcaaggaactagctgcaaaggcacgtgctggcaaattgaagccacatgaattccaagggggaacttttagcatttcaaacttaggcatgttgcctgtggataaatgctgtgctattataaacccccctcaggcttgcattcttgctgtacggagaggcaacaaaggtggggaaccagtaattggaactgatggaattgacaagccatcaattgccactaagttgagcttaacattgtctgctgatcatcgtgtttttgatggcaaagttggaggtgcatttctctctgcattgcaatcaaacttcagtgaattaaggcgacttctttata

SEQ ID NO: 23113 - DNA, 880 bp, Glycine max
cttatggcaccctactgaaaggggatgttctttctgcaattaagtcaggaaaattatcttcatatcctgcttcatctaaagaaaaggtatcatcatttcaaagtcatcaacaagttgcagcttcccaagagtcaaaatctgacttaaagctgtcagatgcttatgaagattttcctaatagtcaaattcgcaaggtgatcgccaagagattattggactcaaaacaaaatacaccacacttgtatttatcatcagatgtcgtactggatcctcttctttcccttcgaaaggatcttaaagagcagtatgatgttaaagtttctgtgaatgacattattgtcaaagttgtagctgctgctctcagaaatgtaccagaagcaaacgcatactggaatgttgagacgggtgaggtggttttaaatgattctattgacatatgcatagcagttgccactgagaaggtaattgatggtgtttaactgtcggtatgatagtatcattatacaaaatactcaaaccttttgtttgactatagggcttgatgactccaataataaaaaatgctgatcagaagacaatatctgctatctcctcagaggtcaaggaactagctgcaaaggcacgtgctggcaaattgaagccacatgaattccaagggggaacttttagcatttcaaacttaggaatgtttcctgtggataaattttgtgctattataaacccccctcaggcttgcattcttgctgtagggagaggcaacaaagttgtggaaccagtaattggaactgatggaattgagaagccatcaattgccactaagttgagcttaacattgtctgctgatcatcgtgtttttgatggcaaagttgaaggtgcattt

SEQ ID NO: 23114 - DNA, 517 bp, Glycine max
gcaatactatcttattttcctttttcttaatttattcttcgtcaggatttctctgttatctctcagttctccaactcccaaattcttcccagtttgcttcaattgtttgttctagggttagggttttcgatccatttccccctcaaatttcaattattaacaagtgcagagcctgattttcctcccgtcgtgctttgaggaggccatgggaggtgacgccactgccgccgctgagagtgcgaccgcggagtcgaacgccgcaaatggagtcaacatcaacattcgctgctccaatggttccaagttttccgttcagattggccttgattccaccatcagatccttcaaggacgcggttgcacgcaactgtgacatatccgcggatcaacagcgcctgatttacaagggccggattctcaaggatgatcaaaccctccaaagctatggattggaggctgatcacactgttcatttggttcgtggttttgctccatctaacactactggtggaactaat

SEQ ID NO: 23115 - DNA, 590 bp, Glycine max
ccaaagtctgtctatgtcgggggtgattttcgtcgtcatggtgagcggggtacacatgttgctattgcttttgaagtgcctggtggctggcaaaaggagaaagatgctattgctttgactgttttacagatgcttatgggaggaggtgggtcattctcagcaggggggcctggaaaagggatgcactcaaggctatatcttaatgtgctgaatgaatatcagcagattcaatctttttctgcattcaacagtatcttcaataatacaggactgtttggcatctatgcaagcactagccctgattttgtgccaaaaactgttgatatagcagccaaagaactaatagcaattgcttcccctggacaagttacacaggtacagcttgaccgagccaaaaaatccacaaagtctgcagttctaatgaatctggaatctagaatgattgcatcagaagatataggaaggcagattttgacttatggagaaaggaagcctgtggaacagttcttgaaggccgtagatgaaatcacgttgaatgatatcactaaaattgctcagaagattatttcctcacctttgaccatggcatc

SEQ ID NO: 23116 - DNA, 600 bp, Glycine max
caaaagaataccatatccacaagatatatgttattcttttggggtgagaaactgtttccgtactgactacaagcttgcagcagtacaggtagctatagggatttcgatgctatgcctctccagctatatcacccttccattatatgctcttgtaactcagatgggttcaaggatgaaaacagcagtatttgaagagcaaacaaacaaggctctgaagaaatggcacatggatgcgaagaagaagaagaagaagcatgtaggaacagtgacactaggaaagtcgagtgcacgaatcatggatggaagccccattggcaattcttcgacagtgcactcctcctctgcccccacactacaccgttgcaaaactaccggccactcagccccctccgcggctccagcgtacgaggatcaagatcaagatcatgaatatgaatccgatggtgttgagttgtctccgttggcgtcgcaaacaacaagcttcattgtaagagttgatcatggcgaccaacaacaagcagaacatagacaagatagtgagggagaaaccaacagtagtagtgaaggtgaattctcatttgtcaaacctgaccctgtgga

SEQ ID NO: 23117 - DNA, 691 bp, Glycine max
attccagtgaaaaagataagagcagctgttttgtctatgaagtcaaccaaagcatggaagctactggaagtgttactggctgcatggaaatcaaggtcatctagtggaaagtatattcttccatggatatacagcatattagtgaatcatgatctcaatcacattcctcggcaatatgtgacacgtacactcaattccttagacaagattaccaattttagaggggcaactcatcagcctttgttacaattatcaggtcgtctgcaactgctgacatcacagattgacaaggcttctcagactataagccattctgtgcatgaactccaaatgcaagaaagtgaagatgaagatgaagttgaagttgaagatgaatattatcacgaggaagatgattcttctgaaataagtactgatgatgaaagctagtttgattttttctagagattgggttccaagttgtctcttttgcggctgacgaagatatagaggaatggaagctgctgtatttcatccagccccccttgttcacaattttgttgctatatagatagatacatcctcagagagaaattttggtatcatccagatttgttaaaaaatgacgcggcccctaatttatgtaatttgagatttttattgttaagtaaaaatacgtaaatatagctcgggcatatttacatgtttgaat

SEQ ID NO: 23118 - DNA, 345 bp, Glycine max
ggagaccatggttttgggggcacatcgagaagtactacgttggtaagttgagtcaattgggcgtgagaatttggagcaacgttagggtgctgcaaatgacgagatagttgcaattcagattacaggaacagctacgacgaaagggaaaggttcttcttctttttcttcttcaactcgtacccaggaactaggatccattcacaccaccttcccccaaagagtcatcaattctaaggcaccaacaatcgtgtgggacgcacgtgacttctgcgggtttcatctcttgctcaaacataggtccctaagtggcacgtgccatatggcacttcatgtcttacatgggga

SEQ ID NO: 23119 - DNA, 295 bp, Glycine max
tgttctctgaatcttggaacatggcctcgtcccacctctatgttgaacagcaccttcacatctccttcccccttttcacactctcactctcactacaacgcttcccaaactcgcatctggaaccccaaaactagtatcttcttttcccctcgtctctgctgtgcccactaaggaacacacagtcacaacccaggaaattcaactccaagacacgccgctcaacttcgatttcaagggctacatgatcgccaaggcccacacggtaaaccaagccttggacgccgccattgcgttg

SEQ ID NO: 23120 - DNA, 302 bp, Glycine max
gccagttgggcaaggtcttcttggtgctggggcagacagaatggagcaatcatattcatgggagaattgggctcttgacaaggaaatgggggaggatgaggaggagttccttcgcgacatccttagtaaaccggctttttcttccgagagtgaaagtcaagcaccagttgtctcatgctctgccaaaagcaaaagggctccgatgacatacattttgtcttttgataactccaccataacaccagcaccttcttccccccccaccctagaggcccaacctggaaagagggctaagagagctt

SEQ ID NO: 23121 - DNA, 430 bp, Glycine max
ggagatggagttttagaacgtgcggctggtgcattggctaatttggcagctgatgacaagtgtagtacagaggttgcactagcaggaggtgtacatgctctagtgatgcttgctcgtaactgcaaatttgagggagtgcaagagcaggctgctcgggcattggctaacttagctgcccatggagatagtaacagtaacaatgccgccgttggacaagaagcaggtgcccttgaggctctcgttcaacttactcgctctccccacgagggtgtcaggcaagaggctgctggtgcactttggaatttgtcatttgacgatagaaatcgagaggccattgctgcagctggagccgttcaggccttggttgctcttgcccaagcttgtgctaatgcctcccctggacttcaagagagggctgctggtgctctgt

SEQ ID NO: 23122 - DNA, 324 bp, Glycine max
ctcgagccgtccgagttgggcagcttgttattctcagtgtacctggagaatttacaacaacggctgggaggcgtcttcgtgacgctgtgaagacagtgctaagtggtagccaaaggctttggtagcaacattcatgttgttattgcggggttgactaatacttattcacagtatgtgactacatacgaagagtaccaggtgcagagatatgagggtgcttccacgctgtacggtccacacacactgagtgctctacattcaggagtttacgaagcttgcgcgtgctctcatcagtggccagcctgtagaaccaggtcccaaccc

SEQ ID NO: 23123 - DNA, 495 bp, Glycine max
cgttagcttcaatttctttgcattttcactttaccctaaaaccctaacttaaaaaaataaagataaaaaccatccagagtgagagagaagaaaaaattaatggcgatgcttcatcccctcacaaacccaaacgcaaacgagcttctctcactctcatgctcttctatattccaccacaatgcactcacaacctccgtttctctcaaccccagaacaacaaaaattgctcctcgacgcctaagtcgtcgtttcgggtccgtgagatgctcttacgcttacgtagataacgccaaaattaaggttgtcggcatcggcggtggcggcaacaatgccgttaatcgcatgatcggaagtggtttgcaggtgtagacttctatgcgatacataccgatgctcaggcactattaaattctgctgctgagaaccctattaaaattggagaagttctgactcgtggattaggtacaggtgggaatccacttttgggggacaagc

SEQ ID NO: 23124 - DNA, 345 bp, Glycine max
atcatcactcaaacattaagaaaagcttatgcctcagccatcgtttctactcgctagagcgtaagcatgggcactcagagaagcaaacccagttgtaccatcgttgcgatctttctagcattttgttgttttgtttcttcttcgaaagcaaagcttgagagtctccaacatgcgcccaaagctgatgggtctctaagcttcttggtggttggagactggggtagaaaaggtgcttataaccaatctcttgtcgcttttcagatgggtgtaataggagagaaattggacgttgattttgtgatctcaacgggggataacttctacgacaagggattaaccgagtgt

SEQ ID NO: 23125 - DNA, 537 bp, Glycine max
ctttttcttccgagaggttccatgggatagccagcttgtcatttggtattactttgacaaaacctgcattgatgtttaaccaaaaaagccattctttcactgtttacaggtgatgcacaaggtgcacataagttgcaaacttatctgctatcaagagatcatttgaagttgaagtctgagtttcaagatggaaatggaaagaaaattgtcgattcaattgaacagctacctgctgtggaagtggttcttggtcagcatgtctttttcactgtgggggactattcccttgctggaaaatctgactgatcatattttccaagtgttcctttttgatcttttatccagtttgcatgctatctgtttgcaagattaggaatacagaatatacccaggcatgcctaattgtaacttttgagcaattgacaatcattattctttcttttttttttctgtatagaggatctcacgtcttattttaaagataaagtgtcttgatttaatccttgataatctaaagtcaattattttgtcacactc

SEQ ID NO: 23126 - DNA, 702 bp, Glycine max
atggtttctcttgtttgtctgattatcctgcctgtaatttttgttcaagggaaaccatcaaaggctgtagttgattcattggctttatttggggcaggagctatgttgggggatgcatttcttcaccaattaccacatgcttttggtggagaacactcccattctcatggtgaccatggagatcatgaccatcatgatagttctggacatgatcatgcacattctttagccgatctttccataggaatatccatccttgctggaattgtactctttcttcttgtggagaagttagtgaggtatgttgaagaaaactcaggaagagctaattcatggacacatggacaccaccaccatcaccacaatagcaaggaaaaattgaaagatgataacagttctactgccaactttcagtcagaatctaataatgcaaaagaagagagattgatagatgagagaaaagaagacgatcaagtgtcacttgactccttgaagggagataatccatctcaatctgaaagctcactcagaaagagaattggaagcaatgtgaccaaaggtgataatctcgacgataatactgtagatagtgccacatataatgtaaaatcttcaaatgttaaggaaccagttagatcaccaacaagtcttgtgtttggttatctcaatcttttctctgatggagtgcataacttcaccgat

SEQ ID NO: 23127 - DNA, 386 bp, Glycine max
accatttcatactttccgacacctaaaacttgagcatgctgagtaagtacctagctccaatttatactcatctcaaatgggtattcgattttgttctctactaccccttttacatgctttatgattctcatccacccataaatcttggaactgaattgagtacatttcattatgaattaacctctggctcagaggaacatgtggattgtgctgtgtgtctaagcaaatttggagaaagagatgaggtgattagagttatgagatgtgagcatgtcttccacaaaggttgtttggatagatggttggtttcaagaatgccacgtgtcctctttgcagaggatcagtgactccagaaaggcctatcactaactctggagctggggttg

SEQ ID NO: 23128 - DNA, 636 bp, Glycine max
attaaattagaataaactatgtcagttgatgaacttggtagtattgttaatttgttatatgtttttattgaagaaagaaaatagtagtaataggcataaatacaaaattatgtgcagagttagctggtattgtttgtttgtaaaatgtctttgtattcgtctccttaggccatagtcatagataaaaaggaagtgaagagactagaaccaaacaaaagaaaggtccattatggattactctgatgatcttctctacacctttgctttctcgaagtctcagcttgccttgtcggaattccctcctgttccggtcatcacacttctttctctggtcactccctcagattcaccctctctagctctagttcccaacaacaaactccaaggttccacactacataatacactttaacggggaaacaaaccagaaaaaagtgtcgtgtaggtaaacacattatggggcatttttcctcaatgttcaatgggttggcacggtctttttcaatgaagaaaggaagaaggaatgggaaatgtggggggaggggaaagctgctgaagcaatggcaaaggaagctaagaagaatgacatgatgttgtgtagctctggcattgttcatgtcgatggttcaaacaact

SEQ ID NO: 23129 - DNA, 335 bp, Glycine max
gccaccatgtttgtcttcaaacccacctcttctcttttctttctctttttctcctcctcagtatttcatactctgcttcttcagttacctcactcaccgtaccgccgcgagggggggccccactcgacctcaccactactccgcaacaacaaaccgatggcgatgatgattccctcacctacctctggcccctccccgcagagttcacttccggcggcgacactctctccgttgaccccgcgctcaccctctccgtcgccggaaacggcggtggctccgccattctcagagaggccttcggccgatacagagggatcgtgttcaagaacaccgct

SEQ ID NO: 23130 - DNA, 281 bp, Glycine max
cggctcgagggaaaattacgttgtttggctatagcaattacagtctactgtatttggctgtctacgaacaagctgatttttgaagattatcaattttctctaatagaggttattagcaagattaagtttcttatgtatagacaagcgcacctgttgcatttgttttagcatcttggtataggtcttcttgtattagggagacttttgattttctctagctgtggggtatgccccgtttattattgtatcattttggatttaatataattttcattttttcc

SEQ ID NO: 23131 - DNA, 410 bp, Glycine max
atgaagatgtagaagtacaggaaccattggaagagagtgttgatgcgaatcaggaagtgggtgggtttgacttatctcctcggagggataaagcaattccaaagcggaattctcagcttaaacacaaacactctgcatttcgtgcatctcataggggaaggggagttgaaatatctagtccgaaggaagtgaaggcaaccaaatcatggagcaaacatgatcctgtgcctagtgctgaagttaaaaaagttcgggaatccctaaaatcaagttctttggagttacgagcgttggttaaggatcctcttccccatgcattgcatatatctgatgttgtaagatccaaattggcaactagtgatacaaaaactgagccactgattgaaaaccaacatgaagatgtagaagta

SEQ ID NO: 23132 - DNA, 886 bp, Glycine max
aaagccactagttctatggttaaatggagggcctggttgttcttctgttggagctggagcttttgttgagcatggccctttcaaaccaagtgaaaatggtcttttgaagaatgaacatagttggaacaaagaggcaaatatgttgtacttggaatcaccagctggtgttggtttctcctactctgccaataaatctttctatgactttgtgaatgatgaaatgacagcaagggacaatcttgttttcctacagcgttggttcactaaattcccagagttaaaaaacaatgatttctttatcacaggggagagctatgcaggtcattatgtaccccaacttgcacaactcattgttcaaaccaagaccaagttcaatctcaaggggatagcaatagggaatcctcttgtcgaattcaacacggatttcaactccagagctgagtttttctggtcccatggactaatatcagattcaacttacgaaatcttcaccaaagtatgcaactattcccaaattaggagacaacatcagggtgggacgcttacccccatttgttccggagtaaataggctagtgtcaacggaagttagtaggtatattgatacatatgatgttacacttgatgtgtgcctttcatcagcagatcaacaggcttatgtgccgaatcaactgactcaactgcaagagggtgccaagatagatgtttgtgtggaagatgaaactatcgcatatttgaataggaaagatgtgcaggaagctctccatgctaagctcgtagggatcacgtcatggtcaacttgcagcgatgttcttaaatatgaaatgcagaatctagagattccaaccatttctattctaggtgcacttgctaagtcaggtatcagg

SEQ ID NO: 23133 - DNA, 585 bp, Glycine max
agggcatgaacataccaaagatgctagtcattggtggtgctgttgctcttgcttgtagtcttgataggggactggtgacaaagtatcttctatttggtgttgctagaagatttgccaatataggtaaaagatagttaaaaatagaggtggaagcagcattttcttgaatgccattcttttggacgatccacattaccctttgttgtagtcgcgttattattacctgatgaaaatttagaggctctattgtggaccaaataagttatcaattcaacaataaaccaagggaaatgagaaaaccccgggttgctggagggtagtagatgacgatttttttttcttggaccatagtagttgttggtcaagactatggaatttcaagctgtgcatggttgtataaactaagtagcaattaaaaaggaaatacaacaaatagtattttagttacttattctgccttttttctacatttttcagctactcctcttatgtaattgctttatgggtttatgaattatcaataccccacttattgtaacggcaatagtctattaatttttaaaccggtttcgatttttgaattct

SEQ ID NO: 23134 - DNA, 630 bp, Glycine max
gaggattggatgcttgattgtgcactaagacaagttgtgacaaagcttgcaccagctaggaagaagaaagtggcacttctagttgaagcctttgaaatggtattgccagcagcagcaccaaaatgtgaaaccagtgtgagaaacaacaattcttcagcatttggtcattcaggaagaattcaagcttgtagctgatggatgctgctgagtaattagatagaaggtgcaaccagcaattacgtggaagtgttatcttgcacgggaagcataaccaaacatccaaagagtaatgtgcatgcatgcccatcacagaaagtaatttggttgggcatctccacctatctgaaacatggataaactaatgagcttcaagatttaagggacttgtaatcgttatacgaagagtgtgaaactccagaaagggaatttgtggtcggtatttagctgtatgggtttaaatttgctttagaaaaatgtttagagaactttaattgtgtgtttactttggtatgtttgtatttgactcactaatatatttgtgttatgaaggttatccatgcctccggattttgttaacttgctagtttgtccattgcacaaggaaggatatataataattatggattatgt

SEQ ID NO: 23135 - DNA, 423 bp, Glycine max
cgtactttatgatcaagtgtctggggaccttaaaactgattcagcaaatggaagtattgtatttgggtgtggtgcaagacaatctggagatctaagttcttcgaatgaagaggcacttggtggaatacttggatttggaaaagctaattcatcaatgatttcacaacttgcttcctctggcaaagtgaacaagatgtttgctcattgcttaaatggagtaaatggaggtggtatatttgctattgggcatgttgtgcaacctaaagtgaacatgactccattattaccagaccagccacactacagtgtcaatatgactgcagttcaagttggccatactttccttagtctatcaacagatacatcagcacaaggagacagaaaagggacaataattgacagtggtacaaccctggcctatct

SEQ ID NO: 23136 - DNA, 796 bp, Glycine max
cggtcgcgtgggcggacgcgtgggcgcgcacggctgcaagatcacctccttcgactggtccctccgccgcaaatcctccgtcctgacgcaattcaccgccgtggactccctcctcgcgctctcgccgtcgctcgccgccgccggcgccaacgacttctccggcctccagatcctcgacctcgataaggggcgcgtcagggaaaccctaaattgggaaaacgtcaccaaatccggctccaccgtccaagccatcggatcctcgccggaaaacaggtttgtcagcttcgaatcctctcggagaaactcgaattcaataatggtctacgatttgcacaccctgacacccgttacggagatcggtcacaacgagatcttcggcgcggacatcgattcggcgattccgacgacgaaattgcaatggattgagggttacaatttgttaatggcttctgggtcccacagtgggccctccggcgtgagcgcggaacatacggttgtgggatgttcggtccggcaacgttgtttgggaggtttccgagaaggtagattgttttgctgacgtggcggtttgtgatgcgctgtcggttatttttaaggttggggtgaattcgggggaggcatcctacgtggacttgcggaatttgagtagcggcggtgagagcgcgtgggtttgtctcggagacaataaaaggaaaattttgaatgggaagaaggaagggtttggttgcaaggttgaaacgcaggggaatcaagtgttttgcaccaagggtggtgatatggagttgtggtcggaggt

SEQ ID NO: 23137 - DNA, 278 bp, Glycine max
ggagttcgcaaggttgctttaacttatctgtcttgttccttgcgttagaacttacacttgccgtgcaatattgataatacattcagttatttctagaatttctttacttatacaatttatcgttttaggtatctgagaatagttgaagagcttcaaagagtggaaatatcggattcgtctagagaagcgaagcttgcgttctttattaatctttataatatgatggccatccatgcaatcttagtattgggccatccagatggagcactggaaagaag

SEQ ID NO: 23138 - DNA, 339 bp, Glycine max
gatttttgctttgctttagtgaggatatatttgaagatggaaatcacttgtatcggtttttggatgatgacccaactgtggtatcacaatgtcacaacattactaggggcataattaccttgaagctcaagcctttagcagaaattgcatcaagattgaggtttctgtctcgtgctatgtttgaagcctatgtttatgaagatggacgtcgtattgattatacaagtatacatggaagtgaggagttcgcaaggtatctgagaatagttgaagagcttcaaagagtggaaatatcggattcgtctagagaagagaagcttgcgttctttattaatcttt

SEQ ID NO: 23139 - DNA, 305 bp, Glycine max
atacaatgaaatttgaagactatctcatggagaaaagccaacaagagcctcacaatagacaaaaccttgagatagaggttgtccaattgctagcacacttgatatgtgaagaggcgctcaatagggtcttacgttgtgcacttcatggaccagttttctctcttccactcattcccccacctcttccacctcaggttcgtgggcttcttgaagaattggcaatggttgaggaagagatcatcaagcttgataaaaaagttaaggaactggaacttagattgttccaggagagataccgatcatag

SEQ ID NO: 23140 - DNA, 654 bp, Glycine max
gttcctatataataaaaagtcttccaaagtagctttccccatccatctttctttccaacgttcacaaagaaaaagagaaaaaaaggaaggttgctattaaaatggaaagcagccataacatgaggcaaagcaccatggaaactgagtttgaggacttgctgccagtgatggcagagaagcttgatgtggagtcctttgtctctgaactgtgtggaggtttcaagcttctatcggacccggaaactggtttgatcactggtgagagtctcatgaggaattcaactctgttgggtatggatgggatgagcaaagaggaagcagagaccatggttagacagggagatcttgatggggacgggaagctcaatgaaactgagttttgcatccttatggtgaggcttagccctgggatcatggaagatgctgaggcctggcttcacaaggcacttgaacaagagctcaccaaatcctcaacttaaaattccaccctttagaaatcaattgtaagttatatatacatcaataagtgtgtgtggctgtgtacatgtgtcttgtatgtatcatgcaagttaaatatactcatttgacactccatgaatgctttctaaagggaatttgagtataataaaatgaatctgttcagtttgttcgatt

SEQ ID NO: 23141 - DNA, 312 bp, Glycine max
ttcttttgttaaaaaaaattgatttctgaataatataaagtcttcaaaagtcgctttccccttccacctttctttccaacgttcacaaaggaaggttggtattaaaatggaaagcaaccatagcatgaggcaaaacaccatggaaacagagtttgaggacttgctgccagtgatggcagaaaagctggatgtggagtcctttgtctctgaactatgtggaggtttcaagcttctatcggacccggaaactggtttgatcacgagcgagagtctaaggacaaattcagctcttctgggcatggaagggatgag

SEQ ID NO: 23142 - DNA, 328 bp, Glycine max
ctatatacaagaagtcttctaatgtcactttcttcttccacctttgtttccacgttctacaattaaaagaaacaaggattcctttctcctccaaaaacaatggaaagcaaccaatcggctaaagagatcacggtggaagtagaagagttcgaggacttgctgcccgtgatggcagagaagttggatgtggagacctttgtgtcggagttgtgtgggggtttcaagctcctggctgacccagaaacgggtttgatcactggtgagagtcttatgaggaactcagctatgttgggtatggatgggatgagcaaagaggaagcagaaacca

SEQ ID NO: 23143 - DNA, 656 bp, Glycine max
ggatgattcgaggagggaacaacaactgaaacattcaaaacacgtgtaaactgtttctattaccttgagatttgtttgtcactgaaaaactcaccttcactgtctcagggaaaaatggcttcattgaaactgccagaggttgttccttctcccacacaagacagtgaacgactcagaaaggctttccaaggatttgggacagatgagaaagcggtgatattggtattgggacacaggaatgctcaacaaaggaagaaaattggagaaacttatcagcagctttacaatgaatcgcttgtcgatcgtcttcattctgaattgtctggtgattttagaaatgctgtaattctctggacctacgatcctccagaaaggcatgcgagactagcaaaggatgcattgaaggctaagaaggggattaaacaccttcaggttctggttgaaatagcatgtgcatcaactcctaaccatttggtggctgtgaggcaggcttactgctctctctttgattgctcacttgaggaggacatcatagcctctgttgctccagccctcagaaagcttttagtgagcctagtaagctcattcaggtatgataaagtggctgtaaatttggaggtagccaaggaagaggcatcaaaactacatgaagctat

SEQ ID NO: 23144 - DNA, 384 bp, Glycine max
gtcaaatccccaatgtgtgcatggcattgaggttgttccgtcacccaatctaatgggtctcgatacggatgagcagaagagggggatggaactcaccggccgagacttgaatttcacaagccctcctgaagcaagcgatttcagttcgtggagaaaccttcctaacaccgactttgagcttgaaaggccgcctcgcccaatcaagagtgctcctaattctcatcctaaaaaactgcttaatggaactgtgctgaatctgtctaaccatagcaatggtgatgccattgatctatctcctgtaaatggcaagaagaggaacgagttatttcttaatgatgaagactattacttgtctgttaatgctccttctgatcgggttccaga

SEQ ID NO: 23145 - DNA, 314 bp, Glycine max
cgcaaagagagacacagagagagtaatgaagcgacagagcagcgccgtgtcgccgtcgtcgtcgcggcgagaaactccgccggagaagattcacgcgaagaccatcggttgcatgtccggcattctccacttcatctccaactccaattcccgtcgctctcgccgcttcctcacattcggaaagccccggattaataagaaccccgccgacgccggaaattcgaagccagccgccgatgaacggaggctgtcgtccgacgtgccgaggagtccgactttgccggcggagattcggctatcgagtgttaaggcgc

SEQ ID NO: 23146 - DNA, 640 bp, Glycine max
agacaaatctaatatcgagaagggcattgtgtgacgtggcaatcgtggattggtcgcgtaggcgtggacgctgcgacattcggtgtgcgatctcggttcgaagttgtaagcgttcaacgataaggagccgtcgtcggaactcggaagtgggtttgcgtcgttgtgaggtttaacgagacgatgagggcgctgtttctgttcttcgttctcttctctttcagctatgccaccgaacaaatcttccccgctcatatcggtagcatatttggtggtggcggtggtggccgctctcgcgaacccaaatacaagatcgaatttcatcccgaagattccccttttcaccctgatgatgatcaggaatctatagtcatgccagataaaaccggacagaaatatatgtgttacttacctaaagtggaaaaggaaaaaagtggaaagcctgttatccaacacaatattagcagcatgattgtagaaactgagaaaaggattaagcagaagacaccagatgaactgctagaagtattaaggggtccatgttttctcagacaagaaggttggtggtcatatgaactctgctatcaaaagaagttgaggcaactacatctggaggatgataaggttgtccaggagtttgtct

SEQ ID NO: 23147 - DNA, 294 bp, Glycine max
catacatgcctacgcttatgataaaagtgaaatggaggaggtttcaatggttgcactttccgggtgtatatggttgcaggcttttgtagtaacaatggagaccaattcctttactatattgcaacatatggctatatggggtaatttggctgccttttatgtcatcaactggatcttcagcgcgcttccttcatcggggatgtatacaattatgtttcggttgtgtcgacaaccgtcatattggatagcaatttttctcatggttgcagcggggatgggtccaattctagccat

SEQ ID NO: 23148 - DNA, 292 bp, Glycine max
ctcggcaagttctcccaggagaaagccatgttcagctcgagcgccaagattgtgaagcccaatggcgagaagccggacgagttcgagtctggcatctctcaggcgctgctcgagctggagatgaactcggatctgaaggcgcacttcggggacctcaacatcacggcggcaaaggaaatcgaagtcggtggtggtcggaaagccatcataatctttgtccccgttcctcagctgaaatctttccagagaatccaagtccggctagttcgtgaattggagaaaaagttcagtg

SEQ ID NO: 23149 - DNA, 287 bp, Glycine max
gacccgtcaacatgggccgcgttcgcaccaagactgtgaagaaggcggcccgggtcatcatcgagaagtactacacgcgcctgggtaatgactttcacaccaacaagcgcgtgtgcgaggagatcgccatcatccccagcaaaaaccttcggaacaagatagccggctatgtcacgcatctgatgaagcggattcagagaggtcctgtgagaggcatctccatcaagttgcaggaagaagagagggagaggagagataattatgttcctgaggtctcagccctagat

SEQ ID NO: 23150 - DNA, 417 bp, Glycine max
gacgccgcttgtgccgccgccatgtccctagtgatccccgagaagttccagcacatcctgcgagtactcaacaccaacatcgatgggcggcggaaaatagccttcgccatcactgccattaagggtgtgggccgaagatatgctcatgtggtgttgaggaaagcagacattgacctcaccaagagggcgggagaactcactgaggatgaggtggaacgtgtgatcaccattatgcagaatccacgccagtacaagatcccaagctggttcttgaacagacataaggatgtaaaggatggaaaatacagccaggtcctagccaatggtctggacaacaagctccgtgtagacctggagcgactgaagaagattcgggcccatagagcgctgcgtcacttctggggacttcgtgtccga

SEQ ID NO: 23151 - DNA, 297 bp, Glycine max
gtgttcgcggacgaccccggctacattataggcatcgtaaaggacatcattcatgaccctggccgcggcgctcccctcgcgacagtactctgtcgtgatccctatcgatgcaactagcggacagagctgttcatcgccgcagagggaatccacactggacagtttgtgtactgcggcaagacggcccagctgaatatcggctatgcgttgcccgtgggcaccatgcctgatgggactatcgtgtgatgtctggaggagaagcctgcggacaagggcaagctggcacgagcctccggg

SEQ ID NO: 23152 - DNA, 302 bp, Glycine max
tagttgtgttgactcacaaactcagagacagacaccatggtgcacctgactgatgctgagaaggctgctgttaatggcctgtggggaaaggtgaaccctgatgatgttggtggcgaggccctgggcaggctgctggttgtctacccttggacccagaggtactttgatagctttggggacctgtcctctgcctctgctatcatgggtaaccctaaggtgaaggcccatggcaagaaggtgataaacgccttcaatgatggcctgaaacacttggacaacctcaagggcacctttgctcatct

SEQ ID NO: 23153 - DNA, 367 bp, Glycine max
ctaggacaaaagttatcacagtgcatacgtgacaatctaccctcaaaactctcagcatcaatcaaacagtcacaagaaaaggccatgaaacactatgatgctaatgccacaaaatggtggcagtcgtggtgatgtccatgttgaggataaccaaaacatgtcctttccgtcgtgggagggaacctttatgaggtgcttcagtgaaatagatgaaaagcttgctaagaacatcgacactgatggatttcccggcggtagcactgctgtatctgtaatcaaacacagaggatgacaagccatgcatatcaggacaatacacaggacgatctcagtttcctagattgtaatatatgtccctagcagtatc

SEQ ID NO: 23154 - DNA, 392 bp, Glycine max
gggagaggagtcgccgccatgtccgcgcatctgcaatggatggtcgttcggaactgctccagtttcttgatcaagaggaataagcagacgtacagcacggagcccaataatctgaaggcccgaaactccttccgctacaacgggctaattcaccgcaagacggtcggagtggagcctgcggctgatggcaaaggggtcgtggtggttatgaaacgcagatccggtcagcgaaaacctgccacttcctacgtgaggacgaccatcaacaagaatgctcgggctaccctcagcagcatcaggcacatgatccgaaaaaacaagtaccgcgctgatctgcgtatggcggccatccgcagagccagtgccatccttcgaagccagaagcctgtggt

SEQ ID NO: 23155 - DNA, 275 bp, Glycine max
ctggagacgacgttcagaaatggcacctcgcaaggggaaggagaagaaggaagaacaggtcatcagccttggacctcaggtggctgaaggagagaatgtatttggtgtctgccacatctttgcatccttcaatgatacctttgtccatgttactgatctttctggcaaggaaaccatctgccgagtaactggtggaatgaaggtgaaggctgaccgagatgagtcctctccgtatgcagccatgttggctgcccaggatgtagcacagaggtgca

SEQ ID NO: 23156 - DNA, 289 bp, Glycine max
gcgagctgagcagttgccatggtcctgggatctgctgcactattcgtcttagagcctgtgtgtcactgagctgaccctccatgctgctgacacctgcccagaggtgaaggccctggatctggagggctccaacaaactcaccatccttcaaggctgccctggcttgcctggagccctggggcccaagggagaggctggtgccaaaggagatagaggagagagtggccttcctggacaccctggaaaggcggggccaactggacccaaaggagaccgaggagagaaggga

SEQ ID NO: 23157 - DNA, 483 bp, Glycine max
aagaagtagccttgtagaagatatggtttgtgataagggttttgcgcttgtgtgattctattgattacagacttctgactattcctttttctaaatgtatattcttttgatacagtcagcagagttgcagatatatactgacttcttgaggcttgtactagaaattataaatgcaattctgacttatgtactgcctcaaaatcctgaggtggtgtatgcaataatgcacaagcaggaagtctttcagcctttcaagaatcacccccgtttcgatgagcttgttgaaaacatctacactgtgttagatttttttaatagtcgcatggatgcccaaagaatgaatggtgattggtctgtcaatttagtgctccaagtgataattatgaactgtcggtcttggcatgctgatgggatgaagatgtttactcaacttcatttcacatatgaacaagagagtcacccagaggagttttttatcccata

SEQ ID NO: 23158 - DNA, 466 bp, Glycine max
gatctttgtcactgggactccaattcactccatcccaaggcctggtcctcataccgcctgccttcagaggatcagattgaggggctcctgtctctctaaccagcccagcccagggaaaagagaggacttattcttggctgcagttcctaggcccttcctctaagaaacaaggcagactcaggaagcaatcatggtgctctctgcagatgacaaaaccaacatcaagaactgctgggggaagattggtggccatggtggtgaatatggcgaggaggccctacagaggatgttcgctgccttccccaccaccaagacctacttctctcacattgatgtaagccccggctctgcccaggtcaaggctcacggcaagaaggttgctgatgccttggccaaagctgcagaccacgtcgaagacctgcctggtgccctgtccactctgagcgacctgcatgcccacaaactg

SEQ ID NO: 23159 - DNA, 289 bp, Glycine max
aacagactctggccctcaggctgtcctggactccaggactggagtcttgagagctccatgggctgcctgctgtcctctaaccagagtgctgctggctggggctccttgggacaacatgcctcttgttcctctatagtgagcctctaagaggagtgccattaaagcagttctagctggtgagaaggtgggccctgttcttgcctcgagaggatgtcgggtgttaccgcgtagggacagccaccctctggggaaagttgggacaaacacagccgcagtgggtgcctctcag

SEQ ID NO: 23160 - DNA, 371 bp, Glycine max
gccatcaggtgagccaagatgggtgcatacaaatacatccaggagctgtggaggaagaagcagtccgacgtgatgcgcttccttctaagggtccgctgctggcagtaccgccagctctctgcgctgcacagggctccccgccccacccggcctgataaggcgcgaaggctgggatacaaggctaagcaaggctatgtcatttacaggatccgtgtccgccgcggtggtcgcaagcgcccagttcctaagggtgcaacctacggcaagcctgtccaccacggtgcttaaccgctgaagtttgcccgaagccttcagtctgttgctgaggagagagctgggcgccattgtggagctttgagagtcctgaattc

SEQ ID NO: 23161 - DNA, 313 bp, Glycine max
acgccatcttccttgagactcctgcgccatgagagcgaagtggcggaagaagagaatgcgcaggctcgaagcgcaagagaagaaagatgaggcagaggtccaagtaaaccatcttgtgcacccacgaagcctgcgggagcagaagtaagggatgctgaagcccggaacaagtggttggactgtatgctgctgtcggtaataagtctcagtagacccggaatgtcacctcgccgagatcagctgggaaaatgactaccttcctcacaaccagaacagtcccgctggccctctgccctggacctttggcattctg

SEQ ID NO: 23162 - DNA, 719 bp, Glycine max
ataggctttccgttccggttcaaaaatcgccaaggcatttgacgccgcagcaacgaaaacacgaaaataactgcacagcataagcttgtagaattgtactgcatcgaaagccccatgttgatcgtgttcatttgcatcttccttttcttcatctttctttacaagttcctcatcgcttatggcgatttcactttgatgtctaagaagcaacctaagcgccaagagattgaagataaggttgtttggattactggtgctagccgtggaattggggagattctggctaaacagtttgcaagtttaggggccaagcttattatctctgcaaggaatgaagctgagctaaaccgagtaaggacacagctgaaaggtaagcatgcacctgatgacgtcaagatcttaccattggatttatcatctggagaggattctcttaggatagctgttgagaaagcagaatccttttttccggattctggtgttgattacatggtccataatgcagcttttgagcgtcctaaaacatcaattttagatgtaactgaggaaggtcttaaggctacctttgatgtcaatgttctggggacaataactctcacaaagctcttggcacctttcatgttgaagagggggcatggtcattttgtggtgatgagtagtgcagcatgaaagactcctgccccaggtcaggctgtatactctgcttctaaatatgcgct

SEQ ID NO: 23163 - DNA, 387 bp, Glycine max
tgctgaccggaccggcacgatggctcgctcggtgaccgtgatctttctggtgcttgtctctctggccgtcgtgcttgccattcagaaaactccccaaattcaagtgtactctcgccatccaccggagaatgggaagcccaacttcctcaactgctacgtgtctcagttccacccacctcagatagaaattgagctactgaagaatggaaagaagataccaaatatcgagatgtcagatctgtccttcagcaaggactggtctttctacatcctggctcacactgaattcacacccaccgagaccgatgtatatgcttgcagagttaaacacgtcactctgaaggagcccaaaaccgtcacctgggaccgagacatgtaatcaagctc

SEQ ID NO: 23164 - DNA, 736 bp, Glycine max
ggcctcaattcaaagagtttattattgttattcaaccggagcttgcattcctatacggacccctccactgagtttttggcttgtgtttatgtcaactatgtctttgatggggcacaaaggaagatgagggaatgtgaagaagtcattctcaatgatcccttccttggcaaaagagttgaagaaagcaacttttcaactgtaccgctaagggatgagttccttgaaaatgctaggctatttatcttcgagacatactgtagaatacaccaacgcattgacatgggagtgcttgctgagaagttaaatttgaattatgaggaggctgagagatggattgttaatctcatccggagctcaaagcttgatgccaaaattgactccgaaactggagcagttatcatggaacctaatcatctaaatgtgtatgagcaactgatagaccataccaaggcccttaacggacgcacttacaagttggttagtcaacttctggaacatgcacaagctcaaacaacccgatgattgtgtaggtagatcaatgagagtatttgttttatctatccggatgcatcaaattgtttttggctatgatgtttattttggatttagaattacattcaaatttatggcctgtatacctcttggagtagtaggggttctcctgtgttacttgtggatccaaacaagtagtattgataacgattttgcttaaaatgttcgccataagcttcctctc

SEQ ID NO: 23165 - DNA, 268 bp, Glycine max
aattaagatgacttaagtttcatcttaaatttttttcattccctgtagttaattctgcatgtactagtcttagaagtaaacacaagctaaaacaacttgacaggaattccccaagtggcttgttttccaaagtactgagaacaaaaccctaagttcccctaggtcttgtaactcagcaaggcttgtgaatgtgaaaataacagtgcccaatcacattctgctttaaaaaggtaaatacagatgagataaaaaaaaaaaaaaaagaaaa

SEQ ID NO: 23166 - DNA, 272 bp, Glycine max
attcatttgatactgtgacatgttcccttgattatactttgttaaagtagacctgtccatcatggatctggctgccagcagccatgctgcagaccattgatgacagtccctgcttgttgagtctctgctctcagactagagcaatcacaggacactggtgtgtggaagtgccctgtcacatcatttcaaggttgcaatcccaaaatgtctttatataatttgatttcactgtatggtaaagttttgataagatttggccagtttttacagaa

SEQ ID NO: 23167 - DNA, 284 bp, Glycine max
gctttttaaattaatcgtgtttttacttaattagatactcttctatagcaatgatttccaactctggcttacataagaattgctggggaagtttgaagggggaaataaaagccccgaggtgcagtccaggctttgatagtttttaaaattcaccagtgttgagaaagaagtgagtttagaaataggcatcctaaataatgacatcactgatttcagtggccacaattactctgctgtgctcttttggatactgcagctgccttatagagacttagtgagttttg

SEQ ID NO: 23168 - DNA, 293 bp, Glycine max
cgttctcttcaacgaggcggccgagcggcagaacgccaacatgcagatcttcgtgaagaccctgacgggcaaagaccatcactcttgaggtcgagcccagtgacaccatcgagaatgtcaaggccaagatccaagacaaggaaggcatcccccctgaccagcagagactgatctttgctggcaaacagctggaggatggccgcaccctgtccgactacaacatccagaaagagtccaccttgcacctggtgctgcgtcttcgcggtggcatcatcgagccgtcccttcgtcag

SEQ ID NO: 23169 - DNA, 1631 bp, Glycine max
gcctcgatgtgaaattcctgaacaaccacagcctggtaaaggacgcccaggagaaggccaacgccgccctgctggattacaccttgtgtcactacccacactgcggggacaaattccagcagttgctattgtgcctggtggaggtgcgggcactgagcatgcaggccaaggagtatctgtaccataagcatttgggcaacgagatgccccgcaacaaccttctcattgagatgctgcaggccaagcagacttgagcctgggtgccaggcagcgggcagtaggcagggatgccactgcctccaaaagactccttgcattaggtgatccaggagccctgtccctaagcccctgcccctgagctccagagctgtgtgtttgggatgatgggcaaggatgggcggggactgcccgggacaggttgccttcgctagccactggcatgtgtctgccacttggagtgccccagaggggtgacttctaaccactccttcctccgtctgcccccagctttttttcctggtatctgaggtcccaggaggaggcttgggattccttggtgggcctgaatgtctgttgggtcagaggtcatcctttccctctctcctgtgatcagaggcagaggaaggtctgtaggcatcaatgaaggcaggggagggggggtctccagactcccctgaagcagggaaggaagtccatattgcaaactgagtttgctaaattgggtctctagaggacaccatgagagcggatagggcaaaaagaccccctccagccccccccccatctaattctgatccactccctggaaagggactttgttgtgatcatccttttcctgcatcccagctacccaaggaggaggaggagtctggccctgccctccaccagctggctgggctggtacttatctgcaaggttgcagtcaccaggattctcttccttttacctagacagtccttggaaagtgtgtgagagagaaatgggcaggagacagactgaggactgaactgggatgtggggattagcaccaaagctctttctcctgacatctccttcctgatcatctggtcatcttcatgtatcttgcctcactcctgagaagagctgttgcttgccctctgtcccagccccactataggagcaacgggaggcctgcaagggcttagagtcctttcaggtggggatatgggtaaacctaggagaactcacggatctttatatgacgacagtgctgaggactctctcatggctctatccttttgggtcccttgtcacaacccttgaagctggcctcagtcccctggctgctgctttgcctcccaaaagtcactcttcagggccaagcactgaggggagaggcctaagctatcctctgtttcagactgggcatccactgtctttcctgctttcgtgtcagatttacagcttacgctaggcctgcccaactggacaaggctgtctcctgtcttcaaccaccctggctcagaccccacctctgcccctgaaatgcgtgatcccaccaaggccagagacccacagccccaagacaagaagtgcccttataaacccctgcagccctgaaataaattttgcaattagtttccagtaaatagtgggaggagtggggggaa

SEQ ID NO: 23170 - DNA, 343 bp, Glycine max
tgcgagaatgaagactattctcagcaatcagactgtcgacattccagaaaatgtcgacattactctgaagggacgcacagtcatcgtgaagggccccagaggaaccctgcggagggacttcaatcacatcaatgtagaactcagccttcttggaaagaaaaaaaagaggctccgggttgacaaatggtggggtaacagaaaggaactggctaccgttcggactatttgtagtcatgtacagaacatgatcaagggtgtgacactgggcttccgttacaagatgacgtctgtgtatgctcacttccccatcaacgttggtatccacgagaatgggtctcgtgtt

SEQ ID NO: 23171 - DNA, 721 bp, Glycine max
caaagagcaaccaccacaccacacagcacttcccttctcctcctccaccatgtcattgccaccgccgtcgctggtaacggcggcgactccgacggagcttccgatccggcagattccgggaagctacgggttcccgttgctgggccccatctcggatcggcttgactacttctggttccagaagccagagagcttcttcagaaagcgagtggagaaatacaagagcaccgtgttccgcaccaatgttcctccctccttccccttcttcgttaacgttaatcccaacgtaatcgcggttctcgacgtgaaatcattctcccacctcttcgacatggacctcgtcgacaagaaggatgttctcgtcggagactttgtccccagcgtcgccttcaccggaaacatgagagtcggcgtttaccaggacactaccgaacctcaacattccaaggtgaagaactacatcatggatattctgaaaagaagctcaggcatatgggtatcagaactagaatcaaacctagacacactgtgggacaacatcgaagcatcactctcgaaatcctcatcagtttcgtaccttttcccgttacaacagtttctcttcacgttcctctgcaaagtccttgccggtgcagaccctgcacgtgaccctaaaatcgcagagtcaggctattccatgcttaatagttggctcgctcttcagctgctccccacagtcagc

SEQ ID NO: 23172 - DNA, 415 bp, Glycine max
gtcttacgtttcaatttaaacgccgctgactcgcctccagtttctttcccatttattttcccgggaaagtttctgtttggctgcccagaaaatctgtgctccactcagaaacattcacaaaacgggttttcgaggcgagcgagtgggtccgcatcggagtcccaaaacacacacacttctgccaatttatgagcacgagatcccgtaattcgatacaggagtaggggtttcgtgtatgtatgtatgtatggatcctgctctcaagctctgcgtcttgttactcattcttctcggattagtgaatggttcttttgcggaaaatgattatggacgctgcgaaagcgttgttaagagttgggcgcgttcttcgctcgatgaggaaatgacaaaagatgataagcacacattaagagat

SEQ ID NO: 23173 - DNA, 310 bp, Glycine max
agcagcgcggaggccgcacgatgcctggagttactgtaaaagacgtgaaccagcaggagttcgtcagagctctggcagccttcctcaaaaagtccgggaagctgaaagtccccgaatgggtggataccgtcaagctggccaagcacaaagagcttgctccctacgatgagaactggttctacacgcgagctgcttccacagcgcggcacctgtacctccggggtggcgctggggttggctccatgaccaagatctacggaggacggcagagaaacggtgtcaggcccagccacttcagcagaggctctaa

SEQ ID NO: 23174 - DNA, 379 bp, Glycine max
tgggattgttttagccaggtgcctagctgcggccttctcccaacatatcaaagagaaggatgaagaggcccaattcaaaaggattgagggaagcttgaagaaatatgcaaaggagagaagatggagaagcattgatgtcattgctacagcttatatggtgggttctattcagcaggctgagtccaaattggttacctttttgagggacaacattttggctgcattcttagctagtcaattgttcaagaagtcgggttatgattgtggaaaactaaacaatagtaactcttagtgacccagttatcttgtaagatgctcggtccgtctgtgttgtgttgcctttcatttggccattttaatgaatttctagtccttgtta

SEQ ID NO: 23175 - DNA, 416 bp, Glycine max
caaaatttgagcttctattggagagaaacaaacaccaaataaaaatagcaatcatggcaaataagtaccatgttcgttctattagtttgccttctagatctcatcctagcaccattagagttgaggaggagcttagcaagatcaaaacttgggaaggaacattcacatccacatcagggtccattcacacaggcatatccttgattgaagatttgtacatttgcttggatgatcttctcaacatggcatctacccaaaaggtgatttctcaccatagaggtgacaaatgtgtggaagaagtgttggatggttcggtgagaattttggatatatgtggcatcacaagggacaccatgttgcaaattaaggaaaatgtccaagcccttcactcttctctaagaagaagagagggagac

SEQ ID NO: 23176 - DNA, 369 bp, Glycine max
attcacttagcagctcattcgaaacaacgcataaagctctccccccaaaaatttctaatcccatccgacgacactgctcatcgccctcatttcatctctctctgtctcgccggggacagccaccaagaaaggcaatttacaggaaggttatacgacatggtcaatgccactaaaggggtctttatttcctgtgacatacctatggcacaatatatcatcaacatgaatgcttcattgcctgcatctgacaagttcattatacatatcttggataatacccatatgtttgttcaacctcatgttgagcaaatgatacgaagtcaaattgcgcagtttagagaggacaatacatatgtcaagcctaattga

SEQ ID NO: 23177 - DNA, 952 bp, Glycine max
gcttccgttttgtcaacggaattaactcattcttctcttcctctaccatccaccactcactcactttcttcaacatttatgttcataccactctgaaaaccaaaaccgggtcacttccaagttcttctcctttcctctgttctcagtttggtccaactccatcaaatttttcttcacccaaatggatcaaggaagagattctgcacttacccagatgaggaaatccgttgagaagcttggttcttctgcagaggggtatggggaccctacgttgatgaggtttttgatagctcgatcgatggaggtggataaagcagcaaagatgtttctgcagtggaagaagtggaggtctgccatggtgccaaatggattcatttcagaatctgaaattccggatgaattggaagcaaggaagatcttcttgcaggggttgtctcaggataaattccctgtcatgattgttcaaaccaacagacattttgcttccaaggatcagattcaattcaagaaatttgttgtatatctactggacaagacaattgcaagtgctttcaaaggaagggagataggaactgaaaaggtgattggaattattgatctgcagaatatttcatataaaaatattgatgcacgtgggttaatcacaggttttcaatttttacagattgtaattgtatccaatgaggatgagacaagggagtttgtaagagaggttggtaagaagttcttccagaaatgtatgggtggaaaagttaggcttgaagctatccaagatgttgaattgccacccctagaaaacggaacaacaaactgattaatatgattgcgcatacagtcattgaggagtcttgtagggggcatctgatgcttaaagtctaaccctgtcatctattagaacttcctttcccagaaacatgtttaataaaagctaatcttgtcaaaataataaaaa

SEQ ID NO: 23178 - DNA, 618 bp, Glycine max
  unsure (1)..(618): unsure at all n locations
ctggacaagacaattgcaagtgatttcaaaggaagggagataggaactgaaaagttgatttgacttattgatctgcagaatatttcatataaaaatattgatgcacgtgggttaatcacaggttttcaatttttacaggcttactacccagaacgtttagcaaaatgctatatgttacacatgccatggttttttgtgagtgtttggaaactagtttctcgcttcctaaagaaggctacattagaaaagattgtaattgtatccaatgaggatgagacaagggagtttgtaagaaaggttggtgaaaaagttctcccaaaaatgtatggtggaagagctaagcttgaagctatccaagatgttgaattgccccccctagaaaacggaacaacaaactgattaatatgattgcgcatacagtcattgaggagtcttgtagggggcatctgatgcttaaagtctaaccctgtcatctattagaacttcctttcccagaaacatgtttaataaaagctgatcttgtcaaaataataatttcccaattcccctcttatcccttccnnnnnnnnnnnnnnnnnnnnnnnnnnnnnnnnnnnnnnnnnnnnnnnnnnnnnnnnn

SEQ ID NO: 23179 - DNA, 266 bp, Glycine max
tggagagagaaagagtgtgtttgtgttgacgagagagcttcacaaataaactcacaaaaccatatgatttttcttcttctgggtctttgagaccatgaagtagtagttgtagtagattatacccttttgagttttttttttcttctctttttttttttctccaaaatccttatttcccccgaaatctagactagctaagatctcttgtggggtatttgagatttctttttttttccaagtgttttgaagaggtgattctagtttgg

SEQ ID NO: 23180 - DNA, 880 bp, Glycine max
gttgtgtggactttagccatccacagatgcaaaggcaatgcagaggcagacaaagcaagagggtgcttcttcactttctctctccaacaactttcactcccaagctccatggccgcaaaccttttacccctttcaatttcatgctcctctaaaacccacattctctgtcttccctcccctcccaaacccctctttctctgccgccactctctgctccgttaccgttccactccgcgactcacatgtaaggcagcccaagtttcggtcgccgaagagtcgtcggcgtccggcgacaactgggttccggtggtgcctctgtctgctctgccgaagggggagcggcgcgtgatcattcaggacggcgagaccatactgctgctttggtacaaagaccaagttttcgctattgagaataggtcccctgctgaaggcgcctatactgaaggcttgctcaatgccaagctcacccaggatgggtgcatagtttgcccatcaactgatagcacatttgatctgcgaacgggagatatcaaggaatggtatccaaaaaatcctgttctgagagttctcacgcccgctttgaggaaactctttatctatcctgtgaaaacagatgaacagaatatttatatcagcataagaggaggtgtgagatctgatgcttctgctgaaattgtctttagtgggaaggctcaacctggctttacagcaactgatgtcaatgttgatgaggttaaaatgatcgttgatgaggatcaagagggatttggttttactgggaagaacgaaataataaacgggagagcagctgttattggtttcctcctgttgttggattctgagcttttaacaggtaagggtcttttaaaggggacaggct

SEQ ID NO: 23181 - DNA, 491 bp, Glycine max
atgtatatgagtggaaaaccaatgcactatcctgagttgcaaaaccctgacatgcatcatgagaccacttataatctttataatccagcagcaggatatgagcctggtcaggatgggcagcagctacattctgcaaacaatgaagcagttaggctagagaatgatgcagtttctttacaaggagtacatatgaaaggggatggaattaatggaggagacttgcaatattttggtaaagatgcatttcaaaatgagcttgatagacctatggatcactccttctttggatcaccccttagcatgtcattagattttggagcactcggcagtccgttccatttagatgatttcgtgtgtgaggatgaaatgatacagtactttggagcataaattattgaaactgctagctcagcagagatcgttagtgctatttttattattattctctccaataatgctgtgaatcataatatgtgtatttatccatgact

SEQ ID NO: 23182 - DNA, 889 bp, Glycine max
gttttactacgacggccaaggcttcatgtctgtgcatatttctcaaactcagcttcgcactgcttcgtgtcacctctccatccttcgaagaatcattcaccaaaatctacacggcacctagcttgcagaagaagtggtacaacgttttgggaaatcatgactacaggggaaatgccaaggcacaaataagccatgtccttagatacagagacaatagatgggtgtgcttcagatcatataccctcaattcagaaaatgtagacttcttttttgtagacacaactccttttggtgataaatacttcattgagggtaaaggccataactacgattggagaggcatactacccaggaagcgttatatttctaaccttctcaaggacgtggatttggcactaagacaatcaacagcaacctggaaggtagtgattggccatcatacaatcaaaagcattgggcatcatggagacacccaagaacttttaatacattttctcccacttcttaaggcaaataatgttgatttgtacataaacggacacgatcactgcttggaacatataagtagccttgacagttcagttcaatttttgacaagtggtggtggatcgaaggcatggagaggtgacacgaaacagagcgaaggagatgagatgaagttttactacgacggccaaggcttcatgtctgtgcatatttctcaaactcagcttcgaatttctttctttgatgtcttcggcaatgccatccacaaatggaacacctgcaagtttgactcctgtgacatgtaataagtttactagttaaacaatataaaaacatatgttcacatctcattggctgaatattaaattaaaaataaagccttgaaataaattaaagtttttag

SEQ ID NO: 23183 - DNA, 293 bp, Glycine max
ctatttgtgtattttattatagatgttattcatatgaatatttcctgagaaaaaaaaaattatgtaattggttgattggaagtgtttgtaggttaatttcatagactgaagtttttggctttttaatttcatagactggttaatgaatttaatcaatttattaatctggattttgatgttttgtcaaatggattgagtatacaatctgttgaatataaacggtgctgttgattttggaagtcaatgggtgtggttttattttacgtggattggatcacttgtgatctgtgagg

SEQ ID NO: 23184 - DNA, 826 bp, Glycine max
actcgagccgaatcggctcgagggaaagcctgttatccaacacaaacttagcaacatgattacggaaactgagaaaaggattaagcagaagacaccagatgaactgctattagtattaaggggtccatgttttctcagacaagaaggttggtggtcatatgaactttgctatcaaaagaagttgaggcaactacatctggaggatgataaggttgtccaggagtttgtcttgggagtgtatgatccggaggctacagctgcatttaacgaaaatctgtccgacatttctacattgaaggatccccggtcaaaagatgcatctcaaaggtatcatgctcatcaatatactaatggcaccgtatgtgatcttacaaataagccacgagagaccgaggtgaggtttgtatgctctgaaccgagagcaatgattagttcaatcacagagatttccacttgcaagtatgcacttacagtgcaatgtccgcagctatgcaagcacccattatttcaagaggagagaccagtatggcataccatcgactgtaatgtgcttccaaaagatcacgtggatgccaaagtgagacgacaaaacgaaaatacggagattgttatagtgaaagacttcgaaaatagtgacttagagtcagaacaatgatgtaaatatacataatgagaatagctaaagttgccatcatgtaatttctacggtgaaagaaaacatgtatcttctactaatcctctttcctgacagtgctaagccacagtgctttttaactttagaaagatcagatttatataattcatcttgaagaagtccttgaagctc

SEQ ID NO: 23185 - DNA, 366 bp, Glycine max
tgtaatgaattctcttgagcacctcgacctctcatataatatattcaagggtgaggatttgaaatccttggcgaatatatgcaccttacattctttatacatgccagcacaccatttgactgaagaccttccatcaatccttcataatttgtctagtggttgtgttagacactcattacaagatttggttttgtcatttaatcaaatcactggctctttacctgacctttcagtattctcatctctaaaaatattggttctcgatatgaatcaattaagtggaaacatacctgaaggaatccgcttaccaattcatttggaatctctgtcaatccaatcaaacactttagaaggtggaattccctc

SEQ ID NO: 23186 - DNA, 286 bp, Glycine max
accattttctctcctttttcatttctcacagccaaggttgttgtactacttgtattgttgtatctgagacactctcaatgtgttcctgaagggagccatgagatctttagcatttcttctgattttccatctccgtgtatctcccaccattgtcaaatctctctctctcccccaccctccatccaatggtactttggacccgaaacaagcaatggccctagaatccctcaacatccccacctcaaaggacccctgcgcccaaccctccttccacaatgccaccctc

SEQ ID NO: 23187 - DNA, 436 bp, Glycine max
gtaaagtcaggcacaggcatttggtggctcttttagggtattgcattaacggcaacgaaagacttttggtgtactagtatatgcctcaagggacattaacgcaacacctgtttgattggggtgaaaatggttgtgctcctttgacttggaaacaaagggtagcaatagctttggatgtagctcggggagtggaatacttgcacagcttggctcagcaaagcttcattcacagggacttaaagccctcgaacatattgctgggtgatgacatgagagccaaggttgcagattttggtttggttaaaaatgcgccagatgggaagtattctgttgagacacgcttggctggaacatttggatatcttgcaccggaatatgcagctaccggaagagtgacgaccaaagtagacgtgtacgcatttggagtagttttgat

SEQ ID NO: 23188 - DNA, 338 bp, Glycine max
gggttttaagagagagagagaataattagtaggcgcttgccttcacctatggtgtccaagatattgctagagagaagaactagttgttcaattagcttcatccatctttctacctccttaattctctttcccttcttcttcttccacccttcttgtgtttgagtacagaagcttgagatcagacatgtcgagctgcagcatcgatgttgcgcctgagcaactctgctacatcccctgcaacttttgcaatattgttcttgcggtgagtgttccatgcagtagcctgtttgacattgtgaccgttcgatgtgggcactgcaccaatctatggtccgtga

SEQ ID NO: 23189 - DNA, 319 bp, Glycine max
tgttattgctagacagaagagttgaaaacaaaagaaaagcctaacctcaatctcttgttctagttcttaatcctgttgttctaatatggaggaagaaagcacttcagcggaatccaatccttcttcgagcgaccgcatcaaactaaacgtgggcggaaagctcttcgagacgacgttctccacgctccgttctggcggcccggactcgctcctcttcgcgctctcgaaccgccgatccgccgacccgagccccgtcttcatcgaccgcgacccggagatcttctccgtcctcctctccctcctccgcacctcccacctt

SEQ ID NO: 23190 - DNA, 331 bp, Glycine max
tgagaaccttcacatccataaaaggcatatatggtatcacagaaggaaccgagagggaagcaaaactaaaattggtctcagtcacatatgtgctttaccaattctttctcccattccttttgcttcaattctttgtgcctactactaaggctcggggtatagctcggttggattgaggaggatgcaagagttgttgtaaatcccttaatattcattttcgatttccacgaataaaatatactatttgtgcccacttcttgttccatctcgtcacattcatccaacctattttccaattcaagatgactcaacaaccagactttagttggat

SEQ ID NO: 23191 - DNA, 377 bp, Glycine max
ctcgagccgtttggcgttggaatgaatgagaaatcgtagcaaacactgtttgttagatagctttggtagaacaagttttgtagttgctggaactggggtatccgagactttcataggattgaaggcaattgtttttcatgatttgtcagtgttttcaatttaatggttctctgaaggattaatatttgaggaataggaagtcaagaaggaaaggaataagctccacaggcaggttttaagaacacaagagtttagtcatgtctgggacattattatgggttgtttcctcccctggtttagaggtttcccattccagtgggttacttgattctattcggagtgtgaagttcttagattcctcaaaggccatgtctcga

SEQ ID NO: 23192 - DNA, 379 bp, Glycine max
ccacggacctcaatcacggcgtggtgaatgctgatgataatagattctcctgaacttgaagtacattgttgtcgtgctgctgatccaacgtttgcagaggtttctgttgtgttcacagttcacacacaaatggaactgaaactacttctaataacggttttaatgatggtgtcactttctgcaactgcagcagctgattacattcgacctcagcctcgaaaaaccttccatctcccatggcattctaaaccctcctcttaccctcaacaggtacacatttctttagcaggagaacagcacatgagagttacctggattactgatgataactctgcaccttcaattgtagaatatggaacatcaccagggcgatatgact

SEQ ID NO: 23193 - DNA, 339 bp, Glycine max
  unsure (1)..(339): unsure at all n locations
ctggtaagccnacagagtacagacatcatttaggaagcagaatcagatatttgaaggttagaacgaaaaagaatcatcgatggcagagacgaaagaaggttcaggttcggagatgtctctgaaggatcagggcaacgagtttttcaagtcaggaaagtatctcaaagctgctgcactctacactcaagccatcaagctagacccttctaaccctaccctctatagtaatcgtgctgcagcactactgcaattggataagcttaataaagctctagatgatgcagagatgacaatcaaattaaaaccccaatgggaaaagggatatttcaggaagggaag

SEQ ID NO: 23194 - DNA, 735 bp, Glycine max
cttggtctttctagaaatttagatcatccttcgtcaccagggttatggactagaaatttagaccgtacttcttcacctttgttatggactagaaatttagactgtccttcttcgccagggttatggactagaaatttagaccgtccctcttcgccggggttatggactagaaatttagatcgtccttcttcaccggggttatgggcgccgccaacagtggctgggataaattccagaggcattaatgattttagtttgggattgacatctcgaaaaggcggcttagaacttgtgagtggaagtaaatctgctatcgtgactaatacgacagtcgaaattgtggttcctgatgatactattgactgtgtatacggggaaaatggtcgcaatttggttcgtctgagacagatatcgggtgccaaggttgttatccatgaacctcgtcccggaacaagtgacaggattattgtcatatccggtacaccagatgaaacccaagcagcgcagagccttctccaagcatttattcttagtggctcatgacatatcccctctctccaatggccccattatttagttttgttcgcttcctttttctctccacctgaaatcatgtaatatccagccttgtattattcccaaacagtcatccgtggttagtggcgtaagtgtagttatttaaaatcaataacttgattcattagtgcataacaaagtatcgttaagcctttcatt

SEQ ID NO: 23195 - DNA, 572 bp, Glycine max
ctctgttctaacgcggggtgcgggaggcccgagacgaggaagcacgagtttcgaaggtgttctgtgtgcggcgaggtgaattattgctcacgcgcgtgccaagcgcttgattggaagttccggcacaaagcggagtgcgcccccgtggagcgatggctcgacgaggacggcgaagatgtcggtaacgacgacggtgacggagaggtcgaggttgttatggtagatagttagacaatttttacaacagtaacggcaacggaagtcgctttggacggaaaatgaatctatttttggcgaagagaaattacttgtcgtgatttattcgccgtctcaaaaaggtagagagaatatggcttcctttcgttttttccttgtatagtttgaaaattctcccgaaaaaaaaaaaagacgaggggagattatttttcttttttttttttgttgcaatttcggagtttaacgttaactagaaattagaaattcaatgctaagaggttactagttactaatttttgttattaatttaatcgatttgaacgtaattagtagctttgaaaaaaaaaaaaaaaaaa

SEQ ID NO: 23196 - DNA, 469 bp, Glycine max
gcacgagtttcgaaggtgttctgtgtgcggcgtggtgaattattgctcacgcgcgtgccaagcgcttgattggaagttccggcacaaggcggagtgctcccccgtgcaacggtggctcgaggaggacggcgaagatgtcggtaacgacgacggtgacggagaggtggaggttatggtagatagttagacaatttttacaacagtaacggtaacggaagtcgctttggacggaaaaatgaatatttttggcgaagtgaaagaaaaaaaggaattacttgtgatgatttattcgccgtctcaaaaaggtagaaaagagtatatggcttcttttcttttttccttgtataggtcgaaaattctcccgaaaaaaacgagaggagattatttttctttttttattttattttgcaatttcggagtttaaagttaatttagaaattcaatgctaaaactaagaggttactagtta

SEQ ID NO: 23197 - DNA, 670 bp, Glycine max
  unsure (1)..(670): unsure at all n locations
gtggagcaagagcaaaaggtgactgaggatgctcgtaggtttgctgagcaagatgcagccgcacaaagatatgctgcgcaagtccttcaggaaaagtatgaagaagcaactgctgcacttgctgaaatggagaagagggcagttatggcagaatctatgctggaggctacattgcagtaccaatctggccaagttaaagtgctacaatctccacgatcttcacagtcagattctccggtatcgagaaacaatcaagagccggatatccctgctaggaggataagtttgctttctcgtccatttggacttggatggcgagatcgaaacaaggggaaacccactaatganagagccagctgagggaaatcccagcgttgaggaacaaaatacgatcagtgaacaagacgtcaatggccttaaagtacaggaggagagtagaaaagaagtcagtgcctagattttctttatatccttctcaagacaatttgacgagcaagaagttagtttcttcttccttgtctgtaatttttgtttagggtgaacatataatttcatattcattaattgtttgttctttattatgtaatagaataatagtaattggaaagtaagtgaacggtcgaggtcaactgtaatacatctctctcgtttattccatggttttagaata

SEQ ID NO: 23198 - DNA, 754 bp, Glycine max
aagtatcacattcacattcaaaatctagaacagcatcagaatcaatcagcatattctgtcttcttcttcttctgaaaacaaaaatgcctcgcggtggtggcggtagctccggtggcggaagatctgctcattcagctcgaagtcatgcttcacggccagttaaccatgctccacctccagctcctgctcagagtgacaatcgtggatctctctttgggactgtagctgaaggattggcttttggttctggaagtgctgtggcacacagggctgtggattctgtattcggtcctcgaactattcaacatgaagtagcagctactgggcctcctcctgcttctgctgctaataagctgggcggtgatgcatgcaatgttcacgcaaaggctttccaagattgcctgaacagctatgagagtgacattagcaagtgccagttttacataaacatgctagcagagtgcagaagaaattctggagccacattgagtgcatgaacatgcttgcttcatttgctttgccttgcaatggtatagctttggagtttgcattggagtccagatgtgtctcatggttagaactacgttttttatgttactaagtattccacattgctaattaataaatcggttttgtccgatatttgtcccaatataattactgtgaatctaatgactccgagtttgcattggagtccagatgtgtctcatggttagaactatgttttttttgttactaagtattccacattgtt

SEQ ID NO: 23199 - DNA, 290 bp, Glycine max
  unsure (1)..(290): unsure at all n locations
aagcgaatagaaatgcggtggagactgctcctccatggatgggaagcctaacccgtattcctcctccacggacctcctccgcgacgttcaagccgccttgaaacgacaccgtcctctcggttcaatgcagtccaattgcataagaccaaggcgcacgctacttcctcacagaagagcatccagcacttcttcttcttcttccgatgtcaccatttctcaagaagaagcttcttccaaggattcgctcaacttcgtcgtcccntctcaaaacctagactctcagaagaaag

SEQ ID NO: 23200 - DNA, 575 bp, Glycine max
gttggaagcaatttgcaatattcatcaataatccatggcctatggcaaaggaacagattaacacttcacgggcaacaacataaatggcttcttcaagcataacctgcacctttcactgtaacctccatccttcaatatcccttccaacctcagccactcgtttttccttatctttttcccaccctctactttgcacctacaatggcctttcccttcacccttcaagctccagcttcagagtttttgccaagtttgagaaattccaaagccaaccttcccaatcccaagagcctgacccttcactctcaccagtagaaaatacagaaacttctgttgaggatggggaggaggatgacagttgcttgccttcagacttggagggtgcagtgcggcaatcaagtgaggccgcggccatatttgtatcttcaggagggataagagccatagttcaacttttaatcccccaactgcaatttttggatgacgaaggcgcgcaggtggaactctgggaattgtcaaggatttttttggatacactcattgaaaaaactaaattccagagagttaaagccata

SEQ ID NO: 23201 - DNA, 438 bp, Glycine max
gagagagagagaaaatcagaacacgctttgaaactgaaagagagagtaagtgaaggtgtgtgtgtgagagagagaatcaagagagaggagaaaacagagacaaacgctgtctgtgcgagttagagagagagagagaaaccccagaaaatcagaaaatctaacccccattttttctctctttagtttccatttgatcggagtctctcattgtggtttccgattagcgtcgaatcagctccgttctccggattggctcggtgcaatggagcagtacggccggtccagtgaaggttcgcggtctgatccgtcgccggaatgggccgggcccgaagcccaaaccgggctcgaagagcctgtgtggcaattgggaatgggtggtggtgctggggaggaatcgtattcgcaacgccccgatgaggttgattgcacttactattt

SEQ ID NO: 23202 - DNA, 300 bp, Glycine max
caaataacaaatatcaaaaggttcgcagctaggcaggaacaatgaatcactcatacgcgaatcaatcggctcaagaagttaatatagttacagaggacacaagaagatctgcaaattataaacccaacatttggaaatacgattttctgcagtcacttgacagtaaatatgatgaggaagaatttgttatgcagttgaacaagcgggtgacggaagtaaagggtctttttgttcaagaggcaagcgttttgcaaaaactagagttggctgattggatccaaaagctaggccttgccaact

SEQ ID NO: 23203 - DNA, 715 bp, Glycine max
tcccacgcgtccgcggacgcgtgggattttttacccttttcagttggggtggaattgcagcggattttgagtctgacagagagctttcctctttgtatgtgtgaagcgactgatgaaatcccaaacatagatagatagatagatcacatatgcacgttgacagttcacaaatgatcatgaagcacgtgtgcaccccaaatttctctctcactgcacctgcaggatacttttgacagagaagctacctaacaataagcatcaattgttgggagttgttgtgtgttgatgggttgatccacagatcgttacaagattcatccaagtgaagtaacaacaacctattttaccccaagaaaacccgatggcgacatactttcatcatggtaactccgaaatccaatcgggtggcgccgacggactccaaactcttgtcctcatgaaccccggctacatccactactccgacgcgccgccgccgcagcagcagcaatcctcactcgccgccggaaacctcgtgtttctcaaccccgccgcggttgccgggggcaacaacaactcgtttaacccccacgcgccgtcatctcacacccaacaattcgttggaatccctctcccaaattcccaagacctcaaccaccactccatgcacgcgcaccacgatgtctcagccctgcatggcttcctgccgcgcatgcagtacaatccctggaacgcg

SEQ ID NO: 23204 - DNA, 349 bp, Glycine max
gtgccacttctttcggacttccaagtggaggaatcgaaattcttgtttgaagcaaagactatacagagaatggaactccttgtgttgtccactctcgaatggaaaatgaaccccgtcaccccaatttctttctttcacacacttcctcgctacccttggtttaaagcgccacttgcattcggagtctctccgtaggtgccaacgtcttcttctctctgtcattgcggattcaagggttatgagttatcttccttctacactggctgctgctataatgatccacattattaaagagattgaaccattgaatgctacggagtaccaaaatcagcttcctggtttacttaaa

SEQ ID NO: 23205 - DNA, 421 bp, Glycine max
ctctctctctctctctctctcccccacacacacacactctgatgttttggatttggcttaagtgactgtgttctgtttcttcaattgcacaaattgttggactttctaaattccatcactttgaagaatagtgtgataagtattaggaataagaagctgccactcatgacgaagcagaaaattcgcaacgctcttttggtgcacttggtgattctcttcttcttttctacatcggttgtttcagcgagagttgtgtctctcttgcagaactacgggaacccgattttcagatcaaattttcattctatttacgacacttccaagtacggtgtgtttcaactgagtaacgggttgggtaaaacgcctcacatgggatggaatagctggaacttctttgcatgcaatatcaatgaaatggtca

SEQ ID NO: 23206 - DNA, 689 bp, Glycine max
  unsure (1)..(689): unsure at all n locations
gaagtgagtcagatacgaagaagcaaaagcaaaacagaagcaaacaccaccacgcattcagcttcagaagaaagtgaacctatttggtgttttcctaaccgaatcaatctttattctttggttattcttcgtcttctacatgggtcgccttcttctctttctcattattcccagccttgtcgcattgtctttcctctcagaggtacaatcagcgtcgttcaagattgtgaacaagtgccgccacacgatatggccgggattactctccggtgccacctcgccgccgcttcccaccaccggattcaccctcgagagcggcaaatcgaggaccataaagcttccaaagtcttggtcgggtcggatatgggcacggacactctgcggtcaagactctgacggaaagttctcctgcgccaccgccgattgccgctccgggaaagtagagtgcgtcggcggagccaaaccgccggcgacattggcggagttcactctcaacgcgcgcgacggtttggacttctacgacgtgagtccggtcgacggttacaaccttccgatgctgatcgtcgccaaggcaggcatcaggggacggtgnagcgccaccggttgcctccgtcgactcacaggcgggtgtccagcggagctgacggtggcgcgatcacacggcagccgcggcgacctcgcgtgccgga

SEQ ID NO: 23207 - DNA, 765 bp, Glycine max
gacggaataaaagatgaccctttcggaaatcagtgggtggctgtatttgagtacatagtgcggggcatggcaggacttcaagggcctttctattgcggaacaaacaccttccatagaagaaaagctatttatggtgtttatcctgatgaaactggaagcaggagaaatggaaaattagaagagaagatattgatacaacaatttggaagtttagaggagtttgtcaaatcagcagctcatgctatggaagggagtgcatattctgcaaatgatattactccttccagctttattgaggcagcaatccaagtcgctgattgtggatatgaagatggcacttggtggggtaaacagatggggtggttgtatggatcactcacagaagatgtgctaactgggttgagtatgaaaagaagaggttggagatcagagtgttgtacaccagatccaattgccttcacaggatgcgctcccggaggattactctctacaatggtaccacaaaagagatggttcactggccacactgtaatcttttttggaaagcattctcctcttatgtgcatgctctttggtaaaatccagttcagagcaggcttgtcttatttctgggtttccactttgagcttaagaggtgtgttcctagtttgctacattgctctacttgcgtattgcatgattaccaacaccaatatctttcccaagggacttggcctttggattccaattaccctttttgtgatttataacgtatatactctatta

SEQ ID NO: 23208 - DNA, 354 bp, Glycine max
tgttgtatcccagtggagatctttcactctcaatctcaacttccacaccacaccttcctcccattgccatgttccgcaggtcgattttgctaatatcatctcgcccaactcttaaaatataccccagacgttttgtataccagatacctttacatctatcttcacaaaagaatttctcaactgtgtcgaaaccagggggtgcctcagcttctgggtctccgggcaagccacctgagtctaatggcaccctatccaagtttttcattggaagtgtagctttaggtgctgcttttctggcagcttatcagactggttatttggatcaatatcttaagaaggagcattatagtgttc

SEQ ID NO: 23209 - DNA, 523 bp, Glycine max
ttccaaataggatggttgttgcagtcaaattatttaatttggaccttgaattgggatcaaggagctttagtgtagaatgtgaagtaatgcggaatctgcgacaccgaaatctcatcaagatcatttgtagttgctcaaattctgattacaagcttttagtaatggaattcatgtccaatggcaaccttgaaagatggttgtattctcataactattatttagacttcttgcaaaggctaaatataatgatagatgtggcttctgcattggaatatatgcatcatggtgcttcgccaactgtggttcattgtgatgtaaagcctagtaatgccttattggatgaagatatggttgcacatgttagggacttaggcattgtcaaacttattgatgaaggacaatcccaagagtataccaagaccatggctacatttggctacattgcaccagagtttggatccaaagcgactatttctacaaaaggagatgtgtacagttttgggattttgttgatggaaacatt

SEQ ID NO: 23210 - DNA, 299 bp, Glycine max
ggtcgagttatctctcatcgtctcgatctgccgtcagagaaatgtttagatatgcacttaacatgaaattgattgagtgcctacgtaagcatttctttgacaatatatagattaatattgttgtgtttttcatttttttatttatagagggaggttgttcatgtgctactgtacgtgtctaaataatgttgtattgatcttgtattgtgcaccgtcaaattatgaattgggcaagcttgtttgccttactttgtcttctagcttgtatgtaccatgaaacattgtcttatttgatcatt

SEQ ID NO: 23211 - DNA, 558 bp, Glycine max
  unsure (1)..(558): unsure at all n locations
gatgtctgccgnctttatgataaagngnngggaaaaaaaaaatttacaaagctgttgctaagatggctgctgctgctgcactgngtgtgcaatatgaagctgatttcagaccaaacatgagcattgtagtcaaagctcttcaacctttgttgactgcacgacctggacctgccggtgaaatacccaattaatctctgtatcactttctctacatatttgtgagtatgtgcacaagtgtgcatgcaaaatataacttcagaagctggtggtaaattgctcagacatgactttatatcccattgtttacactgcattcattttgttcataatccatgaggttctttgctgtttccttgcttttattcattttaatgtacttgctttgtctattttttttcctttctatcctttacttctgggatgattgccgtctttacgataaagtgttgggaaaaactgcaaaacagaattgtgtatactcaaagctaagagcgtcaatggactatctctactggaaacagttattcaccgagagccgttcttattagattgattctt

SEQ ID NO: 23212 - DNA, 548 bp, Glycine max
ctcgagccgaaaaaatattttcccacatgaaaccaaatagcatactgggtctgtcccatacttttcttcttgggcatttacagtcaataggacttgattttcccaagcacttcagcgtaattgccgtctgcccgaaaggtatgggtccttctgtcaggaggctgtatgtccaaggcaaagagataaatggtgctggaattaattcgagttttgcagtccaccaggatgtggatggcagagctactgatgtgctttggcatggtctgttgcccttggttcgccttttacatttgcaacttcgttagagatggaatacaggagtgacatctttggggagagaggcattttacttggtgctgttcatggtattgtggaatccttgtttaggaggtacactgaacatggaatgagtgaagatttggcctataacaacactgtcgagtccattacaggaactatatctaaaataatctcgactaagggtatgttggctgtatacaatgctttatctgaagatgaaaagagggaatttgagaaagcatatagtg

SEQ ID NO: 23213 - DNA, 1031 bp, Glycine max
gtcatgacatcgtcgcaggtaacaataacaacaacaataccaattctcggaagagaggtagagaagacccgggtgttggcaaaacacaatcactgcagcttctaatgttatcgatcaattctctttacaatctcagcctccgcaacttgttcatctctctcagctccacaatcaccaccaacaacaaaataatgtggtgtccactggccttcgcttatccttcgatgaccaacactttcaacaacaacaaagactacaacttcatcaaaatgaatctcaacaacataggtcccactcttctgctttcttatctctattatcccaaggcttgggttctcaaatcaaacaacagcgcgatgagattgatcaattgctccatgcccagggagagcaactgcggcgggcattggcggagaagaggcagagacattaccgcgcgctgctgagcgcggcggaggaggcggtggcgcgacagctcagagagaaggaagcggaagtggaaatggccacgcgcaagaacgcggagttggaagcacgcgcggccaagctgagcgtggaggcccaggtgtggcaggctaaggcccgggcccaagaggctacggcagtctccctccagaccaaactgcagcagacgatactgtcccacggcggcgaagatcctgctgtcgtgggcgtttcatctgctgctgtagagggacaggcggaggacgcggagtccgcctacatcgaccccgaccgcgtggtggctgccacggcggcgcgtcccaaatgccgagggtgcgcaaagcgcgtggcctcggtggtcgttttgccgtgtcggcacttgtgcgtctgtacagaatgcgatgcgcatttccgagcgtgcccagtttgtctcaccccaaagaattcaaccgttgaagtttttctctcttaacaaccctcctaaatttacccaattgcccctccccttcctttttctttcttgtccataccaaaggaaaaattttctcataaaactataaataaattacatttttgtttctctcttg

SEQ ID NO: 23214 - DNA, 246 bp, Glycine max
cttactgtcattgagaagttgaagcaaaagcatctcgagcaagagaaaagggagctacttggtgatgatcaggatggagaagctaatgttgacatgcttaatataattcatcttctacaataaatgctttgggcaggcaaagtagtgttgaagtcatggaacaagaaggtggattatgtgatgggaaagaagttgatcagtttcatcaaccgtctggtagtaatgaggttgccattgctaatgagg

SEQ ID NO: 23215 - DNA, 311 bp, Glycine max
ctcgagccgctgattttcacacttataatatctttatttcagcattttccaagtcagggaatgttgatgccatgttagcttggtactcagcgaagaaggctgccagacttggtcctgatcttcaaatgtttgaatccctcatatcaggctgtgttaattctagaaagtttaagattgctgatagaatttttgaagaaatgatgatttctggaattgttcctagtgcttccataattgagagtatgcttaatgggatttgcaagcaaaagagattgggtcgggcagaggagtttttcacgtttgcgatggat

SEQ ID NO: 23216 - DNA, 394 bp, Glycine max
atcccccaccatcgtgcaccaccatttccaccaaatctgctgggattcagactgttgttttagtgcctactgattttggggtggtggagatggggtctgtgagatggttggtgagagttttgagttgttgcaggctgtgaaatctgtgttttctgcacaggcatcatcattattagtcccccacatggttaagccaattgcaccgttggatttggtgagggaaaagagagatgggagtgagagtgcaaatgctcttttatctggtttggcaattggggataagaataagaatattaataacaatagtagagtagagggaattggagttccgaagatttttgggcaggatttgaattgtgtgactcaatttagggagaaacttgctgtgaggaaa

SEQ ID NO: 23217 - DNA, 317 bp, Glycine max
cgagattccaactgaggaaagtgacagtgctctacgagcttctctctgcttgtctatcagatttaggtgaaaataacaagaaatttagccggaggagaaagggctatgatgctcaacaacgtgtcactctgcggctgctagcaacttggctcgatatcaagtgggcaaaaatggaggccattgagacaataggtgctagttctgcaatggttttattaaagagcaagaggcaagtaaagaagaaattcaatcaaatgaagacaagtgggctaaatggaagaggggtggtatcattggtgctcctgccttaacagggg

SEQ ID NO: 23218 - DNA, 499 bp, Glycine max
tcacaaaccaccagtacctgccccccaatccactgccaaagatattctcccgcgagaacaacatccttcgccgtcgccaccattttctttaagctccatttttgttaaccgccgtcgaaccgggtcgggtcgggtattaacgagacacctccacagagaggcagtaaactaggttgttggagttgttctgtctgaaaccgaaccacattccaaagatagccgttgtcattgtcagaaggagaaggcattgcgttttagaaagcgataccgtgagagacaacaatgcatcgcgctagggtttgattatattacgcagatcgaaactccccccaacggtgtgttgaagcgcattttgcaatttcaataaataaataaatgggagaaaaatcgaggtccaaaggagggtgctgcggttggttcatcgcgttcgtcattctggctctcgtcgtcggtgccattgtttttaccgttaagaagaaatttagtcactccggttccg

SEQ ID NO: 23219 - DNA, 357 bp, Glycine max
aagtcataaaccaccggtaactaccccccaatccactgccaaagatattctcccgcgagaacatccttcgccgtcgccaccatttttgtcaccctccatcataccgggtcggttcgggtagtgacgagacaactccatcacacagtgagagacagtttccctggagttgttctgtctgaaaccgaaccacattccaaagatagccgttgtcattgtcagaaggagaagccattgcgttttagaaagcgataccgtgagcgacaacaatgcattgcgttagggtttgattatattacgcagatcgaggctcccgctgtgaagcgcattttgcaatttcaacaaataaataaataaaaa

SEQ ID NO: 23220 - DNA, 484 bp, Glycine max
gcagacccctcaacattaaaagcaaggagtgagggtccagcagagatcattaggcatgttttgtttgggtactttagccagaaaacaggactccttgttcacttggaggactcccatttgacacgcattcagaacaatggtggcgaggcagtatattgggagaccacaataaattcatttcttgacgattacaggcctgtcgaggggataatgattgctcactcgggtcgatccgtggtgacgcttttccggtttggggaaacagcgatgagtcacactaaaaccaggatggaagaagcttggacgattgaggaggttgcgttcaatgtccctggcctttctgtggactgtttcattcctccgtctgagctaaggtttgcttctatgagtgaagcctgtgagcttccccaaggtcagagggtgaagactgctgtggcagcagccgcatgccgatggccaaagtcactcaactacaaaaatcgca

SEQ ID NO: 23221 - DNA, 1059 bp, Glycine max
ggtaggcagagatgttgcaacatgtttgcaagacgcattggcacggataggcctagatgtgcgggtagctgcattggttaatgacactgttggaccattagcagttggacattatcatgatccagatactgttgcagcaattataattggtactggtacaaatgcctgctatttggaacgagttgatgctattatcaagtgtcaaggtcttcctacaacatcaggatacatggttgtaaatatggaatggggaaacttttggtcatctcatttaccaagaacatcttatgatattgatttagactctgaaagccctaatccaaatgatcagggttttgagaaaatgatatctggaatgtatcttggtgacatcgtgaggagagtcattctaaggatgtcgctagagtcagatatgcttggacctatttcttccaaactttcaatgccctttatgctgaggactcctatgatggctgccatgcacgaggatgattctcccgacttgagagaagtagcaagaatccttaaaggcatccttgagattcctgatgttcctttaaagttaagaaaagttgtggtgaaggtgtgtgatgtggtgactcgcagagcggcacgattggcagctgccggcattgttggtatcttgaagaagattggtagggatgggagtggtggcatcgcaggtgggcgaagaagtgatatgaaaatgaaaagaacagttgtagcaattgaaggaggtttgtattctagctatacattgtttagggactacttgcatgaagctttgaacgatatattgggggaagatattgccaggcatgtaattcttaaggtcactgaagatggatcaggcgttggagctgcactgcttgctgcctcgcattcatcatatgatgtagatacagtatagctgctatatgtatgtatacatgtaatcatgtaaatcagaaagaaaattttccctctttttaattaatctctgtataaaggaaggttatgtctattctttgttaagatcattaatattaatattattcttgtcgattttttattagtagg

SEQ ID NO: 23222 - DNA, 400 bp, Glycine max
agctagaaccagctaagtgtcttgcaaacccatcttgtgcggccaatatcgcctgtacttcaaacttgcaacaatagacctgatgacaccgaatgccaaattaagtgtggggacctgttcgaaaatagtgtggttgatgaattcaatgagtgtgcagtctcacggaagaaatgtgtacctaagaagtctgatgtgggagaatttcctgctccaaatcctgatgtccttgttaatagctttaacattgctgatttcagtggcaagtggttcatcactagtggcttgaatcctaccttcgatacctttgactgccaattacatgaatttcacacagaatccaacaaacttgtgggtaatttgtcatggagaatacggactccagatgctggatttattacta

SEQ ID NO: 23223 - DNA, 1119 bp, Glycine max
agatcgagcggtgatacgacatccggttcttcgagctaaacactggagctaatatcccttcactagggctgggaacttggctggctgatcctggtgttgttggtgatgttatagctcatgccgtcgaggttggttatcgccatattgattgtgctcaaatttacggcaatcaggaggagattggtttagcattaaagaagttatttgaagagggtgtagtcaagcgagaagatttatggatcacctctaaactctggtgtacagatcatgctccagaagatgtaccagaagctctggacagaacattgagagacttgcaacttgattatatagatttataccttattcactggccaattcgaatgaagaagggttcagtgggctttaaggctgaaaacattgtgccatcagacatacctaacacttggaaggcaatggaagctttgaataaaagtggcaaggctagagctataggtgtaagcaatttctcaactaagaagttgggagaattgctttgagtatgctcgtgttactcctgcggttaaccagtcagagtgtcatcctgcatggaggcaggacaagttgaaggccttttgcaaatctaagggtgtccacttctctggatattcacctttgggttcccctgcctggcttgaaggtgatttccttaaccatccagttataaatatgatcgcaaagaaattaggaaagactccagcacaggtagctcttcgatggggactgcaaatgggccatagtgtgcttcccaagagttctaatccagcaaggataaaggaaaactttgatatttttgactggtccattcctgaggacatgcttgataaattttttgagattcaacaggaaagattactcaaggctagcttcttccatgaaccaaatgggggttacttaccagaagacgaattgtgggatgggggtatatgaaaagtcggttgaatgattagttaaaaaagtggatggaataaaagaaacgcatcttctgtttggggtgttaggctatatgaaaatactcttatctttagctatgtgcatcctttgtcactatcagtcttttaagttgcaacccttcaactgaaaaattaaaaattttcatgt

SEQ ID NO: 23224 - DNA, 530 bp, Glycine max
tctgttggtattcctccaactgggttgaattcaagctttgataaatccgtaaatggttttcttcatgataaagcaatgtctagcttcacctgttcagagttacaatatgatagcttggatataaatgataagcttctcttggagcttaaaagtattggaatttccccagcaccagtgcctgatatgttgcaaacagatgatgaaggaatatcagaggatattattaggttggagggagctttacctaggacagatttccaagaagaaaagcttgctagatggagtgttcgaatctgcctcagtggataaagaacttcaagaaaaggattttgagcaacgtgctctagataaacttgttgtgatggcttatgagaaatacatggcttgttggggcctagtccttctggtgggaaaaatacaagcaacaaaatggccaagcaagctgcactgggatttgtcaaacggacattggagcgatgccatcaatttaaagatactggcaagagctgcttcagtgatcccttattcaa

SEQ ID NO: 23225 - DNA, 470 bp, Glycine max
ctgtttcgtgcaaaaacaagttgtctctctacactccctcattttctctctctagctttttagagagagaaagatcatatcccagaagaagaagaagaagagtctgaaaacatggagaagaagagatttggtgtgttgatgtgcgcagaggattcagagtacgtgaagaaagtgtacggaggatattctggagttttcgtgagaatgctggcggaggagggagagacatgggacgtgtacaaggtggcgtgtggggattttcctgatgaagatgacttgggtctctatgatggctttgtgatcactgggagttgcagtgatgcacatggcaacgacacatgggtgaatgatctcctcaacttgctccgcaaactcgattccatgaacaagaaaatcctcggaatttgcttccgccaccagatacttgggcgtgcattgggagggaaggtgactcgttctcctactggatg

SEQ ID NO: 23226 - DNA, 296 bp, Glycine max
gatgaattcccttaattttgtttcagcggcgatcgggtctgttcattattccgagcccagtcccaaactcgtttccatctccagagccagagaccaaccttatactctcgtgatccgttcctctggccacctttctaataagctaaaagtttcagccctcaaaagcaacgaaacaaagccacagcagttctcactgtgtcaaaacggatggctccccgctttcccccacgttcttgttgcttcaatgtctaatcttatatttgggtatcacattggagtcatgaatggtcctattg

SEQ ID NO: 23227 - DNA, 300 bp, Glycine max
ttcactatcacaatcgaagaaatttgcattattcagtaatggatttcaagatgcttaggtcttttgttgagaagattgaaaagggtctatcactaattgctcccaaaaagccaggactcaactacttcaatgaaaatcaagtggaaactacaacgaatgttgtgcccgaagatgttgttagtaaagggtattttgctgttgttgcaataaaagatggagaaatcaaaaggtttgttgttgagttagactacttggctaatccagcattcttgggtttgttggatcaagctggagaagagt

SEQ ID NO: 23228 - DNA, 489 bp, Glycine max
tgtttacatccctgcttctcctttttggtttatgagttcctagagggaggtagcttggataaattactaaacgatgatacgcatgcaacactgtttgattgggaaaggagggtgaaggttgttaaaggtgtggcaaatgctttgtaccatatgcatcatggttgctttcctcctattgttcatcgagacatatcaagcaagaatgttcttatagatttggattatgaagcccgagtctctgactttggaacagctaaaattctgaagcctgattcacaaaatttaagctcgtttgcaggcacctatgggtatgctgcaccagagcttgcttatactatggaagtgaatgagaaatgtgatgtcttcagtttcggagttctttgtttggaaataatgatggggaagcatccaggcgatctcatttcttcatttttttcatcccctggaatgtcatcggcgtctaatttgctgttaaaggatgtgttggac

SEQ ID NO: 23229 - DNA, 373 bp, Glycine max
acattatgtggacaagtatgtgaaatgactccattcatatttcactatgtattggagtgaaactttttaaagaagctcaagccttttgggcatgtaaattgttttaaatgtgtcattttctctggcgtgtggggtaaaggttaatgtctgtttaccttttgttgataaaaaggtatctctggaatgtaggtctccaattgctaggcagcacagtgcacatcaccaaacggtacttttaggtcctagctgcataatggtatgtgaaaagtgtgcccaatggagagcaacttgcaagagaatcttcttgctgatgtttggagagtcgaatgacaaatgtgcctatttgattcacaatttagtagaatctatttga

SEQ ID NO: 23230 - DNA, 474 bp, Glycine max
tgtcgtccaatccgcagaggacacttgaacatttcacaacattattccatgcagcaggtacttgacgatctacatactatttgggattggattttaatagagaaactgcacattcctcgcaatgaaagaaatatgtattctgctgttcttgtgatgccagaaacatttgacaatcgtgaaataaaagaaattctatctttagtactacgagaactctgctttggctcagcagtggtacaccaggaaggtcttgcagcagtttttggaaatggattatcaacagcatgtgttgtgaatattggtgctcaggtgacatcacttatatgcattgaggatggaggtgctctaccttcaactggaaagactttgccttttggtggtgaggatatatcaagggcctttctctggacccaaagacagcgccaaacttggccaccaattcactcagatgttttcggaaagcctatagatctg

SEQ ID NO: 23231 - DNA, 366 bp, Glycine max
cagctagtacataaatcatcacaccttattcttaatcatccttgccaattaaggccgtgcaattgttcattcatttgtttgatatatatcataatattaccaagtttgaagagtacgtgatcgatggagattcaattggagcagcaacaggaaacatggtcggagacgtcgagcacggggagcaggagcacgcgagtgggcttcagcgggcccatgagcggcccattggtgacgtccaacaagaagagcagcaagaaaagcgctaggttcaaggaccaagaggatgaggacttcgtggagataacgttggacgttcgcgacgacaccgtgtcggtccagaacatcaggggcggggaccccgagacg

SEQ ID NO: 23232 - DNA, 254 bp, Glycine max
gtgggagcgcatgggacctggtctcacttttattatgctggcacagccatatctcaatgctgttcctatgcccattggccttgagggtctctgcttgaaggcctgcacgcactatcccactcttttcgaccattttcagagagagcttcgccaagttctccgggacctgcagcagagtaactccttcgttcaggactggcgtgacaccaagtcttggaaactacttaaggacctcgccaattcagctcagcata

SEQ ID NO: 23233 - DNA, 966 bp, Glycine max
cggctcgagtgaagctccatcaccactagcgaacacttccattgtttttatctcacaggatcgatcgatatcaccagcatcaccatggcagaggtggcgccgccgaagaaggaaaacccgaaccttctcctggggcggttcgagctcgggaagctcctcgggcacggaaccttcgcgaaggtccaccacgcgcgcaacatcaaaaccggagaaggagtcgccatcaagatcatcaacaaggagaaaatcctaaaggggggtttggtctcccacataaagcgcgagatctccattctccgccgcgtgcgccaccccaacatcgtgcaactcttcgaagtcatggccaccaagaccaagatctacttcgtcatggagtacgtgcgtggcggcgaactcttcaacaaggtcgcaaagggaagattaaaagaagaagttgcgagaaattactttcagcagttagtttccgcggtggagttttgccacgcgcgcggcgtgttccacagggacctgaagcccgagaacctgttgctggacgaggatgggaaccttaaagtctccgactttggtctcagtgccgtgtcggatcagataaggcaggacgggctgttccacacgttttgtgggacacctgcgtatgttgctcctgaggtcttgtcgcggaaaggctacgatggtgcaaaggttgatatttggtcttgtggggttgttttgtttgttctgatggcgggttatttgcccttccatgaccgtaacgttatggctatgtataagaagatttacaagggtgagtttcggtgtcccaggtggttttcttctgaacttacaagacttttctctaggcttctcgatactaaccctcagacaaggatttctattcccgaaatcatggagaatcgctggttcaagaagggtttcaaccagattaggttttatgtggaggatgatatcgtttgtagaactgatgag

SEQ ID NO: 23234 - DNA, 747 bp, Glycine max
  unsure (1)..(747): unsure at all n locations
gtagagctcatctcattcgatctgttncacactctcatgaacaccaaactcaacatgctcctcaagctcctgcctttgttggtgttccttctgatcccagtttcatctcagccaaaccagctcttctatgctggattcaagggtctgggaagcaacaacatgacccttgatggggttgcagaaatagagccaaatggggtactgaaactcacaaatgattcaagtaaagtgatgggtcatgctttttatccaaccccttttcggttcaagaactctagtggtggtaaagctttctccttttcttcctcttttgctttggctattgttcctgagtttccaaagctaggagggcatggccttgcttttacaattgctccttctaaggatctgaaggctcatccaagccaatatcttggtattcttgactcaagtaacatagggaacttctccaaccacctctttgctgttgagtttgacacagcaaaggattttgagtttggggacattgatgacaaccatgttggaattgacatcaatagcttggcctccaatgcctctgcatctgcaggttactacactggggatgatgattcaagcaaacagaatctcaccctccaaagtagggtacctattctagcttgggttgattatgatgctgctaaaagtgtggtccatgtcacgatttctgcatcttctaccaaacccaaaagggcactcttgtcctatcatgtggatctttcaccaatc

SEQ ID NO: 23235 - DNA, 359 bp, Glycine max
atcccttcttttccaccatcaaaccctacaacatacttcccaacacaaacaccaattcctactagcaacaacaacaacaaccctccaagcaccatcaccccaccttccttccccaatttccccgccgatctcttgtcgaattcgagttcttcatcgacttcttcggaggaaacaccgacgacggaggccagagggcgcaagaggaagaggaagtggaaggacttctttgagaggctcatgaaggaggtgatagagaagcaggaggagctgcaaaggaggttctggaggccatagagaagagagaacaagagcgtgtggtgagagaggaagcgtggagaatgcaagagatgcacaggatc

SEQ ID NO: 23236 - DNA, 310 bp, Glycine max
aaggaatccaagttgccggttaggcgatgtttgttagtagatctttctaaggaacttggctttgaggaagatactgagaaactctgttgtcatgataatctgtctgcaacggttgaagaggagcaacgggaagatggctccgaaggcagcaacaactattctcctgaagatagatgtctaagtcgagacacaagtagtgaggaaaactcacctgtgatttcttgcccagctagtcctcctaatgaggccaatgatcacagagatgactcccagaacagtagtgttgggtctaatatatcgcttgatataa

SEQ ID NO: 23237 - DNA, 332 bp, Glycine max
agagcgcctaccacgtcttcctcgccccctccctccggatctccgtgcacttcgagaattcgctcgtgattcagttcgtccacgtccacggcgggaacgagaacaaggatttggccggtttggattggaaatcgatcgagaagagcttcaggttcgagagtaagagcagtggattgcttttaggggatcagagtttgagctttaggcagcacgagattaggtattccgagtgttcaatttgctcgttcgcaatctcgcggtcgattaattcgtatacctctaggtttttgtttgataattatactttgattgtgagtgagtatttggattcg

SEQ ID NO: 23238 - DNA, 507 bp, Glycine max
ccacttttctctctcttgcagacctgctcacattccccattatataagaccttgatttggggacaagtttctcctcactcctcgtcctcttttttctcctttgaaaaaatcacggggagggatcgaagcccgagaaaatgggtttgccattagtacatgctctgttcttgactctgtttctgctctgcctccaaacaaaagcagaggattttggtgcaaccgggaagctcgcaggaacatgcaacttgttcagtggaaaatgggtctatgatgcttcataccctctctatgacccttcaacttgccccttcgtagatccacagttcaattgccaaaagcatggtcgctcagataaactgtaccaaaaatataggtggatgccattttcttgtcccttgccaaggttcaatggattgaactttttggagaaatatagagggaagaagattatgtttgtcggtgactcccttagcttgaaccagttcaattcattggcatgtatgcttc

SEQ ID NO: 23239 - DNA, 421 bp, Glycine max
ttcggaaatcagcagtagtaagtaagaaagcttttgtacctacaaacaataattcaacttggatcattagttcattacacagtcgaattctgttttcgctttgaagttcgaaccttgttgtacccttattctaggttccgcaccccgcaaaggaccccgaacctgccatgtgctcgtcgcattccccgaaccaccgttcgaaatgcagagctccagcacctgccaatgccatcatcttcctccttgtaccactcctctgttccctctccttcattaacgtcaattcccagattctagaagcatgttctgccgctacggattgtgggccaggtctgttctgtggcaattgccctgctttgggcttgaagcaacccatctgcaccagaggccaagccacacttcccacttccattgttaatgg

SEQ ID NO: 23240 - DNA, 534 bp, Glycine max
agaggtattggcagcttcaatatccccccagcaagtttagccacatttgtgactctatccatgcttgtatgtgtggtgctctatgaccgtttctttgtcaagatcatgcaaaggtttaccaagaaccctagagggataacccttctccaaaggattggaattggcctcataatccacatagtgattatggtagttgcatctcttactgaaaggtatagacttagagtggccaaagaacatgggttagtagaaaatggagggcaagttcctttgagcattttcatcttgcttcctcaatatgttcttatgggagcagctgatgcatttgtcgaggttgccaaaatcgagtttttttatgaccaagccccagaaagcatgaagagccttggcacttcctattcaatgacaaccttaggcattgggaatttcctaagcacttttcttctcacaactatttcacatgtgaccaagaaacatggccaccgaggatgggttttgaacaacttgaatgcttctcatcttgactactactat

SEQ ID NO: 23241 - DNA, 595 bp, Glycine max
tggaggttcatctgtcaccttgagtgccatgagggaggcttggaagtttgcaaagtggtggattccacttgctgcatgagatacagaatagagtgtaagtgccccaaggcttacttttctgcttcagagaatggtggtggtgattctgatgggagcattgagtttcttgcacatagaccaatgatcaaggaaaaatatgacgcttatcaagaagacctttaacgagtacaagaagaccactctggacatacaactggcctaaagggtcaaaatgatccacctattattgaggtgatacaagagaatagcagcagtgaaatagagcaagtgaaattgcctttccttgtctatgtctcccgtgagaaaaagccttctcatccccaccatttcaaagctggggccctcaatgtcctttaccgtgtctctgctgtgataagcaatgctccatatattctagtgctggattgtgacatgttctgcaatgcgccagcttcagcacgccaagcattgtgtttccaccttgatcccaagatatcactttcacttgcgcatgttcaatttcctcagagatatcacatatgagctagcatgacat

SEQ ID NO: 23242 - DNA, 490 bp, Glycine max
atttaacaagtgtctatgaatggccaatagtagatcctggactcagagtaatggccatgtcttgtcaagctatgtgttctgaattctgtcctggttttcaaaatcacggcattgggggatggcagtggaagtggtcctactgttacagcagaaaacacttgcaagaagcacaaattatcacagcttcctccctccaccgtaccagaatatatctcagatgatatgcacacctgtatggcacacctatgacttgaggtactggcagaatggtgataccacaactatcatattatctgctccctacacaatagggtgggtcggaattggcttttctagggatggtatgatggttggttccagtgcaatggtgggctggattacctaacatggtcatgcaaacatgaagcaattttacctcgggggtaggaagtcatcagaagtcaaaatagaccaaggtgaactccccctcaatatatcccttcggctgtgg

SEQ ID NO: 23243 - DNA, 552 bp, Glycine max
gtggcaggggttttcttaatatggcttcctcacctgtccatcaggccagaagcattgatgcctcgacccatgctgtagatatttccaatggaaatgttttgtcccatagtaatcaattaaaaatagcttcccctctgagtagtggattttctgattatggatctaatgctaatggacagtctgtggttgctaaacttcgaccaaaggttcatgtaggtaaaggactgagtgaagtaaatggaagttctgatgttttaggtgagcaaaatcggggcccgagaattagtaattataagtcaaaatttccactggctgtcaaagcctatgcaaacataggagatggcaatacacaagcgaatatcatcatttccactgatcaatatgacagggaggatttccctgtcaactatgaaaatgcaaagttttttgttataaaatcgtacagtgaagatgatgtgcacaaaagcattaaatataatgtgtggtcatcaacactcatggagacaagaagctgcagagtgctcatgaagatgctaagaggatagcttctgg

SEQ ID NO: 23244 - DNA, 1174 bp, Glycine max
ttattgttcaaatctatttttgaaagttagtgcattgataggatattattaataattcaaggctttatttaaacaggatataataaggctttcttccgtgaacatcttgagcaaaagtaagaaaaaaacgatgcttacttctctgaatgaattaacagagcagatgccttcgcttcttgaaattgatcatccatgtgctcagaggcacattgcagatgctcactacttggttgagtcaattcctgaagaagatgaccccattcaagatatttctcatggtcgcaagccatcaacagatctgggctctggatctgaaactgacgttgcacagtggaatgtactccaatttaatacaggctcgtcctcaccatttataataaaatgtggtgcaaactctaattccgaactagtcattaaagccgacgcacgagttcaggaaccaaaaggtagtgaaattgtgagggttgcccctagaccctccgttttggaaaatatgagcttggaggaaatgaaacaagtatttaatgaactacccgaggctctaagcttgcttgctctagcaaggactgctgatggcactcgggcacgatattctagattatacaggaccttggctactaaggttccatcgcttaaggatttggtcggtgagcttgaaaaagtgggtgcactcaaagatgtgagaacatgacctttgaagggttagatggttcttaacttatatgtgcaggtgcctgtgctaaattgctaatgctcttggggagtttggttaagtggtattacatttctgtctggcttgctttattcttggggaagcagattccctgtaatgtatgtacaaagtatttatccctctgcttgcccgttatgcttgtatgtaatagtaattatttttagtatacttttgctgcagttttgcttcgggtagttaatggaagtagcttaaaacgcagctcccgggttcagttcaacctggtgcacaagttgcgccatctgattgcattggcaaatccggttttaaatataatatcattgtctaggctcggccatctttaactcattcccattttccttccattgtccatgtagttataccccctttttggcaaaattgagagtatttgtggttggatttggattgatatctaggtaaaattatttgatctgatcatat

SEQ ID NO: 23245 - DNA, 1157 bp, Glycine max
agacagtcgtacgtgttcacgcaagaaaccttgttctcttggaagaataacgataaatagacatagcgggagacgtaacaaaaaagtaagaaaagcaactgaatttccaatcctgagaccgcaaggaaatataactcaaaaccttattcttcagtgtcgcttttaccaaaacgccaaaatcgccctgtagactgtacactgagactggttttaaagcaacgccacttgttccagccatgcctcctcaagagacccaacaacctctgttatcggaggagcaagaagagacagcctacgattcctcggagaaggttgtggtggtcggaatcgacgagcacgacggcgacttggaggcgccgccgttctcatggcggaagctgtggctcttcaccgggcccgggtttctgatgagcatcgcttttctggatcccgggaacctcgagggggatcttcagtccggtgccattgctgggtactcgctcctgtggctcctcatgtgggccacggctatgggccttcttatccagcttctatcggctcggctcggcgtggctacggggaggcacttagccgaactctgcagggaagagtatcccacatgggctaggattgttctgtggttgatgactgaggttgctcttattggcgctgacatacaagaggttattgggagcgctattgctatcaggattcttagtaacggcgtcgttccactctgggctggtgtcgtcattacagcgtctgattgtcttatctttctctttcttgagaactacggtgtgaggaaactggaagcgtttttcgctgttctgattggtgtaatggctctctcatttgcctggatgtttggtgaagccaagcccaatggtgttgatgttcttgttggtattttggttcctaaacttagctccagaactatacagcaagctgttggagttgtgggttgcattattatgcctcacaatgtgtacttgcattctgcgcttgttcaatcaaggcaggttgatcccagcaagaaaggccgtgttcaggaagctcttaattactactccatagagtccaccattgcccttatagtgtccttcgtcattaatatatttgtcacaactgtgtttgctaagggcttttatggtactgaaatagcaaatagcattggt

SEQ ID NO: 23246 - DNA, 574 bp, Glycine max
aatttctgcattgagggtaacgtgaaggaagcagttgaagttttggaattgctggaaaaactagatattcctgtggatttgccccgatatttgcaattaatgcaccaatgtggggagaataagtctcttgaagaggcaaaaatgtacacaggcatgctttacaacatctgtcacctctccaagtcagcacatataatagaattttggagatgtatttagaatgtggttctgtagatgatgctctcaacattttcaacaatatgccagagcgcaacttgactacttgggatactaatgataacacagcttgctaagaatgggcttgccgaagattcaattgatctatttactcaatttaaaaacttgggactgacacctgatgggcagatgttcattggagttctatttgcatgtagtgtgctgggagatattgacgagggaatgctgcactttgaatccatgagcaaggattacggcattgtaccatctatgactcattttgtcagtgtagtagacatgattggcagcattgggcatctggatgaagcctttgagttcattgaaaggatgccaa

SEQ ID NO: 23247 - DNA, 411 bp, Glycine max
atcgagccgagaagccataaaaaaactgatgaggatgatgaaggtcatgtgtctgataagggagaggaggatgaagaggaggaatcagaaaggaagagtagacttggacttaataaaagagctggtgaagatgatgaagaaggtccaaggggaggggaccatgatctagatgacgacgatgttgagaagggcgatgattgggagcatgaagagattttcactgatgatgatgaagctgttggcaatgatcccgaggaaagggaggatttggctcctgaagttcctgctcctcctgaaatcaagcaggatgaggaagaagaggatgaagataatgaagaggggggaggtctgagtaaatctgggaaagaactgaagaagctgcttggaaaagctagtggtctgaatgaatct

SEQ ID NO: 23248 - DNA, 418 bp, Glycine max
attgcctgataggccagtgccacttgttcatgagtcttttccatcttctttgttgcaaggtttacaaagtggaagatcaacggcatatttttcatcatatctttcatctttttcaacaaggatgagcacactatagattgaaaagtctagactagtttgtttgtgctgccattagtatttggatcagaattaggtgtaagtcagcaattcacggccaccacttagcatttgaaggttcgaataattgaccttcagaaatcgtgccgtaaatatctttgattattctttttcattttgtacattgtaatttgatcatatacgattgttatgaagtttgatttgttgcatatgtatagcgtcctaggaaaagccttatgaagtaaaaatcctaatgtactttattgttttattggtgaat

SEQ ID NO: 23249 - DNA, 592 bp, Glycine max
agtccaagtccaagtcccattctcttctctctctctctgaaaccatgcctgtcacaaacacaacaacacctacagtggcagaacacatcaaatggagaaggcccagaaaccaattcaaccaccaccatcatcaccatcaccaccccatttcagaaacagatccaaaccctcaaatcccttccataatccaatccactaggtgcaagtccaccatttcctccctgctcctctccactttctccaacaacacctccaacaatgccactgcccacagcaagaaaaatgccactgcccatagcaagaaaaaaagcaacttttctgcttcaaccttcagagggttgggctgcactgctggctcgtcgcagcaggtgtcggtgccggcggtgattcgctcctccgccgattggcaagggaagaaaacaagaaaaaagaagcacaagagaagcaacagaagcagcaagaacaagactttccatggtggggttctggaaggttccaatccagggtgtgtggattctcaagatgtttggtgtggccctggaattgggttctcaacagatgctgctgcctctgattgattgtcgcttgtggc

SEQ ID NO: 23250 - DNA, 410 bp, Glycine max
catcctatccaattcatgagtgaggcacccaaacccgactcatatgaactgaactgaggtgcttgcattaatattatcatcgtccatgtggagccctcaaaacaacatcatggattctcctttgttgtcacaaaaccatgttttgcccaacaaacacacatggaaaatgatcctttgtgctatcgtggctatcacaattgttggactagtagtcagaggcaacactagctatggaatactgtccagagcagaaaaatataatgatggaatcgcaaccaatcagggagatattgttgaatcagaggtgggagttgttgcaaccgatgatgctcggtgttctacaattggtgtttcaatgcttaggcagggtggacatgctgttgatgctgcagtggcagctgcattatgca

SEQ ID NO: 23251 - DNA, 319 bp, Glycine max
ctaacagcttgtttgtatgacttaaatttagcgtcgctggggcacccagctcatttaaggtgcttcaacagcatcatctgcatcaatatcatcgtccttaattgtggagacacaacatcatggattctcctttgttgtcacaagaccatgttttgcccaacaaacacacatggaagatgagcctttgtgctatcgtggctatcacaattgttggactagtagtcagaggcaacactagctatggaatactgtccggagccggaaaatataatgatggaatcgcaaccaatcaggagatattgttgatcagatgtgggag

SEQ ID NO: 23252 - DNA, 313 bp, Glycine max
ggccgccgcggtggagaacgcgctcccgtgcagcttggaggacctctacaaaggagtcaagaagaagatgaagatttccaggaacgtctacgacgcttttggcaaatgtggggatgtggaggagattttgactatcgagataaaacctggctggacgaaaggaacaaaaattacctgcccagagaaaggtcaccggtgcgccgggtcccaccccagcagatctcatttttgtgatagatgagaagccgcatgctctttatagaagggatggtaatgatttggtgatcaaccaagagataacccttcttgaggc

SEQ ID NO: 23253 - DNA, 315 bp, Glycine max
cacaaactcaaaaatcaaaaaccaaaagggcactgactaattttcacaatcaactggattcaagctggttttctcttcctcttcttcatgttcattgattggatcccatcccaccccaattttctaatgctttgtctctcactctcccacgtgcactttcctcttctccgctctaaataattctccattctctctctctctctctctctctcaatacaatattatatgtgtgtgtggaaaaaagaaccgtttttcttttcagcgaaaggaccacctttatattacccttttgatcagagtttaaaatggtgttgt

SEQ ID NO: 23254 - DNA, 499 bp, Glycine max
gtgggttggttttgaccaagacaaggatgttgccgtgctgcgtgttgacgcaccaaaagacaaactcaggcctatacctattggggtctctgctgacctgcttgttggtcagaaggtttatgctattgggaacccgtttggacttgaccacacactcacaactggtgtcatcagtgggcttcggcgagaaattagttctgctgcaactggtcgtccaattcaagatgttatacagacagatgcagcaattaatcctggtaacagtggagggcctctcttagatagttctggaaacctcattgggataaatacagcaatatattccccatctggtgcatcctctggtgttggattttctattccagtggacactgtaaatggtattgttgaccagttggtgaagtttgggaaggttacaagacctattttagggattaagtttgcccctgatcagtctgtggagcagttgggagtaagtggagtgcttgtcttagatgct

SEQ ID NO: 23255 - DNA, 241 bp, Glycine max
cccaaatcgttgaggagtggggaggcggtgccccaaccctgccattccccaccatggtttcccaaatcgttgaggatttgaaggttctggaagaagatttggatgcccacatgaattttggaggcaatggtggaaaattacaggggaattttagagtacaagaagataagaagcaccgtgccacgtatcaggctttgggtgattcagaaaagaagctccagttttattcggctagacagat

SEQ ID NO: 23256 - DNA, 327 bp, Glycine max
atcaatcccctgtttctctctccgtttactttctccctcgtctctctcacctgacaccgattacacaaccatattagaagccattggcggcgacgtcgtcgttttagatggatttagatgcattacctatctcggatttttgagcccaggaaacaaaccaagaccatggatcgcaagaacccgcggaggaagcccaagctcgagcgccgtaacgctcttaaatactcctcctccgaatacgacgtcgtatcctccccctccgacgacacgctctacacgcgctccagggagttctacgaccgcacgagcttccgaatcgagggcgtc

SEQ ID NO: 23257 - DNA, 341 bp, Glycine max
cattaacccatcatccagttggagagataacaatggaggacgtagaacgggtgaaggccgaggcactgcaaataatgggagtattttcactgctcccaaggctcgtcgttttcgatctcgattacactctctggcctttctactgtgagtgccggtcgaagcacgacacgccttctctgtttccacattcaagaggcgacctgcatgcactcaaacaggagaggattgatgttgccattgcttccaagtcgccaactcccgacatcgcaacgacgtatcttgacaaactcagcatcaggtcaatgtttgctgccgagggaatattttacacctggaaggac

SEQ ID NO: 23258 - DNA, 470 bp, Glycine max
cggaagcgaccttaacttagttgagttgaagttgaaagataacaaacaacatacaagaatgcccatcttctctgcaacgttgggctccttcacttccatctcctcctccttcctctcacagtcacacctttctcctttcgtgaagacaccttgccaatggcagcatcactatcacactgctaaagtcttggtctctgcctctggcaatacccaaattgaccaaaatcccgactctggacttcttcaacgccctactcctccagacccactcgatgacgctcgtcaggctcggtagagatcgtcagattggaaggctgcaaagacatatcaagatagtaaagtcatttataatggtagggttgaaggttttaattctggaggcctgctggttcggttttattctgttatgggctttctcccattcccacaattgagtccagtgcatgcttctaaagaaccagagaaatcta

SEQ ID NO: 23259 - DNA, 312 bp, Glycine max
ttgaagttgaaagataataagaaagaagaatgcccatattctctgcaagcttgggctccttcacttccatctccttcctctcaacttcacaattacaatcacacctttctcctttcaagttaactgtgaagacaccttggcaatggcagcatcatcactatctcacttctaaagtgttggtctctgcctctggcaacacccaaattcctaatactgaacttcttcaacgccctactcctccagaccctctcgatgacgctcgtcaggctcggagatcgtcagattggacggctgcaaagacatatcaagata

SEQ ID NO: 23260 - DNA, 400 bp, Glycine max
gtttcgctactacgccctgcctctcccatctaatagcaggattccctaatccagccatctcgaaatgtccgacccggaaaacacacccgcgccccaatcggagcaagactcctcttcgccaccgcccgcccaagaccaacccgtcgcagctgccgccaagctcggccccgccgccgtctccttcagcatatggccccccactcagcgcacgcgcgacgccgtcatcactcgcctcatcgaaaccctatcctccccctccgtcctctccaagcgctacggcacaatgtcccccgacgaggcctccgcctccgcccgccagatcgaggacgaggccttctccgtcgccgccagctccgccgcctccgcacaatgacgggatcagatcctccaggtctactcc

SEQ ID NO: 23261 - DNA, 643 bp, Glycine max
attttggcacgcctcaagttgcttctgaggccactttgacaggaaaaaaacctcgcaaaaattgttcttggggtattatatggcaacacaccaataatgaagatacagacaatgatttctggctcagaaacatacttttgaaagggggttcaacatgccacagttaaaacctgtttgtcacatgtgtcggaagccatatatgtctgatctgacgtatatttgctgtgagacatgccgaaattggtatcacgctgaagccgttgaacttgaagaatccaaaatttctagtgtgttaggcttcaaatgttccaagtgtcgaaggataaaatcacctgtttgtccttactctgatttgaagcctaagagacaagagggcaagaagtcacgcacaaagacttaaaaagaaagagcattctggagcagattccaattctggagcaatctattatggtatgagagagtatgaagctgctactcctgcctttccagtagaggatggttctactcctgtctttaatgtagaggatgatcctactcacctctttcctgtagagggtgatcctactccggtctttcctgtggaggatgatcctcttcttttctctcttccgagtgttgagctgataacagaacccaagatgga

SEQ ID NO: 23262 - DNA, 291 bp, Glycine max
ctcgagccgctcgagccgaatcggctcgaggtcatgtttgccatctgaaacaccacgacgagtgaagaggtgaagagaagaggagctagaacagttacgtggcattgggcaaggtgaacgcctgagctgtgagagaatatacgattacgatgcgtacaatgatcttggagatcctgatagcggcgacgacctcaagagacccgttcttggtggcaatcaacatccatacccaaggcgttgcagaacaggaaggcctcgttgcgacaaagatccattatcggagaaaagaag

SEQ ID NO: 23263 - DNA, 414 bp, Glycine max
ggataccgtgatcaggttttgcactctggtgaaggttcaatacatgctgtgaaatggagagcaagtcttgttgcttgggctaatgatgcaggagtgaacgtttatgatactgccaatgaccagcgtattacatttattgaaaaaccacgagggagcccacgccctgagcttttgcttcctcacctggtttggcacgatgacaccctcttggttattggctggggaacatctgtcaaaattgcttcaattaggacaaatcaccaaaaagcagccaatgggtcattcaggcaagttcctttgtctggtatgacccaggtggatatcgtggcatcttttcaaaccagctatttcatctcaggacttgcgccctttggtgatgctttggttgtgctagccgatattcctggagaagaa

SEQ ID NO: 23264 - DNA, 1955 bp, Glycine max
gtttggatcttgctggccgtgatctgactgactctttgatgaagatcctcggcagaggtggtgaacatgtaccctctctcagattccactgtgtgtgagggcgtgtcttccataatctctcttaatggaacagctgaagccaagtgctgctaactcttcccctctcactcccctcggcttcttggacagagcagccaccgtccacggcgacgtcccttccgttgtttataacaacaccaccttcacgtggtcccagacgcgccgccgatgcctccagctggcctccgccctctcctcccttggtatccgccgcggcagcgtcgtctccgtcgtggcccccaacatccccgccatgtacgagctccacttcgccgtccccttcgccggcgcaatcctgaacaacatcaacacccgcctcgacgcccgcaccgtctccgtgatcctccgccacgcgaactccacgctcgtcttcgtcgactgcgcctcacgcgacctcgtcctcgaagccctatccctcttccctgaaaatcaaagtcaacgcccaaccctaattctcatcacagacgaaaccatcgagaaagcctcacccaccgtcgatttcctcgacacatacgactagcttgtaagcaagggcgatccgggattctagtgggttctaccgaactccgagtgggacccgatcgtacttaactacacttcaggaacgacgtcgtctcccaaaggcgttgtccactgccaccgtggaacgtttattgttgcagtggactctcttattgattgggcggttccgaagaacccggtttatctctggacgcttccgatgttccacgctaacggctggagcttcccgtatgggattgctgccgtgggtggaactaatatctgtgtccgcaagttcgacgctgagattgtttactctctcataaaacgccatcacgtgactcacatgtgcggcgcgccggtggtgctcaacatgttaaccaacgcgaactccccgttggagaaaccggttcagatcctcaccgccggagcgccgcctcctgcggcggtgctcttcagaacagaggctttggggtttgtcgtgagtcacgggtatggtttgactgagaccggagggttggtggtgtcgtgcgcgtggaagggggagtggaacaagctgccggcgacggagagggcaaggctgaaggcgcggcagggggtaagaacggcggggatggcggaggtggacgtggtgggtcccaccggggagagcgtgaagcgcgacggggttagcatcggagaagttgtgatgagaggtgggtgtgtgatgttaggttacctgaaagacccttcgggaaccgcgagttgtttcaagaacggttggttctacaccggggatgttggcgtgatgcacgaagatgggtacttggagatcaaagataggtcaaaggatgttataatcagcggcggcgagaatttgagcagcgtcgaggtggagtcggttctgtacgggcacccggcggtgaacgaggcggcggtggtggcgcggccgcatgagtattggggagagacgccgtgcgcgttcgtgagcttgaagagagggataaaagagaaagagaaacccactgagaaggacataattgagtattgcagggacaacatgccgcattatatggttcccagaacggtgattttcaaagatgagcttcctaagacttctacggggaagatacagaagtttgtgctgagacaaatcgccaaggagatgggttccttcacgcaaagtcgaatgtgaattactctccaatagtttatggcatgcttggcatcaagttcctattgtattatcacctagtaaagtttatgtataataagagtttaattagtggtgtattttgattatagattattgtgtggtggagaattgtttattatattgtacccaaattcaactcttcttatctttacgtggaatg

SEQ ID NO: 23265 - DNA, 591 bp, Glycine max
caaaataaagtaaagtcggcttcgtttatttcagaacacgagagatagggagagagaaagttgataaaaccgtcaaatttgattcctctgaattgaggtattgtgtaagggcactttctgttacatcgttttttcattttgattttggatggataaaggtaaaggtgccaaggcattagcgacctctttgcaaaacctcgatttgaatcctccatccaacatcaagtccaagtcttccattacaatcgcccaccctcaattccccggattactgcctaagaaggcaaagcctctgagtttagtcagcctttgtgttggagttcttggaagacatttggaggatattattgcagatttgagtgaaattgctatcaacttgccagctgatataaagatagcagtggcagctattgctagaagaagaaaattgttgaatgatgatatcctgatcgcattagctgatacttcctgggaaatccttgatgtctctggctcagatgtctctgattttggcttgataaaagcagctgaagtatgtagattcattaaagctctagatataagaatcacttgatatattgagactatttg

SEQ ID NO: 23266 - DNA, 297 bp, Glycine max
caaaaccattggcgccaacagttgtttgtttcctctaccatccaattacgcttctctctgcctctacgtaaataaaaatatggctctcatattccaagccaataaccccaaaaaaccaatggcatcgctaacagcggggtttcaccgccacaacaaccaccgcacccattcttcttctgcgtccaaaatcataatcttcttctgcctctctgcctttctcggcctcgccatcatcgccaacctcttccgcgcctccctctccactcactatctctccattgccaccaactgggtcga

SEQ ID NO: 23267 - DNA, 426 bp, Glycine max
ctataacaaaaccaaaatcccggtggttacttttcgcatcttttcgttttgagctcaccgtggctcttctccattgtcgttatgcttctcccttcttccttcccattcaaaccctaatctgtccctcggatcccaaaattgccccaaattgagaacacgccatggcggcaacgttcgattcggttcgttccctcgcacttctcactcttgcatttgtgtgtagcgtcgcgaattcgatgcggttcgagcttcaatcgggtaacaccaagtgcatttcagaagacattaagaccaacgcgatgagtgtgggaaagtacagtgtcgttaatccccaagaagggtacccacttcccgattcccacaggatcgttgtcaaggtgacgtcgcctcatgcgaacatgtatcactttggagatcatgtggatt

SEQ ID NO: 23268 - DNA, 450 bp, Glycine max
ctgcatgcatgggttgaatggcaggtgaagaatcccatcccggagaagtaagcaaagtgtaatacacgcagttggtattgaaaaaaacaacaagagtgaaagagaagaaaaaacaggaatgaataaaattgtataacaaagagtttgtttcttcttatgtgaaaatgcgtagaggaggtgagggagagaacatggcagtgcctcaactaacttcaagttcgagcacgagaagattgagcctgagaacaacgagaccagaccctttcttgtcactgtgcaaatgcttcagcttcgttgtcgttctctctgccattctctgcatcgccgttaacgtcctctctgctattcgctccttcaaacaccaatccgatattttcgatggcatatttcggtgttacgcggtcttcctagcgtgtttcgtggttctggctgagacggaatggaacttca

SEQ ID NO: 23269 - DNA, 333 bp, Glycine max
ctgattctctataaatatattcatatttatattgtacatacacgaacaaacccaattgaattgaagaaaatatttctcatcaaattgttccaaacttgatcaccaaaaagcacaattcaccttacaaaaaacacaaattttggttaattgctatagaagagatggtgttggggtggaggagaaggaagggcagcaacaaaaaccgtcgcaaaggtggcaaatccatcgctgagttggtgactcccaatcacttcagatgtccaatttctcttgacttgatgaaggatcctgtgacattgtcaacagggataacctacgatagggagagtgtgg

SEQ ID NO: 23270 - DNA, 291 bp, Glycine max
atttaatttaagacccttcaaaatatttctcatcaaattgtttcaaacttgatcaccaaaaagtacagttcaccttacaaaaacaactttggttagtttctttgagcaggttaattgctagagatggtgttggggtggaggagaaggaagggctgcaacaataaccgccgaaaaggtggcaaatccatcacggagttggtgattcccaaccacttcaggtgtccaatttcccttgacttgatgaaggatcctgtgacattgtcaacagggataacctatgatagggagagt

SEQ ID NO: 23271 - DNA, 422 bp, Glycine max
cacaaaccactatcaaaccattacatatgtatcaatcgtgctaaagtgagataactttgggtctgtatttaatcattttcgggatttatggggggtaggtgtggggagaacaagaacaagacctgagttgttaaacttttttattttgagaaaaaaaaacattggacatagtaaagccatggaagagatcaccaagaacctatcagggacttctcttttggtaccatcagttcaagaattggctaaagaaaagatatctaatgttccacaaagatacattcaacctcaacatgaagaggacattgtgatcctctctgaagaagctaatagtagccttgagattccagttattgacatgcagagcttgctttctgaagaatctgggagctcagaattggataaacttcaccttgcttgcaaag

SEQ ID NO: 23272 - DNA, 401 bp, Glycine max
atcaaatgtttggcgagagaaaattctgagtttgaatcacggaaagtcaatttcgtagacatgatataatgtagagaagaaggcacgctcttttgagggtgctccgtgctcctatcagtttcaatatttattaaatttccaaatttttttttgctaattagaattttcttgctgcttatataattgttttaacatcgttggggttgtacaaaaaattggttttggaatttgaagttgtgagtgctgaagatggattcggaaggcgagggtgttaggacaccaaagatgggagtggaaccagaaggggctctgaattcaaagatgaaaggtgctggaaacgtgagcagtaaggatatgattttcagagctgataagattgatctcaagagtttggatgcaca

SEQ ID NO: 23273 - DNA, 431 bp, Glycine max
gaaaacaactcaaacaaaaaaggtaatccatgtagttgcctcccgttcttcctcctattttgaaacattctctccttctctctcctccaccacattttagggaacacccacgcttctttctgcgaccctcatagctgttttttatttttggggttgtttatttgctggtttcgttttgtttttttgtggctttacccttcaaaatcgctcctttaccaaaaatttgagcgatgaattgttgggatcaggttcctgttggcatctcagagttggcgatgacaacctccgcaatgctcattgcatcaaaagccaaaagcctttgattcttagaaaagctaaaaagctggcccgttcgtggttgctgctatcaagttgtgagtgctgaagatggattcggaaggcgagggtgttaggacaccaaagatgggagt

SEQ ID NO: 23274 - DNA, 499 bp, Glycine max
cttgggtttagcacagttaatgagatggttggccattccgatatgcttgaatttgataaggacgttgttaagagcaatgagaaactagagaacattgacctctctctattgcttagacctgcagctgaactgcggccagaagctgctcaatactgtgtgcaaaaacaggatcatggtttggacatggccttggataataagctcataagtctgtctaatgctgctttggaaaagggtcttccagtatacattgaaactccaatatataatgtaaaccgtgctgtgggaactatgcttagccatgaggtgactaaactgtaccacctagctggtcttccaaatgacaccatccatattagatttactggcagttcaggccagagctttggtgcattcctctgtcctggtatcactttggaacttgaaggtgatagcaatgactatgttggtaaaggattatctggtggcaagattgtagtgtatcctccaaaagaaagta

SEQ ID NO: 23275 - DNA, 534 bp, Glycine max
gaatgggcagctccattttttgccttcaccttatcctttcatcattttttcttttcactttcttgctggcagctgttaatggcagcaaaaagtgttacattgtatacatgggagctcattctcatggtcccagccctacgtctgctgacctcgaacttgccacggattctcattatgatttactaggttcaatctttggaagtcgggagaaggcgaaagaagcaattatttactcatataatagacacattaatggcttcgctgcgctacttgaggaggaagaagcagcagatattgcaaaaaacccaaatgtggtgtctgtgttcttgagcaaagaacataagttgcacactacccggtcatgggaatttcttggactacacagacgtggccagaactccgcatggcaaaagggaagatttggggaaaatacgataattggtaacattgacacaggtgtttggcctgaatcccaaagcttcagtgataaaggatacggtaccgtcccatcaaaatggcgcggaggcctttgtc

SEQ ID NO: 23276 - DNA, 337 bp, Glycine max
gaactggggcagtaactattcgggtggctggagttttgaaagactggttacttatcactctttcaactgtcttatttcctgaatcaaagattaccgggcttaatgttattggctatgctattgctttaagtggtgttgttttttacaactaccttaaggtcagggatgttcgcacatctcaacttcaaagtatccaagatgaatcagcaaaggagctgcagacggagaagaaagcagatgatgccatggacaacaaagatgaggcttcatggaatgattcagtttctgatactcatttagatgaagaagcacctctaatctcttcgcggatatctca

SEQ ID NO: 23277 - DNA, 485 bp, Glycine max
  unsure (1)..(485): unsure at all n locations
acgagcttccatttgatgtaaatgcaggttccgaggggagaacgaccaatgagaactgcatttctcaaaatgttacttttacgattggaagtgaaaagataatttgtgagagacaaaaaatttcggaactttcggcaccatttcgtgcaatgctcaaggggcatttcagtgaatcactctccgagactatagatttgtctgaaaataatatctccccctcaggtatgaaggcaataagtgatttcagtttgaatggcagtttaattgaggtccttccaaatcttttgttggagatatcagttttcgcaaacaagtattgttgtgaaagacttaaagatgcttgcgatagaagacttgcatccttagtttcctccaaagaagatgctgtggagctcatggaatatgctcttgatgagcattcaactgtccttgctgcatcttgtttacaagtncctttgcgtgatcttccaaactgtttgaatgac

SEQ ID NO: 23278 - DNA, 493 bp, Glycine max
gacgactggggcacaattttgttggaacggaacagattctattgggtcttattggcgaaggaaccggcattgctgctaaggttctgaagtcaatgggaattaatcttaaagatgctcgggttgaagtggagaaaattattggaaggggtagtggatttgttgccgttgagattccgtttactccccgggcaaagcgtgttttggaattctcactggaggaagctcgccaacttggtcataattatattggatctgagcacttgcttcttggtctccttcgagagggtgagggtgtagcagcacgtgttcttgaaaatttgggtgctgatccaaacaatattcgtgctcaggttatccgcatggttggtgagggtgctgacagtgttggtgctactgttggccctggaagtagtaataacaataagatgccaattttggaggagtatggcacgaatttgaccaagctagcggaagagggaaaattgggatctgt

SEQ ID NO: 23279 - DNA, 349 bp, Glycine max
caaaagaagagggaactagtttctgcattctctgtttctggtgttgttcacttgttctcttcatttcaagtttcaaccttaatccttccgaaccaacacataaaaatccaacactctcttcttcttcttctctctccgcgggttcaattgaacctcacaaaaccctctttctctctctctagatctgttcaaatcccgaatcatttccgctccaatttcaatttccccgaacaagagcaaatcctaaccctttctctctgtatgatacctgattttttccctcaggcgtgtagttatcgtgccgatttgtaaattctatcggtagtttaggttagaattgttttttgtc

SEQ ID NO: 23280 - DNA, 398 bp, Glycine max
caattgtttccctccttgtacattttctctttgtcgtttctaccctttttcctgttcattcttcacaatttggtgaccaccaccctgttgcaaatcaaacttttcggccgaaggaagagctgcgcaagttgaacgccatcagaaatcggcttcagctaatcaacaagcctcctgttaagacaattcagagttcttatggtgatataatagactgtgttgcgtctcatatgcaacatgcttttgatcatcctcaactgaaaggaaaaaaccattggatcctccagagagaccaagagggcataaccaaatggatgatgatttgagtgatagctttcagttatggagtttatcaggtgagtcatgtcctgaaggaacgattccaattagaagaacaacgg

SEQ ID NO: 23281 - DNA, 566 bp, Glycine max
aagcaattagaagttctttgcagcatttatgctttgtttctacttcataagcatctgggtgattttctttccactggctgcattaacccaaaacaaggatcacttgccagtgagcagctgagaaacttgtattcacaggtccgtcctaatgcaattgcgcttgttgatgcatttaactacactgatcactaccttggttcaattcttggacgttacgatggaaatgtgtatccgaagttgtacgaggaggcatggaaggatcctttgaatgattcagttgttcctgatggctttaaagagtatgttcaaccgatgcttaagcaacaactacgtaatgctaggctctagttcattttgtggctatgatgctctctttgcatccaagaaacttatccactattctaatgcaagtatgcaactgttaataaagttgtgtggaacgataaataaaattgcttgagtacatacgaatgggagtttgttacccagctaatttccatcgcaattaggtgtatctggaaccggaaaaactcatttatttattacattaacgatccttgatgtct

SEQ ID NO: 23282 - DNA, 403 bp, Glycine max
gaaacttgtattcacaggttcgtcctaatgcaattgcgcttgttgatgcatttaactacactgatcactaccttggttcaattcttggacgttacgatggaaatgtgtatccgaagttgtacgaggaggcatggaaggatcctttgaatgattcagttgttcctgatggctttaaagagtatattcaaccgatgcttaagcagcaactacgtaatgctaggctgtagttaattttgtggcaatgatgcttttggcatctaagaaatttacccagactattctgatttacaactcttaataaagttgtgtttgccagctagtaattaccatcgcaattaggtgtatctggaactggaactggaacaaactcatttatttattacattaacgatacttgatgtct

SEQ ID NO: 23283 - DNA, 625 bp, Glycine max
ctcaacttctccacctccatcccgcgccccctcctcgaagacctcgccgccggaaccctaaattcggattcgattcagcgagtctccaaggttcacgatcagtatctggaattcgtaaccctagaggataaccttttttcgctggcccacaagccttgttatgttcaactcaacgacccttccgctggggacaaggaaattgaggagcttgttgagaagatcgttggtgggttgttttgtgtgttggccactcttgcggttgtgccggtgattcggtgcccgcgtggcggtcctgcggagatggtggcttctgcgttggatcagcggattagggatcatttgttgtccaagaataacttgtttactgagggtgggaactttgtgagctcgtttcagcgtcctgtgttgtgtatttttgaccggaatttcgagttgccggtggcgattcagcatgattttcgctaccggccgcttgttcatgatgtgcttgggttgaggctgaataggctgagtgtgcagggggagaagggtgggatgaggtcttatgagttggacagtgctgattcgttttgggttgcaaatgggtcgctggagtttccggaggttgcggtggagattgagacgc

SEQ ID NO: 23284 - DNA, 428 bp, Glycine max
caagaacctaaaaaacaaagtcatggctgtgtgctcaataatgctgctgctgctactttttacgcttctcattgcagcaactaaaactcaacccatgtcaaagccaaactgtccaacaaactgtggctctgtcacggttcccttcccatttggcatgactgaggattgttccttggacgcttcatttctcgtctcctgcaaccgaacctcttcttcatcacatgtccttttcttgccacaaaccaacataagcgtcctaaacatctcactcaatggcgaactgcagatttcatggccagtagccagcgactgctacgccgaaagaggtaaactcttgagtcaaacaatccaagacctaagtattacaagcttccagctctcttcgaaccgaaacatgttcaccgtactcgggtgcgacacgcttggac

SEQ ID NO: 23285 - DNA, 384 bp, Glycine max
ggacactcgaatggtaggcaccaacagcgacgatgaagttattcaagtttccttctaatttaacgaacccaccattcgagtttccttccaatttcattttctattcccactcatcgtcgctgacgctgacatagatgatgaagttattcaagttaaacttacacacttcacattcacatggtctttctctgcaatgccaatgccaatgccatctccctcattccaacccctcaaatccccccacaacctctgcatcgtcaagtccctcctctccaacccttccctctccgacgccgtttcctctctcgacctcttgcgcctcaagggcattcgcttaccctctcacgttctcgccaccctcttgcgccactgctccaaaaccag

SEQ ID NO: 23286 - DNA, 396 bp, Glycine max
agaagacaagccatcggactgttgtcacttcagatgtacggcagcaaatcctaacaatgaataagaaggcaagggaagaatgggagaaaaaacagtcagaaacagagaagctccggaaactaaatgatgtagatggtaatgctgggattgatggtgacaaggagaaggatgagggtcgcactaaagcaacgaaggtgaacaaagaagtggatgacaagatgaggacaaatgctgctaatgttgctgcccgagctgctgttgggggagacgacatgctgtcaaagtggcaacttatggctgagcaagccagacagaagaaacgtggagggggaatggatgcttcatctggttctcagccagctaaagatgtgagccacagatcttcatcaacatctg

SEQ ID NO: 23287 - DNA, 399 bp, Glycine max
tcactacactgctccaaacaaaaccctaaatcagcgactagcaatggcttcctctcaattcctaatcatgaccacaatggcggtctttctcgccgtcgtctccgccgctcacgccgccgatgcgccggcacctagccccacctctcccgcctccgtcatctctccgtccttcgccgccggttttctcaccgccgccgttgctctcgtcttcggatcttctctcaggatctgaacatgttgcgcttcggcctctggattttcattttctttctaatttttttttgtgtggatttatcagagatcgaggcttgactagtactagagtattgatgtgcagagactttatgtgttcgtttctggatcttaagtaattttgctatttcatggctattatcattc

SEQ ID NO: 23288 - DNA, 416 bp, Glycine max
  unsure (1)..(416): unsure at all n locations
tgaaatggtaccgtaaacccaagcttgactctgcaccactccacccatgaaagacaaaaccaccctcaccacaccactctacatcactccacccatgtttttctgaacccacttatttctttcatgatggccgttcgagcagtgacctcctgctccctcttccgcccttcctctccgcccctcttttcctccgccctccgtttcttcccctatcgctcccgcggccccccttccctctctctccgctatggggcccacacccagacgcgctccgtccaaagcctcttcaacagcctcatggaggagcttcgagccgcgcgcaaacgccgccagaagcgcgtcttcgccgccgcttncaaccgcatgggattgttgaatgaagagcttgctgaagatagacttgtgaaccattcatt

SEQ ID NO: 23289 - DNA, 481 bp, Glycine max
gtctttaatcgagtcgaattggatcttgtgatttacttagccgacttcacttagtgcagtgggattagagttaagacatttgttgttgtagtatttattggtttttgggtgggtttataatatattaccagggttaacataagaacatttattcatagttgaacttgtgttgtgctactgttgtggttggtcagagaatgtctaggcctctgcaaagaggtgtgtcaggtggggttagggtccctgagagtggccatgatgacttgtgggactcccaatctaaagataaaacggaaaaggaagatttggatacgaggggttcttcagatcacagcccttttactttgaggtttcctctgagggttcttttgggaaataattctgattcaaaatatggcaatggcatagctgagaatggttttgcttctgatcccttcatggttggcaccccacgaagccggcttaagttaatgttgctttc

SEQ ID NO: 23290 - DNA, 321 bp, Glycine max
gttcagacaaggaggaagagtttcattggctaatcaagtaaggtgtatccataacatgatgtaatcattttatttgtatttgtggcctattttatgtgaaaagtaacatgtgtaataattttatttgaatttgtggcaaaatttcaaaattactggtgtcatgatgctgtaactgtgtggtgacggtagggttatgtttggacaatttaaatggactgatgggttgaaaggtggcatttcaaaatagttagatactaaattgtcagacatggatagatttatcataatttaggtgcataatgaagtgatgaacagagccat

SEQ ID NO: 23291 - DNA, 296 bp, Glycine max
ttttcatctttccttccggagagactctaaaccaccggtgatatagtaattgtatgttggtgcatcttgcagttgcaggcatttggagcctgaagagaagagaagacgattagtttctgcgaccatgatgctggatttgggtccgttctcgaatgagaacttcgacccgaagaaatggatcaactcagcgtgtcagagtcggcaccctcaggactctttggacaaacacctggtggacatggagatgaagctccagatggtgtccgaggaaatcgccgcttcgctcgaggagcaga

SEQ ID NO: 23292 - DNA, 330 bp, Glycine max
gccctgtcaatcgcaccagcgaaagcacaaaatcgaattgaaggcaaagagcgcggacggagcgtcgtagttcagaggctcccatcccatacccatgagatccttctcctcttccctctttctccttctcttcttcttctcttcttcactctccaatccccaaaatgcccctctctcactcaaaggtgttgatattgaaaggccggttttggagttctccccttccgttcttcccggtatttcgggttctctaggtgttaaggacgctttacgatgcgagcgtgttcgggtttcgggcatctcgagagtgaaacttgggagctacgctaa

SEQ ID NO: 23293 - DNA, 400 bp, Glycine max
caacattctattcctttgcctggtcagctccagccacatcagcagcttctatctcaaaatgttcaaaataatgttgcgtcgcaacctaaccttccacctgtatctagtctagcccagactcccagccaaaatattgtccagaactccaatatacaaaatataactgggccaaattcagttgggaccactattagccaaaattccaacttacagaatatgtttcctggttctcagagacaaatgccaggaaggcagcagattgttcccccacagaattcacagcaatatctttaccaacagcagtttaagcagaagctccagcttcaatctcagatgcagcagcaacaacaaaaccttctgcaaccaaatcagttgcaatcttctcagcaatctagtatgc

SEQ ID NO: 23294 - DNA, 266 bp, Glycine max
  unsure (1)..(266): unsure at all n locations
caaattttcacaatattgacaccaaccaatagataaaataatcacaaggaccagatttgattatttanaaaaaatgaccacccagtcacacctcctccactgcaaaacaggttgagaaatgagaatcagaatccaaaacagaagccaccatctaaaaccccgcgtggtgaaaatccaaaaatgttcctgttccagaagggttctcatctccatcgtctccttctgtcaaagaagtactactaccattttccgcttccacgcaacgc

SEQ ID NO: 23295 - DNA, 670 bp, Glycine max
tgctactttggaattgaaaccaagtacttctggaacatgctgctggtgttatggtgttgtcctatggtttgatactggattttcaagcagattctgccgagaaacaccagccgtgttatccacatccccttacatgccaagaacacattggtcacagacaatcttaacctttcgagaacctattgcgatgggatttggaaaaggaaacaggggtaaaccagaagcaatcggcactgaggtgtatcctgctacgaagattgatttacgtgtcagcattgtgcgttctactgagcatcgcagcattgatatatctttagaagctgctggtgttgaacctgatggtcagaaacgtagttggcctgctcagctttttaatctgcaggaggatgcatgacaccagtcgccacagcaccaaagatcattgtgcagcagtttttcttgttggctgctagttaaaatcagttttggaatgttacagctgtaattgctaacatttaggttcctatttttgttcactagaaatagctacttttgcttgctcgttgaatgctaggctctacccggccggtcctattacatagaaaatgtaatgtttctccaattcatatttatgtatttgacaaaacttgcgagcagtactgttttccaattaaaatcggtcattcatttc

SEQ ID NO: 23296 - DNA, 685 bp, Glycine max
ctatatcctcctcttctatttgaagcattgctctctcctcctatcaatgaaatcctgcataagcctaaggctaaggctaagccttccacctgctagaaaggcatggaagagcttcacttccacccttggtaagcttcataggtccaaatccaaagccatgaagaaacccagaaagcattattcaaaaaccaccactaaaaaggttaccaaggcccctcctaagttccttgctaccaaacgttttcgtcgcaaaagattagccttagccacagtgagaagcttcatcttcgggttccacaagaagcctgcacctgtgtatattgacaagctctttagagagccttcatgtgacttggtggggcatttgaagccacagtcagcacaaaaaccacgaactgaaaggctctctgggggagaaggaccaacaaagggtggtggatcttgcacttcagaatcagatggcatgtgggaatctttggctttagcttcacctcaaatgcaaggaatagatgaacgagcagaggagttcatcactagattcagacaagagatggcggagcaagagatgatagcaagaaatttttagcaagacatgtttcactatgctatagttgctaaagtccagaatcttagtaaagttgtagtgtaataactgtcaagtatacatctttttagcttgttgatg

SEQ ID NO: 23297 - DNA, 608 bp, Glycine max
cacgcttttaaaacttgttcttttcttccttccttctctgttcctcacatcagattctttttcttttcttttatttctctctgcaaatcagattgtgcaatgtcgatgagcttcttggtctgtgatcagggatatcattcttaataaaaacaacaaccacactttctccgtttctcgtggttcatgctatggcggcagaggcggctttgttcttttctgtggcatcagtggtggaggacgtgcttcagcagcacggtcctcgcctcaaagatcttgatttggaatctaggaaagccgaagaagctgcatcaagaagatacgaagctgcggggtggttgagaaaaatggttggagttgttgcagccaaagatttaccagcagagccctctgaggaagagtttaggcttggtttgagaagtgggattattctctgtaatgttattaataaagttcaatccggggctgctcccaaggttgtggagagtcctgttgattctgcattgatccctgatggggcaccattaaccgcatatcagtattttgaaaacgtgaggaattttctggtagctgtccaagaaattggaattcctacctttgaggcatctgat

SEQ ID NO: 23298 - DNA, 327 bp, Glycine max
cctcgagccgattcggctcgagtgccaatgagataccagttcatgaccagaggcttcaatatctggcctttgcaagttggttaggaattgttctttgcctaggttttaatgtagttgctgtgactgtctgttggattagaggcggcggtgttaaaatttttttccttgcggttatatatgctctacttggtgttcccctttcatatgttctttggtacagacccctctatcgtgctatgaggacggacagtgcactgaagtttggttggtttttcatgctctacttgcttcatattggattttgtatctttgctgcaattgcacctc

SEQ ID NO: 23299 - DNA, 453 bp, Glycine max
  unsure (1)..(453): unsure at all n locations
tcatttgaggacttttttggattaggaacgttgtggatggcagtgaaaaaactggaagtctgggagatagtgagtcagggatctttgcagggtgatgtttgtgtggctgatccagatcagttctgaagagtgggtgttttcttggaaatagagtatttcaaaatatcgcggctcaggaatataaggttttgaattttctaatctctttgttttatcggtaataaagactatctgatcttataataatacttttcacctcatccttctttgcattatgcctttatggaagttaccatatttcctgggttttcagtataaatagagtctaatcttgttcctttggacttctttgatttgattttttcttcttcttacttttgttatatagctttgctagcatattatagacatttcagattgcattctgtcncttttctcttcgcatcttgttgg

SEQ ID NO: 23300 - DNA, 520 bp, Glycine max
tcatttcatacagaagttaagatattgagcaacattcgtcacaaaaacattgtcaaattgatgtgctgtatctctaataaggactctatgctccttgtctatgagtatgtggaaaaccatagccttgacaggtggctgcaccggaaaaataagtcatcaaccgtgtcaggttcagtccatcattctgtccttgattggccaaagagattgcatatagccattggagctgcacaaggtttgtgctacatgcatcatgactgctcaccgccggttgttcatcgcgatgtgaaaacaagcaacattctgttggattctcaattcaatgcaaaagttgctgattttggtctggccaggatgttgatgaagccaggggaacttgccaccatgtcagccgtggctggctcattcggctatatggctccaggtgaatgacttgccaaaatttttgtttccttcaaaataaatataggacaaaacttacatacgttacttttaagaactatttatgccaatattctct

SEQ ID NO: 23301 - DNA, 492 bp, Glycine max
tttatagttacacacaaaagcttagccctaagctaggccagcatcttccagcaccaatttgcttggatcggaattagggttttgaaattgatgggtacggagagaaagaggaaggtgagcttgttcgatgtggtagacgattccgcggcaaagatggcgaaaaccaatggcggcgctgctaataatctcatcaatcactggacctcaaggccttactcccaaaggtacttcgagattctggagaagagaaagaccctccccgtttggcaccagaaagaagagtttttgcaggttctcaaagataaccagactttgattctcgtcggtgaaactggtagtggcaaaactacgcagattcctcagtttgttttggatgctgtcgaattagagacaccggataaacgtaagaagatgatgatagcgtgcactcagcctcggagagtggctgcaatgtctgtttcgcgtcgtgtggctgaagagatggatgtaact

SEQ ID NO: 23302 - DNA, 199 bp, Glycine max
cattttctacatttagggtcttgcttgatgaatgatgacaaagggggcatgaaagaacatatttagcttataaacgtgactgatgaccttcctataacctctttttaagcttatttcaatgaattttacattggagcttatcaaaacaagttctttttagtttatcaatgagctcctcgacaaagcttatggataatct

SEQ ID NO: 23303 - DNA, 780 bp, Glycine max
  unsure (1)..(780): unsure at all n locations
ctcgagccgctcgagccgctcgagccgaatcggctcgagctcgagacgcattcattccttttactgatgacattganctgaccacagttactacttcagtgatgggtgttggagatattggtgacgtgaaaataattgatctacaggctccaattagtagccttattggaaaacaagtggtgaaggttggaagaagctctggcttgaccacgggagtagttttggcttatgccctagagtacaatgatgagaaaggtatatgctttctgacggatcttcttgttgttggtgagaaccaacaaacttttgaccttgaaggagacagtggaagtctcatcatgttaaaaggtgacaatggtgagaaaccacgaccaattgggataatatggggaggaactgctaacagaggccgccttaagttaaaagttggtcaacctcctgagaattggactagtggggtggatttagggcgtcttctcaatctacttgaacttgatttgataacaactgatgaaggacttcaagtggcggtgcaagaacaaagagctgtgtcagccacagtaattggctctaccgtgggcgattcctcacctcctgatggtgtacttccaaaagataaagctgaagacaaatatgagccacttggtcttcacattcagtccattcccttaggagttgtacctagtagccaagacatgaaaccatcaattatggagactgaatttaaattagaagatggaatcaatgttggtcccagtatcgaacaccagtttatcccga

SEQ ID NO: 23304 - DNA, 329 bp, Glycine max
tctagatctctctgatttggatcctccgaatctcccctcttttcattttcacattcttcttattatttattcacccttttccccttccttcaccattcatttccttttataataccatatcttttttctctttatctctctcatcaatacttcatcgttttcgttaagggatggcttctgccggcgatgttttcaggcagggtttgccggaagtttgtgctgccgggaagttacacgtgcttgctgttgatgacagccacgtggaccgcaaggtcattgaacggttgctcaaaatctcgtcttgcaaagtgacggtggtggagagtgga

SEQ ID NO: 23305 - DNA, 338 bp, Glycine max
ctctgagagagtctggtgatgagagtgaaggaaaatctattcataagatcatacctaaggctgaagcctggattcaaaggaaaacattatcatggccgtggagaacaaaagatcgagaaggatcagatgcaatgaatggtcgtgttgctgggtcctggagacagaatgatcaagaaaatgaatcagttaatcagaagattctttcttctggcttgaagcaagaaagccaggcaggtgaaagtaattgccctactaacaatgaggcttcaggatcctggtcctcctttaatgttaacagcacaagtagtgccagcagctgtgggagtcctggcagtggt

SEQ ID NO: 23306 - DNA, 267 bp, Glycine max
ctgcttactaacacgtagagacacacacacacaccatttccctcttccatcttttccttctaccattgttgtctcaaaactctctctttttcatcttctttgttttgggtttccttccattttaagttgcctgacatggcttcgtacaccccaaagaatatcctcattactggggcggctggatttattgcgtctcatgttgccaaccggcttgtccggagctaccctgactacaaaattgttgtgcttgacaaacttgattattgt

SEQ ID NO: 23307 - DNA, 281 bp, Glycine max
tgagcaatagaaaaatctcaagtcaattaattaaagggagaagagagatcacctgcaatggaaagcaatactgctgaagctactcgtaatcgcatgtatgaggattttgagccttattgcaaatggcttacaaaggatggacaagcgactcttgagattaatttgaagggtttcaaaaaggagcaacttaagattcaaacctacgactgggggatcctaacaattcatggagaaaggcttgtggatgcatccaatgataaatggagccgtttccgtaaaga

SEQ ID NO: 23308 - DNA, 549 bp, Glycine max
acctcgagcttgccacaccaccgccgccgcagagacaacaacaacaacaacacgttccattctcgaggagagagtggttgggttcgatggagaaggagttggtggaattgtacgaagcggcgaagaaggcggcggatgctgccatctccggcgacggcaaacatgaggaaagccgatgcatcgatgcgctcgagcagctcaagaagtttcccgttaattacaagattctcgtcaacacccaggtgggtaaacatcttaaagttttgacaaagcacccgaggctgaaaattaaggcctttgctattgacctaattgagatatggaaaggcataattatcaaggaaacaagcaaaaataaaaatgggggctctgatagtaaggttgagtcggctaatggggagaaatctaaagctgggaaaatgcaaaagagtccttcggtaaaggttggaaaaggtgaaactggtaaggttgagaaaattgataggaatggtacaacaaagtcaagctcagaaaatatgagaaaggtacataacgatgtcaagaatgaga

SEQ ID NO: 23309 - DNA, 570 bp, Glycine max
ttctcattcttaaaaaaaaccctcattattccatcaaaactagctacaacaacatgtcgaacgtgttagcaggagaagaaagcgaaaaagttgttacctatgggtgggcagctagagacacctcgggaattctctccccattccactttatcagaagggcaaatggtgataatgatatcacactcgacgtactctattctgggatttgccacaccgatctccacatggtgaagaacgactttagaatatccatctatccaatggttcctgggcatgagattgtgggtaaggtgacaaaggttggtagaagagtcacaaaattcagtgttggtgacattgctggtgtgggtggctctgtgggttcgtgtggctcatgttcggactgcagcaacggcttctatgtatattgtccaaaaatgattttaacctacagtgcacactattatgatggaacaataacccaaggtggatactcaaataacatagtggttgatcagaactttgtcgtgctaatcccaaaatctcttccattagatggtgcagccccgttgctatgtgctggaatcacag

SEQ ID NO: 23310 - DNA, 925 bp, Glycine max
aacctatccaagcccagtagattttggctttggcatcgttgaacaatgcagtgagcacgataaaattttgcagtgtatcatgtctgagagtgctgaagctgggataggtggagtacatatatctttgttgtctgacttgatggatttgcaattgtcaagcattgatgaacctcaaaaaccattgacacctcttatcccaaaaagcaaattcttcatcccgaagcttttgcttgatatttttcaagattcgcccattagttcaaagattacagttcatccagatggtcaagtcacttttatggacactgcaattgagataaaagatcttctttctgtagttgctgactcatacttattacgtaagggtgaaaaacaatctatgcttgttccacacttcagcaggatgagtatcaacgaagtagaagtcagaagtctttcctccacattggatattcattctacattgactgttcctttaaagagtcctgagaaagtgaaagtcaagccatcacaaaagaagaacaagaaagtagccagagagagggatctcttcaagaagaactacttacatgcatgtgagagccttctgtccctaatggttgacaagaggcgacaccggaaaacagcaattctctccctgaagaaatctggtcccgagcttcctgagctcctcacacaattttctgccagcattgccggtactggccttgctgtcctgctatctgtgatctgtaagctagcttgtggaaggggggttcccttttgtgcttataagctcctcaacactgggtttggatttgggctggtttggctttcttgggcagttaataagctaagggatacaattgtctgcatgaacaagaatgcaggaaagcttggactgaaagatgaggaaatgattcaaaaggtcgacaagagcctaaga

SEQ ID NO: 23311 - DNA, 273 bp, Glycine max
tccgagttcaagaaccatttttgaatgccactacaatggctggtaatacaggaaataataatgcagcagtttcagggactcatggtcgccatgcaagggacccctcaactaatccctccaccactagttctgaagcaactgctggttctcccttacccaatactaacccgcttccaaatccttggtcctctacgggaaccggaggggctcaaaataaccccagaaggtcgttgactactggtgtggatgccagacagcaaggacctactggct

SEQ ID NO: 23312 - DNA, 287 bp, Glycine max
tcggcggcgataacagttgttcgccgtcgcataacccccgtttccactccacggtggcggtacacaaactacggcgtttcaacttgcttattctcgtgttccgcctcagctccttctccttctccctcgcctcctccgttttcatgctcaccaacactcgtggctcctattctcctcactggaaccactacgataccttcagattctttctggcggctaatgcgatagtggcggtgtactctgtgttcgaaatgggcgcgtcggtgtgggaaatttcacgaggcgta

SEQ ID NO: 23313 - DNA, 290 bp, Glycine max
cgaaaatgtagtatttggattgttgagattaaggctaggatctagctcctctgaagtgtaggtgagctttagagggaatagcgaggggttgttggattatctagagtagagtagattttataatctaagcctttgattttataatcaatggttataaagctggattttcccttttgatgtgcactcaccatacagaagctaaattcataatgctacatgtgggaaaactagaatgaaaatgattttggagcatctaaatactcgtatctgtgaccttgccatcttgaaat

SEQ ID NO: 23314 - DNA, 164 bp, Glycine max
actcccacgtaggaggaccattctacttggcctaggagggctttgtggtgctgctgctactcttctcaacatcccttttgccaatgctgccccaatacttggtccagacctactcacatgtgctcaagcagaattacccgaaggtgtagaacccaccaattgtt

SEQ ID NO: 23315 - DNA, 524 bp, Glycine max
attgaaggtacctctttttgttgcttgaccctcaatcaaagacccatcttttccgtttggcgtagggaacttcaccactgaagccctaatcccaccgtatccatccaccgcagcacacacccccttttgctgcttcttctcttccaacatgggtcgcgaaactatgtgcctttcaaccccaccaaccactgccaccaccacagtgaacccagtgccgccaccagcaccagcaccacctacctctcttgctcctggcttcaggttccacccaactgatgaggaactcgttatctattacctcaagcgcaaggtttctggcaaaagcttccgatttgatgccatatccgaggttgacatatacaggagcgaaccctgggacctagcagataagtcaaggttgaagactagggaccaggagtggtattttttcagtgcactggacaagaaatatgggaatggtgggaggatgaacagggctaccagcaaagggtactggaaagccactgggaatgatcgaccagtga

SEQ ID NO: 23316 - DNA, 739 bp, Glycine max
gaaggatgggagattcaggtcaaaacgtgatgcaagaaaaggaggtgggaaaaaaggcaaaggtagaggaggaggtggtgggggtggccgaggtgtgcgaggagtggattttggcctgggcattggatataatcctgagtcaaataatgcaccatctaccacagctcccagtcgatctgccgctgtaaattctctgcgaacaggaatgatgtcacaattcaagagtaactttgttgctgcttcatcaaactctcagaatcaaggctttggtaacaatacaagcatgactgctaataagagaacagcactccctggttttgtatccggtggatcaattggtggtgacataaatacttatcagagtactgcttcacccaatcctgctacatcagcggtaatttccaccagtcaaggttatggagtaaatcctggtcagaagagcacgaacagttctaaacctaaagaaaggcggaggccatcaggttgggatagatagtttgttgtcacattgaatgacaccactgtcaaatgtatcaatgttcctatatttaggtcaagtcaagaattgattttatttgtataaataatgctccagttttcaatcacctatattattttagcttccaagatgtagaaaggtttgaggtttgtttgattctatttttgtttttgaaagcagtattgcacaactaaaatgcctcttatcctacgaagcacgtttcgattaaatggataatca

SEQ ID NO: 23317 - DNA, 1102 bp, Glycine max
cttcattccatttcctctttctctttccattgttctactttttcagtcccaccaccaatggcactccatgatctacccttcacacccatgaccaccatttccctcttcatcattctattttctctattttccaccccttcccattctgccctcacttgtgcttcccagaagctcaaccgcacctacgccaactgcaccaacctccccaccctcggcgccaccctccacttcaccttcaacgccaccaaccgcaccctctccgtcgccttctccgcctctcctccctccccctccggctgggtcgcctggggcctcaaccttgccggcggcggaatggccggcgccgaagccctcctcgccctcccctccacctccggctccgccgtcaccctccgccgctacaacctcacctcctacaagagcatcgacgtagtcaaggccttcaccttcgaatcgtgggacctctccgccgaagagaccaacggcgccataacgatctacggcaccgtcaagatccccgattcggcggagaacgtcagccacgtgtggcaggtgggtcccgttgcggcgggggtgcccgcggtgcacggcttcaaggacgacaacattcacgccaaggccgctctccccgtcgcgcttgcggggagcagcggatcgtcagcagcgagtggcgaaaacgcgaccacacccgcgagtggggacaagaagaacggtgctgctgctgcggagaggcttgggttgggttttcacttttggttggttttcgcattgatggttggtgttgttgctctttgatgtgattttatttcaccttttacccttcgagaagggtcattcaataattttcactgtactgggacatttgcattttttaaaatatttattgtattgtagtttttttatcttttatttttctgtacgcgttgttttgggggttttatttggggagggtagatccgttgatgggttgtgcctgttcggttagaaattctgtttttagaatgaacgtgtagttattggactcagatttttcgttttatgggatattgtagttgttacattttcgagattttgatatgatgataacattgtaatttctgtt

SEQ ID NO: 23318 - DNA, 420 bp, Glycine max
  unsure (1)..(420): unsure at all n locations
ttatgagttccattgggaacaaccctaaaatacaccctcagtggcagccagagtacttcggcgacgccatcattgtcaacggcaaggcgtggccgcgcctcacggtgcgacgtcgtaagtatcgattccgcataatcaacgccagcaacgccaggttctttagattcttcttcaccaacggcttgagattcacccacgtggcatccgattcggcttacatcgagaagcccgtaaccgccaatgagacgctggtggggccatctgagatcacagacatcgttgttgacttttctcggtccaagagtaacgtggctattctagctaacgatgcanaatatccttacccttctggtgaccctgttaacgaggctaacggcaaggttatcaagtttatcatcatacctgatcatgatcaacaac

SEQ ID NO: 23319 - DNA, 670 bp, Glycine max
gggaaggagtacgggaagagcgtgtcggtgaatcagtttcaggtgaaggacgtgcgctgggatccggagctcggtggccagcacatggagctgcggttggtggagtattttgcggatcagttcaatgcgcaggttggaggtggaatcgatgtcaggaagttccccaaggctatggctaagttgaagaaacaggttaaaaggactaaagagattcttagggctaacacagcagctcctattgcagttgaatcgcttcttgatgacgtcgacttcaggagcacaataacccgtgagaaatttgaagagctctgtgaagacatttgggaaaaatcgctcttacctgtgaaagaggtgcttgagcattctggcctgtcattggaacaaatatatgcagtggagttgattggaggtgccaccagagtgccaaaattacaggctaagcttcaagaattcctcaggagaaaagaacttgataggcatcttgatgctgatgaagcaatagttcttggcgcagctctgcatgctgcaaatttaagtgatggaatcaaattgaaccgcaaactaggaatgattgatggttccttatatggatttgtggttgagttgaatggtcctgatcttttaaaagatgaaagctctaggcagctacttgtgccacgaatgaagaagg

SEQ ID NO: 23320 - DNA, 524 bp, Glycine max
cccgttatatgatgcaacaaacaaacgcagaagccaccaccgcttgcagaggtgagagcgaatcgccgtcgacgaacacaacaacccaaacatgtcttctcttcgaaacgccattcccaggcgtgctcacaaagagcgttctcaaccgtcgtcgaggaaaaaattcggcctgctcgaaaagcacaaggactatgtccagcgcgctaaagcattccacaagaaagaaggcactttgcggaaacttagggaaaaagcagcgaatagaaatgaagatgaattttacttcaagatggttagaacaaaaaccgttgatggagttcataaaccagagagtgaagcgaataagtatactcaggaagagcttatgctgatgaagactcaggacatgggttacattcttcagaagattcagagtgagagaaatgacattcgcaggctaactgcctcactgcactctatcgataatcagccggcggacaagcatgttttctttgctgaggacatggaagacgctgaagcagtag

SEQ ID NO: 23321 - DNA, 274 bp, Glycine max
acaaaaccctatttgaagttgagagaaaatggggtctctaatggcctctcttactctcactcttgtattggcaatagtttctctaagcttgtgctctcaagcctcagctgacaagtacgactattcatctccaccaccaccagtttacaagtacaagtccccaccaccaccctacaagtattcatctcctccaccacctcctaagaagccttactaatacccatcaccaccaccaccagtgtacaaatacgagtcaccaccaccaccttaccag

SEQ ID NO: 23322 - DNA, 492 bp, Glycine max
  unsure (1)..(492): unsure at all n locations
cgttgtttttggttcgtccgaatcctttctacgggggggggaactccccactctcagggttcagtctagaggccatgctgtgcatgttttcatcaatggtcaactttctggttctgcctatggaacaagggagtataggagattcatgtatactggcaaggtaaaccttcgtgctggaataaacagaatcgctctgctcagtgttgccattggacttcctaatgtgggagaacattttgagtcatggagcacaggaatccttggtccagttgcactccatggacttgaccagggaaaatgggacttgtcagggcagaaatggacttatcaggttgggttgaaaggagaggccatggatcttgcctctccaaatggtatctccagtgtcgcgtggatgcaatcagcaatagttgtacaaagaaatcaaccattgacatggcacangactcatttcgatgctcccgaaggagacgaaccattggcattggatat

SEQ ID NO: 23323 - DNA, 1025 bp, Glycine max
tcgtttatcactgcagtttgaggacaagccagattattcgtatttaaagagacttttccgagacctatttattcgagaggggtaccagtttgattacatttttgactggactatgttaaagtatccacagatcagtggcagctccagagggaggcatgtcactggcaaggcagctatgcatgcaggtccacatgtacaaaaagcagaaaagatctcagttgggaaagaaattcgagagaaattttctggtgcagttgaagtgttctcctggaggaaccctgcaaatgctagtcctcgtggtgatcacaccaaacatagaagttttgaggatgcaccagtgcaaaaggatttgcactatgcgcaacacaattccactcgatatggcagcagttcaagaagagccatgatctcatcgaacaggccaatatcctcaggtgaccatactggcaggcaaaccataactgggagccgtccatctggtgctcacagagttcaaccagtgtatgacaccaaacaagcaacttatacgcatggtggctctataagaggccgtgatgatcctctgcggaactttgagctcctcaatatcaggaagtaattaagtaaaggttgtgtctttttgttgttatattctgaattatgacactcctgagatgcaagatcaccttttattcaagaatagtctcaagcattatggaaagaaacccaagagttgaggtcataatggcatgatctcctgatatcagttttggacaaaggtggacttttttctgcccccagaattgttgtttcaccaggtttctcagccactgtagcgtgttcttaagacgtgccgaagagaattcaactgaaattcttttaatatttaattactgtactagatgagacctaagttgtagtacgctccatgatacaacaccatgttcttgtttcttaacaatgaggtccaacgctgcctgcatgttacatattaacgctgcccttaagaatggaatttatttacaagccaaaaaaaaaaaaaaaaa

SEQ ID NO: 23324 - DNA, 1145 bp, Glycine max
attgcaatagcaacttccaattcatttgcaatttagcggcaaagcaatctacagccttcaattaccaacaagaatatgaagcaaactctcttcttctccttccttctactcaccaccattttctcaatcaccactttagctcagtcaccagctgcagcccctaaagccccagcaaaacctgcccctgccacaccggctccagcgccggcaaaacctttagtcccttcattaccccagtcaccatcttcaggtgttgattcttctggaagccaagacattgtgaagatcctaaggaaggccaagtcattcaacactctaatccggttgctgaaaacaacccaaatcatcaaccaagtgaatgcacaacttgtgacctcgaaaaacggaggcttaaccatccttgcaccagatgatggtgcattttcagaactcaaagcaggttactttaactccctaggagataggcaacaaaaagcactgatacagtatcatgttcttcccgtttatgtgtccagctccaactttgatgctctgagcaaccctgtgctgacattggccagtgacagccccacagggtatcagataaacgtgacagcatatggtaacagtgtgaacatatcaactggggtggtgaatgccacactcacaggcattgtgtacactgataagacacttgccatatatcatgtggacaaggtgctcattcctttggacttctctaagcctaagcctatagctccagcacccgctgtggctaaagctcctaaagctgataaggagaacgcttcagcagaagatgatgaccaggctcaggcagccaaggacagttctggtgccatgagtttggttagtactcaagggacaaccttggtgtcctttggagttgctcttcttgcagcagcagctacaatgtcgagttgaagaacatccatttctccaaagtttctaatatgttttgaggactagcacgcaactgttgtggagttctgtttttgttgttttcttcttgaccagtgtattgaaaaggaaaagtggtgtttgtgagttatgtgaacctttgctctgttcttgttttgtcatcaagcgaaagaatatgtgattgttttattgtcaaagttaaaaggaatatctgcttgcttttgctt

SEQ ID NO: 23325 - DNA, 393 bp, Glycine max
ctttgcagtaacaacttcaaattcatttgcaatttagcagcaaagcaatctatagccttcgattaccaacatgaaaatcaagcaaattctcttgttctcactcctactacttgccccctttttctcaatcaccactttagctcaatcaccagctgcagcccccaaagccccagcaaaacctgcaccttcaaaacctgctcctgccacaccggctccagcgcccgcaaaaccattagtcccttcattaccccagtcaccctcttcaggtgttgattcttctggcagccaagacattgtgaagatcctaaggaaggccaagtcattcaacactctaatccggttgctgaaaaccacccaaatcatcaaccaagtgaatgcacagcttgtgacctc

SEQ ID NO: 23326 - DNA, 511 bp, Glycine max
gtattttcaaacattagcaaatagcaaccaaacatacaaagatgaaagaaacatgttgttgtgctagttttagttttggcaaggcaaagccttatttgttaacggtgggacttcaatttgggttcgccggtgcatacatcttctccgtcgctagtctcaaccatggaatgaatcgttacgtcttcgttgtctatcgcaatgccatcgctgcattggcccttgctccttttgcattgattttcgagaggaaaattaggccaaagataacactccctgtcttcttacagatagtggcactgggatttgtggagccagtgattgaccaagggttcactttcttgggcatgcaatatacatcggcttcatttgcctctgccataatgaatgacgtgccttctgtcacttttgtgctagccgtaattctaaggttagagcgtgtgaatgtaaaagaggtgcggagcctagcaaaggtgattgggacgttggtacctgcttcaggtgctttgttaat

SEQ ID NO: 23327 - DNA, 410 bp, Glycine max
ggattattcaagaagatagcctttcaagtcgccttccagtttatgagcaaatgggttgggagcatattgtttctcattggagaagtgcttttagcagagccggtgttgttgtgtttccagattttacttatccgatgttatatagtgagcttgacactggaaacttctttgtgattcctggatcaccagtagatgtgtgggctgcagaaagctatcataagacccatgcaaaggagcagctaagagaacttagtggatttggtaaaaatgatatgctggttctagttgttgggagctctgtcttctttgatgacctatcttgggactatgctgttgcaatgcattctgtagggcctctgctgacaagatatgcaaggaagtatgatgcaactgactcatttaaatttgtt

SEQ ID NO: 23328 - DNA, 423 bp, Glycine max
gcgaactggaaaatttaaaaaacaagcaaatgcaatagctgaatgggatcggaggattttgaacaatcgtgatgttttattgagacttgagattgaagtggcaaaagtagttgagacacagtcaaatttggagcggcagttggagttgatagagaatcatcaacaggaggttgataaggctttacaaagtatggaggaagaagcagaatgtatttacaaggatgagcgtggattactccttgatgatgaagctgcatctacaagagatgcaatgtatgaacaatctgaattgattgaaagggaacttgagcagatgactgaacaaatcaaatcaattatccaatcccttaattcgaaccagggtggagagcatgatacccttgatggaatgactccattagatgcagttgttcgaattctaaa

SEQ ID NO: 23329 - DNA, 424 bp, Glycine max
caggatttctcactcacaaattaaggtttaatgcaaaggatgatgatgccggcttgaaaagtgattctgtctctgcaaagaaaaaatcactgactttctcatcatcttttcattcaagatttcaacaccttgactctcagtcatcagtgaagaaattgtcagatactggtaaagagtcatccgaaactactgtggtagagactacatttggatcttcagtgaaacataacattgatactggatctcagtttaagactccaattaccttgccagcgaaacgtaaattatctgatttgaaggatatatcaatgttttcatcgtctggaaaacgattaaacgttggagatcaaggatttcgttctcctatttgttcaagtgtaattcgtaaaagctgcctgcagagtgactcttataaagaagacct

SEQ ID NO: 23330 - DNA, 647 bp, Glycine max
cagagaattagtccatagcaatggcagagcaagacaaggtgatcctacacgggatgtgggccagcccttatgccaagagggtggaattggcccttaattttaagggcataccctatgagtatgttgaagaagacttgagaaataagagtgatttgcttctaaagtacaaccctgttcacaagaaggttcctgtacttgttcataatggaaaggccattgctgaatccatggtgatccttgagtatattgatgaaacatggaaagatggtcctaaactgcttccaagtgattcttacaaacgagcccaagctcgattctggtgtcatttcatccaggatcagttaatggagagcacttttctagtagtcaaaactgatggagaagcacaacaaaaggccattgaccacgtgtatgagaaactgaaagtgctagaagatggaatgaagacctatctgggagaaggcaatgctattatctctggtgttgaaaacaactttggaatccttgacattgtgttttgtgctttatatggtgcctacaaggctcatgaagaagttattggcctcaagttcatagtgccagaaaagtttcctgtgttgttttcttggttgatggctattgctgaggttgaagctgtgaaaattgca

SEQ ID NO: 23331 - DNA, 368 bp, Glycine max
gttttctttgctattgttatgcttcttctccaggctaggcatcaaaaagttggggagaagcctcttctctcaatttctacattcgtgcaggctcctcgtaacaatgtccttctggcagttcccgcacttctgtatgccataaacaactatctgaagtttatcatgcagctgtattttaatcctgctactgtgaagatgctaagcaatttgaaggttttagtaatagcacttctgttaaaggtgattatgaagcgccggatttccatcattcagtgggaagctcttgctctactgctcattggtataagtgttaatcaactaagatctttacctgaaggaactacagctttgggtcttcctgtcacaat

SEQ ID NO: 23332 - DNA, 889 bp, Glycine max
gccatttcaagagtacagcgatcctcggactggaattctcaatcttgctgtgaagttgccagcccacgtcctgaaacctgacatgggtccaaaaacatatattgcatatgggattaaagaagagcttggtagaggagactctgtaacaaagcttcattgtgatatgtcagatgcggtgaatattttgacccatacagctgaggtgatattaactgatgagcagcactttactatatcaaagttgaaagaagcacacagggcacaaaatgagagagaacagtgtgcccaagagagggttgctgaccacctggaggatcgaccttacaaagacaacaaagaacatatagaaaataaggaagttcttgaagccaaaagcatgaagaaacaacctattgaaattgatggaaacatctttccaaataatgtgcttgagaggtacacttctcctgctacagagaatgaatcaatggaaactggtagtgccctatgggatatctttcagagagaggattctgaaaagttagaaacatatcttagaaaacactcaaaagaatttagacatacttactgttctccagttgaacaggttgtacatccaattcatgaccaatgtttttatttgacatgggaacataagaagaagctgaaggaggagcttggtgtagagccatggacttttgaacagaaacttggggaggcagtatttattcctgctggatgtccacatcaagtcaggaatctcaagtcatgcacaaaagttgctgtagactttgtgtccccagaaaatatccatgagtgtctgcgtttaacttaagagttccgccagcttcccaagaaccacaaggctagagaagataagctggagataaagaagatgatagtttatgcc

SEQ ID NO: 23333 - DNA, 576 bp, Glycine max
tgtagatgaggtagtagcagaagctggtaaggaagtggagactaagcaagaaattgtgcttgagactgccaagagtgaagaaacttcggctggcacggtcacagaagagaaaactgataaagacgaggaaactagcctcactgaaaatgctgagcaagttttatcaaatgtggaacctcaacaaaatcctggggaaacttctccagaagttgtgcttgagacttccaagagtgaagaaacttcagctgacacggtcacagaagaggaaactagtttgactgtaaatgctgcacaattttcatcaaatgaggaacctcaagcaagtattgtggaaccttctcctgaagcagcagaaaacgttgtcgaagaggttgatgacaagaaagaatcaagcatcactgacgtgattgaagcagtattaaacgaagcggctgacatcaagaaaactccagaacaagcctccatcgatgaggaagccaaaactgagctaaaagaagaaagagagatttctgttcctgctgctgtggaggaaaatgttgttgttgagttggttaggattcagttacagaggagaga

SEQ ID NO: 23334 - DNA, 443 bp, Glycine max
ctttggaggaagaagtgaagagtgtttttcttgacattgcttgttgcttcaaaggatgtgaattggaagaggttgaagatatacttcatgctcattatggagactgcatgaaatatcatattggggtgctgattgataaatccctcttaaagcttagtgtgcatggtacaatggtgacattgcatgacttgatagaggacatgggtagagaaattgtacgacaggagtcaccaaaagatccagggaagcgcagtagattatggttccatgaggatataattcaagttttagaagataacacaggaacaagtgaaattgaaatcatatgtctgaatttccccttacttgacaaagaagatatagtagaatggaacagaaaggccttcaagaagatgaaaaacctcaaaactctgattattaaaagtggtcatttttgcaaaggt

SEQ ID NO: 23335 - DNA, 243 bp, Glycine max
gtccaggtcagaagagaccagtgcaaatattaaatctgcttgtgcagttttggctgaattccctaaaagcataagcccaatagtcttgtgtattgttgattcagagccaacattgcaagataaaacaattgagattttatctcgattgtgtaaggatcagcctgttgttttaggcgatactatcgtgtcagcacctggatgtatatcttcaatagctaagaggataattagttccacacaaca

SEQ ID NO: 23336 - DNA, 626 bp, Glycine max
ggccattggtaccggcatttttgactatgtctgggtacaattctataacaacccttcgtgcagttatagccaaaacaatttagataactttctaaaatcatggagagagtgggccacatcattgaaagtaggtaaactgtttctggggttaccagcagatgaagctgcagctccggccggaggttatgttccggctgatgtattaatgtctaagatcttacctgaaataaacaagtcaacaaattatggaggtctcatgttgtggtcaaggtactacgataaaattagtggatacagtacccgcattcaaaatcctctaagaaatgggacagcaaaccctctatgcacacggaaaagtcaagcatgtaggagccatgagggcggtttcgcggagcttcttggttacatgtccacgctcggtatcaaagtttatgaagacgacaacaatggaacacagtgctgtgagatcatatgtaggaacaactgttcctgcgacgcgtttgctcccttaaatcacattaacaatactagtactggatgtcagatatggctcataggaaccaaatttgttagagcttctggaaatatagctctgccaatcaacgtttctgttgcattgctggaac

SEQ ID NO: 23337 - DNA, 515 bp, Glycine max
atcaaggaggttttggtacgtctacagtgagattcaagagaggggtcttttctgggcgtttgatcagatggtcgaaacaggtcaaattccctacgaggaaattcaagctcgcatgtcgaagaggaaaataagaaagcctattgatttgggtccgcaagagatggggaaagtgttgggtgaagttattgattccatggggcttgcacctgttcatttgattcttcacgattcggcattggggttgagtgctgattttgtttctgagagggctgagttggtgagaagcgtgacgcttatcgatacggcgtcgtctactaagggggcttttcccgtttgggctctggaggtgcctgtggtgagggaggttgtggtgggggtttcttttgtgtttgctaaggtggtggggttgtgctgttccaagagggttggtgtggcggattcggaggggtcgagggcgctgttgaagggcagggatgggaggagggcggttgtgaatgttgggaagagggtgaatt

SEQ ID NO: 23338 - DNA, 792 bp, Glycine max
agatgaggatcatctggcattgatgatggagcttcttgggaagatgcctcccaagattgcactaggtggtcgctattcccgagaatttctcaatagacatggtgacttgaggcacatcagcaatttgcgattttggccaatggataaggtgctgatggacaagtataatttcaatgagcaagacacaaatgacttggttgacttccttgttccaatacttgattttgtcccggaaaagagaccaacagctgctcagtgccttagtcatccatggatgagtgcaggtcctcggactcttgagtcctcaataactaccgtgcaacctgatgccatcaacgaggaattgtctaaaaggaggaagagggaaacggctgagaaggaggcagtggaaattggtttgaggaatatatccattaaagaaacatctgagcctctcaaagactcccaacctctaaagtcattcaaatagatacaaattggcttgtctggcggtatatgcaacctgttttgttttaatgggtcagacgacgagcttgtgacttgggaaagctcttcctggggcgaagcggctggatttctgtattgttgtaacctaacttatttcacctttactggtattacagggttagcttcaaattcaattgattaagggtgctaagttttagaaactagatattttttggtgtttggaactgctccccagattagagttttgtctttcagaaatacgacatttgttttggggggttgtccaattgtacttcaaatgagttaatccttgatttgtctagc

SEQ ID NO: 23339 - DNA, 586 bp, Glycine max
ctgacgcgtgggggtgcccaacagagattcttcttttaaggaagctgctgcttctgttgttcctcagtctcaccaccccagcagggttaattcagataaatcaaaatcacgaagtggcgcagatactaagaaggaaacaccagttccaaaggatggcccaacggcccatattgctgcacaaacatttacgttccgagaacttgcagctgctacaaagaattttaggccagaatgtttattaggcgaaggaggtttcgggcgtgtttacaaaggtcgccttgagaccacaggacaagtggttgctgtaaaacagcttgaccgaaatggtcttcaaggaaatcgagagtttttggtggaagttcttatgctcagtctcttgcatcatccaaatcttgtgaacttaattggctattgtgctgatggtgatcagcggctgcttgtttatgaatttatgccattgggatctttggaggatcatttacacgatcttcctcctgacaaggagcctctggactggaacactaggatgaaaatagcagctggagctgcaaagggattggaatatttgcatgacaaggcaaatccg

SEQ ID NO: 23340 - DNA, 561 bp, Glycine max
atcgagcgaatcgaatcatattgctctctctctctgcgttagttgtatcgcacaccatcacatgatcataaaactgcccttcatttatcagaagaagaagctaggtagctactaaaaacggaaacctcagggttatgtgaaaaaagcaagagatgtttcagagtcccagaaagtttgtgacgccctttactaaatgggtttctgatcttaattggcgtttaggtttaactgggttgatcatccctctggttttattcatcacgttcttctctctgcattattcatccacttcaaacggtttttcagccttttaccctgttcagcagtttctcttcaacatcccttttaagtttatccgcgaggacgatcctgttatttccaaggatgaattgttgcggtcgaaaattgcggtgtgtttggtaggtggtgccagaaggttcgaactcacgggaccttccataatcgaaatggtgctcaaagaataccccaattcggatctttttcttcacagcccgttagataaagacacgttcaagttctcgatcttgaagtttgcgccaa

SEQ ID NO: 23341 - DNA, 753 bp, Glycine max
cataaacaatgttgttaacatacaacttcaaaaaagcaaacccatcaacccttttctttgaactgattccttcttggtaaccttaagacacacacacactactctttcattatggaattcagatccaagtcatgcagagatgaaaggctgcagattgaaaggtactgtggaggcaaggtggccccaacaagcatgcaagatctgaggtgttacagtgctaataatgctgcttatgcaaaccagataggtagtaaggaggtgaaggagaagaaagggaaaagcacagtaactaaaccatcaaaaagttggagcttcagtgaccctgagttgcagaggaagaagagagttgctggctataaaatatatgctgctgagggcaaaatgaaaggctctctaagaaagagtttcaggtggatcaagaatgcataaacgcaagctctctatggatggtggtgaatcatgtcttattctctttttcttcatatttttttttctttttctggaatgagagttacttatttgtttgtttctcagtaagtgtttaaattaaatcctccatctcccgtagtagtcttatctggttggagcaggattgtctccattgagtcttttcccaaaagtcccacatcctttcaaaagttcaattcctttttgtatgagattccatggcttatgggtgtgtagtttggttaccactgctgagtttcttaattatcacttcaaaaataagatgaaaaaaaaaaaaaaaccaaa

SEQ ID NO: 23342 - DNA, 327 bp, Glycine max
ctgggggctggctaacaatgcttggtgtgtctccaatctccatttgctccgattcgaaacgcaaacgcgatgggaaggtttacgtttgatgcagtcgtctccttgttcgttacggtgcacccgcacgagacctctgctttgctccattccttcttctgcttcttcttcattttgagtgcgtatttcgtagttcttccgttgcgcgatgagggtgccatctcattggggttatcaaatctgccgggtctatttgtggggtccctggtgctcaccctcattgctgcacccttttcttctctcatattctctctacctaacctttccaaa

SEQ ID NO: 23343 - DNA, 469 bp, Glycine max
ggcttcttgtgctgggaagactgaggtttcaaagagttttgggagtggagtgcaaggggctgaaaagaacaagctctttttctttgaaggttcctctcatagctttgaccttgaggatttgctgaaggcttcagctgaagttcttggaaaaggaagctatggaacagcatacaaggctgttttggaggagggaacaacagtggtagttaaaaggttgaaggaagttgtggttggaaagaaggagtttgagcagcagttggagattgtggggagagttggaagccaccccaatgtgatgcccctaagggcttattactactccaaagatgagaaacttctggtttacaactacatgccaggtggcagcttgtttttcttggtgcatggaaacaggggagcaggaagaaccccactagactgggactccagagtgaagattttgctaggagctgccaagggaatagctttc

SEQ ID NO: 23344 - DNA, 293 bp, Glycine max
ttcagaagacaatgtgtactggctgaaacaatgtagctaaaggagattaatcttgacaagctcatgctgattcgatccgataaagttgcagaagctgaacatgaatataaagcgttgaaggcagagagtgaacaggcgacgaagacatttgagacgattgtgaaactaatgagtgtagagatggggcgttttcaggaacagaaaacattagatatggggattgctttccatgaatttgccaaagggcaggctcgtctagcaaatggtattgcagatgcgtggagaagtttgct

SEQ ID NO: 23345 - DNA, 621 bp, Glycine max
ctcgagccgattttccggatcgcgaaatatcattgctatagtcgtggcagtgttggtcgttcacgaactcctggttcttgtctacaattatttaggagcgagaagaccaagacacaaacctatccccagtatgtaatcaccacaattgtctccagctagtagctacttgtcttacgaccacttcaatagacaacctagtccagccagatcgaggaacactacaatggccatgattcctttgatgatgatgatactgctgttgctgtttaaatttccttctgtcgtccttgccacactcaaatctgatgaagccaacctcgagctagtattcacataccataaatgtaacgaagagctcggaaactttaccactgagacctactccaacaaccggaatgtccttctgtccaatatgtattctgacaaagaaattgagaatggcttctacaattcctcatacggcgaaggccctgacaaagtttacggtatcggcttctgcagaggagatgttaagccagataaatgccgtagttgcctggaaaagtcctcgacacttctcaccgatcgatgtccagtacagaaagaggcgattggatggtatgacctatgcatgttacgcta

SEQ ID NO: 23346 - DNA, 277 bp, Glycine max
cacaaagtccggtgatgccttcttcggcaatttcaaagatggatggcgacatggccagtttctttgtattactgcgaatgggacaaggtacactgaaatttggggaaatggtgttcttgtagatggcaagtatttagacagatgaccatggtggacaaatgcggtcggtgcccaaaattttgtaattactgtgaattttagtcttttctcgatttttatttgtgttttatgttgtataatagctgtttttgccggcaagctatgttttgtagtctgt

SEQ ID NO: 23347 - DNA, 270 bp, Glycine max
ggctcgagctaaaagtggttaagacatggcgatggtgaagagaagcattggtgtttgtaagaggctttctggttcttcttcttgtttgagcacttcaactgcaacaagtgataatgatattgctcggaggcttcagcttccaccatttgattacaaaccacggccatacaaaggacctttggctgatgaagtttttgccaaacggaaaaagttccttggtccttccttgttccacttctatcaaaaacctctcaacattgtggagggcaa

SEQ ID NO: 23348 - DNA, 789 bp, Glycine max
ctctctctctctattttctttccctctctgaactaatcaactctacaaattaaaattaaaattcttattgagaaggttactaattataattaattaaatttttattatctctttcaatgccagcaacagcaacggatgagtaatttgcttatctcagatggttacagatgaaggagtttgaccactttacgtctttaccatttatttattgtaaataaatacacagcttagattattagagactgaaataacaaaaaagcaatggatctcagagagggtcaaactcaaccaatcttggatcctaaccaaccatctcatgtgtatcatctggctttggatattggaggatctctcgccaagttagtatacttcacaaaagatgatgatcatttggttgatggcgaggaagggatatctcatagaaaggctttggagaaatccgacagcagtaagcaatatcctgttcttaatgggaagctcaattttaagaagtttgaaacaagcaggataaatgattgcatagagtttatcaagtccatgaaacttcatattggaggtagtcagccacaagaaaatcctggaagtcagccaatagctattaaggccacaggtggtggggcgtacaaatatccagaccttttcaaggaaagactgggaatcattcttgacaaggaagatgaaatggattgtcttgttgcaggagcaaattttcttcttgaggtggtccaccaggaagcatttacctatatgggtgatcaaaagcaatttgtgcagattgatcagaatgat

SEQ ID NO: 23349 - DNA, 1447 bp, Glycine max
gtagccttcccgaagaattgttggtattacaagaaaagtacacgtcctcgtgccgattatatagtttgcaggaacttgtatctgcgacctccaactttgtatctgaaaatttgattggcagaggtggctgtagttatgtttacagaggatgtcttccagatggcgaggaattggcggtgaaaattttgaagccgtctgaaaacgtgataaaggagtttgttcaggaaattgagatcattacaactttgcgccacaagaacataatatctatatctggcttttgtttagagggcaaccatttgctactagtgtatgattttttatcaagaggaagcctggaagaaaaccttcatggcaacaaggtggactgtagtgcatttggttggcaagaaaggtacaaggtggccgtgggtgtagctgaggcactggattatctgcataatggctgtgctcaggctgtgatccatagggatgtgaaatcttctaatatccttctttcagatgattttgagcctcagctttcagattttggactggctagttggggttcatcttcttcccatattacttgtactgatgtggccggaacttttggatacctcgcacctgagtactttatgcacggtagagtgactgataaaattgacgtatatgcttttggtgttgtactccttgagcttctctcaaataggaagcccattaacaatgaatgcccaaagggccaggggagccttgttatgtgcgcaataccaattttggaaggtgggaagttttcccagttgcttgatccaagcctaggcagtgaatatgacgattgccagatcaggagaatgattttggccgctactctctgcattagacgggttcctaggttgcgacctcaaatcagccttatattgaaacttctgcacggtgatgaagaggtgataagatgggcagaacaagaagttattgcgccacaggaacttgatggatgtgatgaggaaccagttccaactaacattcagtcacacctaaaccttgctttactggacttggaggatgatacgatttctatcagtagcactgagcagagtgtctctctggaggactatttgcatggaagatggagtcgatcttcaagttttgactaaccagttgttcatattgatgccacattggaatcaaatgtttgtttcataattattttttgtttttcttaggttagattttcaaattctgcagtagtgcactgattgggtcttggaagagaggtccaacggcaaaaaaagttcagccccccctccttgactttgtagctatgtctcactcaatctgtattctggaaagcttttagcggtagaaaactcatgttggtgcgtttgggcttttgggatcagattctaacggggctaattgcgtaaaatttgaccaaacaatgaagagtacatatattccactttgagag

SEQ ID NO: 23350 - DNA, 855 bp, Glycine max
tttccacatatctgacagaaaaaaatggagaactatcagtacccggcgtcgtaccctgactccggcgagtcctccccgcgctcgcgcgagatcgacttcgagaacccgccgccgtgggacgagcagcagaaccaaaactacaaggccaagttcatgtgcagctacggcggcgacaccaagatcctcgccgtcgaccgctccgttaagttctccgccttcctctccaagctctccgccctctgcgactccccgccacaggacctcaccttcaagtaccagctccccggcgaagacctcgacgccctcatctccgtcaccaacgacgacgacctcgaacacatgatgcacgaatacgacagactctatcgccctaacctaaaacctgttagaatgagactcttccttttcacactctctaattcaaaccctaattcctctttctcctccgaacgcgaccgtttcgttgaggctcttaattcgggtccggttccttctcaacccgatccgatcaaaaccccacccgttacgccttctaatgttgattatctcttcggtctcgataaagccgttgctcctccaaatcttcctccgaacttcgcagcggttaaattccacgatccggtgccggaacctgtcgctccgacgccggtagagtatcaatcgagagtttccgatcgggttgttggatcggatccgaatgtgaattcgatggaaattcagagacagatgcagcaggagatgcagcgattgcagattgcggagaatgaatatcgtagaaggagtgaggatggatttgcaactggttatgctgctgcagccggaggagattattacatgcagaaggtgcaggagaag

SEQ ID NO: 23351 - DNA, 366 bp, Glycine max
ggtcctcactctttctcatttccacattccggacaaaaaaaaatggagaactatcagtacccggcgtcgtaccctgactccggcgagtcctccccgcgctcgcgcgagatcgacttcgagaacccgccgccgtgggacgagcagcagaaccaaaactacaaggccaagttcatgtgcagctacggcggcaagatccagccccgcacccacgacaatcagctctcctacgtcggcggcgacaccaagatcctcgccgtcgaccgctccgttaagttctccgccttcctctccaagctctccgccctctgcgactcccgccacaggacctcagcttcaagtaccagctccccggcgaagacgtcgacg

SEQ ID NO: 23352 - DNA, 362 bp, Glycine max
gtggacttgctaagttgtttgctcaagactgggaaggtgatgtgactgttgttattcccgcaactcttgctcaggtatgcacctaaagaacagtaaaataacagctagatatataaggataaaataacttcagctagatctcaattcaaataaaaagtgctagtggttaacaccaagcctttgattacaatacttgatgaagtttccttggaaacatactggaattatgtggcaaaatgttctttctatattcatacacttatgctaaaggttcaggaatttatttatgtatcatttacgaaagatgactcagttaattagtgattaacttgtgcatattgtgactgttgttttacctatgt

SEQ ID NO: 23353 - DNA, 407 bp, Glycine max
atcggctaaaattcgagaatcatctattcatcgtctaactctaatccgcatgctttccctcctccattcgtgtgttgctcagagaagaacaaagaataaaaaggcccgagtgtgaacggttctttactaatacgtattagtcaaagaaacataagataagatatgggtcgtttagcagagtcgaagttggtgcaagagttggttctgtatgcagcaagcgcagcactgagctgcttggtcttgttcgtgggcctccgacagctcgacccgaatcgcgaggcttcgaaaaaggcctttcagcacaaaaaagagattgccaagcgcctcggtcgtcctctagttcagacaaacccttatgaggatgtcatagcatgcgatgttatcaatcctgacaacattgatgtgga

SEQ ID NO: 23354 - DNA, 329 bp, Glycine max
tgatcttctactctctgggtatggcattgtccaaggatatatctgacgttaaaggagataaagcatacggcatcgatactttagcgatacgtttgggtcaaaaatgggtattttggatttgcattatcctttttgaaatggcttttggtgttgccctcttggcaggagcaacatcttcttacctttggattaaaattgtcacgggtctgggacatgctattcttgcttcaattctcttgtaccaagccaaatctatatacttgagcaacaaagtttccactatatcgttttatatgttgatctggaagttgttgtacgcagcatacttt

SEQ ID NO: 23355 - DNA, 495 bp, Glycine max
ctaaattctaaggaaactcctcagatcgaaatcgaaaccatgtggcggagactcttctcttcttcaaacctcaaatccctacacacagcactctctccttctcgtccccgactcgccgcccctctcctcgcccgccacgtcaccgcccattcaggtgcttcttccctcaaaaggagggttgaagatgtcgtgccaattgctaccggccacgagcgtgaggagattcaggccgatctcgagggaagggatattcttgaaataaaccatcccgtaggtccttttggcacaaaggaagcacctgctgttgttaaatcttactttgacagaaggatagttggatgcccaggagatgaaggcgaaggtgagcatgatgttgtctggttttggctggagaaaggcaagcctatagaatgcccagtgtgctcacagtattttaagttggaagtggtcggccctggtggccatccttatggacatggcgatcacgatcaccac

SEQ ID NO: 23356 - DNA, 371 bp, Glycine max
gactacgacccttctcatggggcctcgcttttatattagttcaacttcttttctcagctgccagttcattttccttcttcatatcatctctctcactgtcacatgttctctatctatcccagccactccaatagctttggttcactgccacccctgctgacatttttctcgttggaataaacaaactttgtgttaacttaaaaggtttaagggaaaaagaaaaactacaaaatgggaaggcactcttgttgttacaagcagaagcttaggaagggtctttggtctcctgaggaggatgaaaaacttctgaggcatattactaagtatggtcatggatgttggagttctgtgcctaagcaagcaggtctgca

SEQ ID NO: 23357 - DNA, 785 bp, Glycine max
  unsure (1)..(785): unsure at all n locations
cctcactcagctacaagggcagccatgttggttaggatcaataccttgcttcaaggatactcaggcattagatttgaaatcatggaggccatcaccaagtttttgaaccataacataaccccatgtcttcctctacgtggtacaatcactgcatcaggtgacttggttcctttatcatatgttgctggcctcttgattggaaggccaaactccaagtctattggacctaatggacaagttcttaatgctaaagaggcctttcaactagctggaatagatggtggtttctttgagttgcaacctaaagagggtttggcactagtaaatggcactgcagtaggatctggcttggcttccgtggtcctttttgaggcaaacttacttgtcattctttctgaagtcttgtctgcaatttttgctgaagttatgcaaggaaaaccagagttcaccgaccacttgactcataaattgaagcaccaccctggccaaattgaggctgcagctatcatggaacatatattagatggaagctcatattgtaaggcagcacggaagttacatgagactgatccacttcaaaagcctaaacaagataggtatgctcttagaacatcacctcaatggcttggaccacaaattgaagtaattaggcatgcaacacagatgattgaaagggagataaactctgtaaatgataaccccttgattgatgtttcaaggaataaggcactacatggngggaatttacaaggtaccccaattggtgtttcaatggataacacccg

SEQ ID NO: 23358 - DNA, 284 bp, Glycine max
caagttggctatgatgaatttgtcaagatgatgatgattattggatgaaaatttaaaccaacaaatttattgttcgaattcgtttttgtgcccctctctcatttactcccaagaaattaataagtcttccaattaatgtttgttgtatttaacttgtacacatgatgtgaatgaccaatgtattagagtgacatctcagccacccatttcatgttcaaacttcaacccataattattctttcagttttagtgtagtattccttatgttttacaattaattagag

SEQ ID NO: 23359 - DNA, 1422 bp, Glycine max
gccgcacatccctccccactttaacaacaaccatgcccttacccttaccctcaccatttcacgcgcaccctcacccaacacccccttatcctgcgcccctcccctcctccttatccttcaccctattctctcacccccaccacacccttacctaaaaactaaaaacccaatctttttctctctccaccaccaaccatggcctccccttcttcccccaccgactccaacccaccctctgccgtacacctacctctcccggcgcctcccgccacctcctcccgccgccttcctccgccctgctggaccccggaggaaaccgccgccctcatcgacgcctaccgcgacaaatggtactccctcggccgcaccaacctgaaggctacccactggcaagaggtggccgacgccgtcaccgcgcagtgccccaacgcctcccccacggcgaaaaccgccgtgcagtgccgccacaagatggagaagctccgcaaacggtaccgcaccgaaatccaacgcctccgcaacctcccccttccccgcctcaacaacgccagcaccaattccccttcctcctggctccacttcaaatccatggactccatggaaaaaggccccaaccacaaacctcacgccgacaacaaccttaacatcaacaacaatttccacgatgacgacgtcgacgacgacgatctgtacgaggaattcaaaaacgcccccggatccaacaccaggagcctcaacaagctctacaagaacaacaacggattcaattcggctggttcgggctccggatccggatttcggatccggatcccggccggcgtgccacaacaacaacaccatacggcgtcgtcaaataagatttttaacagccatcctcctcccgggatggggccacgtggcgggggcgtgaagagggagcgcgagagggacgcggtggcggagatggtgggggctattaaggtccttcgcgacgggttcgtgaggatggagcagatgaagatggagatggccagggagatcgagagcatgcggatggagatggagatgaagcgcaccgagatgatcctggactcgcagcagaggattgttgaggcttttgcaatggccgtttcgcagaagaggagcaagggcaagtccacgccctcaccttcatcgcaaccgtagaataatcgaaatcgaatttgaaatcggacggtgagggtgattgattaattgtgtttagtggttcggtttcttgattagctaggttctcatattttgcaatagtcttctgttactttttttttttttttttcttttaattgttagctggtgatgtttggatgtgttgaatgctggaaacttgatattgggttttaggatgggtagatgggttttagcatttggatatcggtaattgtaatttctggctcaattatttct

SEQ ID NO: 23360 - DNA, 539 bp, Glycine max
cctcgccctcgtccccatccccgctccaccctcctcccgccgcctccctcctccctgctggtcccccgatgaaaccctcgccctcatcgacgcctaccgcgacaagtggtactccctcggccgcggcaacctcaaggccacccactggcaggaggtcgccgacgctgtctctagccgctgccccaacgcctcccctcccaaaactcctgtccagtgccgccacaaaatggagaagctgcgcaagcgctaccgcaccgagatccaacgcgctcgctccctccccgtttcccgattcaactcctcctgggtccacttcaagctcatggactccatggagaaaggtccctcccctgttaaacccgataaacgtttccgataatagtgataacgataacgaggatgatgacgatgatcaagatctgtaccaggagatcaaccacaacggccacatcaggagcttgaacaagatgtataggaatggctttccgggttctggtgccggttccggtgctggtggctttaggattcgaattcctact

SEQ ID NO: 23361 - DNA, 401 bp, Glycine max
tcggataatgcagctccccattctcagaagcttacacaaatattcttgcggagactgaaaaagtacaaccctactcttgaagctgtagtcacttatactgaagagttggcacacgagcaagcaaaagatgcagataagttgcttagccgtggagtctatctgcggcctctccatgggattccttatggattggtggacctcatatcagtgcccaaatacaaaacgacctggggatcaaaatcattcaaaaatcaagttattgacgtagaagcttgggtctataaaaggctgaagtccgctggggcagttcttgttgcaaagcttgtttctggatcattggcataatatgatatttggtttggtggtagaatcacgaacccatggaatattgaggattttct

SEQ ID NO: 23362 - DNA, 526 bp, Glycine max
ggctaatggagtggaaccacctaaaaggtcaggaaatttatggctctgtaagacaacatcagatggctcttctgaattcatagatcttgatatcttagtgagcaaactttcttgcaatgatatcgaggaacttcgatgtgcagtaggggagctccgacttcttgccaagcaaaatagtcaaaatcgaatgctgattgctgaagtgggtgctataccccaccttgttgatctcctctatgcacctgatgctggcacccaagagcatgtagttactgctctcctgaacttgtctatcaatgtggataataaagagcgcatcatggcttcagaggctgtgccaggcatccttcatgtgctagaaaatggtagtatggaagctcgggaaaatgcagcagccacctttttcagcctctctggggtggatgagaacagagtggcaattggtgcgtctggagcaatcccagcattagttactctattttgtgagggaagtcaaagagggaaggtggatgccgcaaaagcacta

SEQ ID NO: 23363 - DNA, 628 bp, Glycine max
  unsure (1)..(628): unsure at all n locations
ttcaactactaagaacaaagagaagagcaaaaatggctcccctttcatgctaccttgttgtttttgctctttctcttctgaaacctagctttgtttcctcgtctgcagtgagagaccctgagctagttgtacaagaggtacaaagaagcatcaatgcctctagaagaaacttgggttatttatcatgcggaacaggcaaccccattgacgattgctggcgatgtgaccccaattgggagaacaaccggcaaagactagctgattgctcaattgggtttggcaaggacgcaataggaggaaaaaatggtcgaatctatgtggtcaccgactccggcgacgacgatgccgtgaaccctaggccaggaaccctaaggtacgcagccatacaagacgagccattgtggatcattttcaagagggacatggtgatcaccctaaaagaagagcttttggtgaattccttcaagacaattgatggaaggggtgctagtgttcacattgctaatgggggatgcattactatacactatgttagtaacattattatccatggtattcacattcatgattgcaagcccacggngaacaccaacattagagactctccacatcactctgggttttggac

SEQ ID NO: 23364 - DNA, 599 bp, Glycine max
acgagctataaatgaggcagcagatttgtttgaagaggccagaactatattggaaaaagaatatggtccttatcatccagacaccttaggggtctatagcaatctagcaggcacctatgatgcaatgggaagagtggatgatgccattgaaattttggaatatgtagttggcatgagagaagagaagctaggaacagcaaatcctgatgtggatgatgagaaacgtaggttggaagagttgttgaaagaatccggcagggcacggaacaggagatcaagaagatcattggaaactcttcttgacacccactctcagcttgtgaaaaacaatggcattaaggtcctataaacctgtggttgtatataaaaacaagattaactatttttcctcactatgatcattgcttgcatatttggccggggaaacaataacaaagtggaagtaggtttccactatccaattgtttgttactaaaggatgttcacaaaagttacttcatatatgtctattttctatagtgaagaggaaattccggttattcatatttttccttgtatcattgaatttatataaatggtggaaattctaatttctatgc

SEQ ID NO: 23365 - DNA, 315 bp, Glycine max
ctaaactccaacacagtaactgaaaactttccctgaaacagcacataatatcttgctgccagtgtgcactgcttccacattcagtgttaactccctaattccatattcaccactcacttgttcattctacatttagtcccaaaaagccttttggattaccacacccatttggtgaaagaccccatctttggttgacagaatgggaagtagcaaacccagatccttcattctccttctatttgtgtgccgttgtgtttttgcaacggcacaagaacaacagcaaccaataacaaccgttgttgttctggtcatgga

SEQ ID NO: 23366 - DNA, 686 bp, Glycine max
ccttcgctttcggttctggctcatttggttatgggcttggtggtatagcttcagatgaaccagttaagagttctgagggttatattggaaactacaatgttactagtagacaacctaacagagattcttgagctctctcactgagtgtttactgcaatccaagtagaaatattccttgcaacttcctgtacttatgtgaatcgctacctaggagatatgatagttggaaatgtcatggtagcagtagatcaaggaaaactggtcaaaggttaatgaggtattgtgaattcatacatctcaatcacctaagagatacagctcataaggaaattcgtcatatatagctaacggtgttctttcttctttcttctttcatttgaattatacatattcaaagacaaagcagttacaagtgattttgtgtaaggcttgttttttttcttttttcccctccttgttttggtcctcttcatttttcaagacttaggttcctttcttggaattggattgaggtgtaaaatcagatttgcgggatatactcaggaagatttgttccatgatagtgtaatagtacatctccggagaggcgctctgtgttagttgttttaatgtcagattattaatttttgaatttcttctttcttttgccactgtaatgcttggcatgcaaaagtgttggttcttgt

SEQ ID NO: 23367 - DNA, 358 bp, Glycine max
tcgactggggaggtaagtgataggttcaaatggagagtagaattctagaagttggcaaaggtgcattggttctgccctccttgtgaggcacaagcacgaaaagaaaaagtatgtccttaaaaagatccgccttgctcgtcaaactgacagaacccgtagatctgcccaccaggagatggagcttatatctaaagttcgaaatccatttattgtggagtataaagattcctgggtagaaaagggttgttttgtatgtatcatcattggctattgtgaaggaggggatatggccgaagctataaaaaaggctaatggtattaactttcctgaagagaactttgtaagtggttgttcaatg

SEQ ID NO: 23368 - DNA, 582 bp, Glycine max
aacaaaacctgtgggttggttgatttggttctctttctctatccagtttctcccaaaccctctcactctaaccaaacacaaaaccatgggcaggtgctggctgctccaacaaaaccaggtgcttctaaaaactcttttctctgttattataaccttagccttaacccattctctttccctgaaaacccaatccatcaccaactcctgtgtaatcccatccttaaactcactctgctatttcgcttttctctctctcaacaaaaccttcattgatgttctcatgcttgtgcacccttttggcactgttcaaccattcgattaaagggtagtggaatgttctctgggttggtaggagtggaaaaccctttacaacaacagcagcaacaacaacaacaacaacaacaacaacaacaacaaaaccttcaccatttgcaacaccaccacccccaaatggttccctatgccacacaccatgacactgaaaaccctcatcatccacaccttcaccaatcaatcaaacaagggtaccctcccttttcatcccagaccaaacaacaacaatctcctctcagtgatgatgat

SEQ ID NO: 23369 - DNA, 472 bp, Glycine max
caactcctgtgtaatcccatccttaaactcactctgctatttcgcttttctctctctcaacaaaaccttcattgatgttctcatgcttgctgcacccttttggcactgttcaaccattcgattaaagggtaagcgcctttcatccaaagtttgctcctttttgcttattttgaaaatattggtgcttgtgttgatggaacccaatgggctaggtagtggaatgttctctgggttggtacgagtggaaaaccctttacaacaacagcagcaacaacaacaacaacaacaacaacaacaacaacaaaaccttcaccatttgcaacaccaccacccccaaatggttccctatgccacacaccatgacactgaaaaccctcatcatccacaccttcaccaatcaatcaaacaagggtaccctcccttttcatcccagaccaaacaacaacaatctcctctcagtgatgatgatgag

SEQ ID NO: 23370 - DNA, 543 bp, Glycine max
  unsure (1)..(543): unsure at all n locations
nnnnnnnnnnnnngaaagaactaataaatgaaatatccaaatgtataatttttaaattgaaataataatacaaaataaccattttctcttgagaaaatctcggatggtggcgcctttatttttttttcgattattataattatatttccagcaccgaaaaaggaactgcaattattattcaagttggttgttgcaacattgattgctgttcgccaaaagactcgtccgaaacaacaatagcgtccgcatcccaccaagtatccgcgtcagattccgttacgctctctaacggcgtgctgacctttctcatatccccgaccgtcacgccgtaacgcccgtcatctctgacgtagaccttctggacgccaccagattccacgcgcagggtctttcccacggtgggaccccactccgccaccaccgtgggcttccgccgccgcagccgcgtgtcccagatctccagcgccagattcccgcacgcgccttcccccgccgagacaaccacgagggagagcggtggactcgtcggaacgccgcgttacc

SEQ ID NO: 23371 - DNA, 306 bp, Glycine max
cgcacgaatgggcaaagcctcaacaagctgctgtaccagctgacaagaggtggccaggtgcaggatctaatccttcggtttcatattcattggcttcaccattgcaagtgtcacccacatctgctaagacagaagcttcttatatggctgcaggaggtgtctataagagccttcaacctggatcagctagggagccagtaattgtgatgcagcgacctcaaactgtaaatgcaaagcagattccagctgccagcatgagttcatctcctcccggagtggctgccagttggtatccaactaatagta

SEQ ID NO: 23372 - DNA, 527 bp, Glycine max
aatttttccacgtatactgacctactctgagtggtgcatctggtccctgcatggtcttcttcaacctcaggattccaactcatcacacctccgcgcacgttagccaacagctcccagtcccctcacacagtgactctcccaaatccctaatgcgaatctcaccctaatccctctctcctcgtccatcatcatccatcttgcaagcagcaagctgcaagctccatcaacacttgcctcactttcgattccagaatttcccaaattctcattcaccaaccacaatgatggaggaccaccctctctccgtgccccgtgacgaaatggaaaacctcgtactccacgacggcgcggacgacaacggcaacggcaacgatggcgccggtgcaaaatcaccgttctctccaattaccgcagcgccatgtccacgctctccgaatctcaccaccaccctctctctccaccgatcctcgccactcccgccgactccgatcccctcctctccccaaaccctggctcccccgactcct

SEQ ID NO: 23373 - DNA, 276 bp, Glycine max
cttcaacctcacgattccaactcattacacctctgcgcacgttagccaacgcctctctctcagtccccccaacacagtgaccctccgaaatccctgatgcgaatccccaaatccaattcaacctctccctaatccctccctcactcctccatcatcatcatcatcttcgagcttgcaagcagcaagctccatcaacaacacttccgattctaaaatttcccaatcctcactcacaatcacaatgatggaggaccaccctctctctgcgcccaaaga

SEQ ID NO: 23374 - DNA, 445 bp, Glycine max
gcttctgagagggcaatatgttgaagaggagatggtgcagatgcttcagattgcactggcatgtgtggctaaggggtctgataataggcctagaatggatgaagttgttagaatgttggaggagattaagcatcctgagttgaagaaccaccacaggcaatcctctcatgaatctgactctaatgtgcagacaccaacaccatgatcaagtgcatttcttgggagagtaatcaaattttctcttgcctcctcatattgtgttttgcttgcatgccctcaaccaaataagcatgtatcattgtaaaatactattcatgatgatgtttttattcgtgttggccataaaagcttctttttcatgtttcacattatttgttacgttctgagctatgtcacttttggatattcagtcggtggaaataattcaagtattcattttcctatc

SEQ ID NO: 23375 - DNA, 665 bp, Glycine max
atcctgagttgacactgaggaacaagtttgtccaagacaaacgtagttcctttaatttcaaaagttttacaaaatttgactcttttatagatccttctaacaaattagatgaaaggtctaacattactaaatttgagagagttccaagagttacaggcatatcaccagtcaaagaattagttccaagatttaatacctgcaggtttctgaggaactcaaaactcttaggaatggttccattcagtcggttgtgagccaggtttaaagttctcaaggatgacaagtttgcaaatggtgagggaattggacaagtaaaggtattattactgagatttagaacttcaagatgcttaagctggcctaatgaatctggaagtggcccactgagctggttgttctgcaggtctagattttttatgttctgaaggcttgatattatttgtggaatttctccctgtaaaaggttactgtgtaaatcaagttggacaagagctgtgctgagattaaatagccatgaagggatttgctgattgagattgttaattgaaagatcaaggacttggagatgtgtgaagttgatttttccttttggtggtcctaagttatcaatttgacagctctccaagtgtagttctgaaagagatggaagttcactcagtacttga

SEQ ID NO: 23376 - DNA, 613 bp, Glycine max
gaggtacacctgaacaccgcggccacaggtgcagcttccgcacgtgcaggcacttcatcgtccgctccgccttcgcgaaccccgacaccatcgcgtgcggcttgtcggagaacgcccggacatacgcgccgcggttcagcgaccggaaaatccgaacgatgaaggcttcggtggaagtctcggagagcgagtgcgcgttgaggatgattatgccggcgatcttggaggtcggtaacttgttagttaggaggtcgacgattaggatccgcggggtgatgaagaaggcgttgccggaggtgtagagtgcgtggcggtggggcgcgtggaggtcggcggtgatttcggcgggaatttggtagaattgggggtttagggttttgaggtggaaggtgattttggatttgagggaagtggaggacggtgagaggaggaggagcgtgccctgagatgaggagtgtagaatgagaagagaagcgatgagtttggagagagcgaggcccgaggagagaatgacgagaccgccattggagtcttctagaagctctgtgattatgtgctcgtggaattgaaccatcgaaaatcggttgcactctgcgccaaaaccagaatcagg

SEQ ID NO: 23377 - DNA, 427 bp, Glycine max
ggacgaaaagattcctcatcggcaagcaggggttggtttccttctttcttctcttgggcgggcacatcacttccctctacaaggcaagaatattcattcctctcttcctcttgccaccacctattgcttgctttgcttctgtttcgctccactccgagatctacacactattccagtgcagtattgggcaaatgcaactgctggtgaaaattgggtagttaatttgcaaggcgacacacctggaacttgggaagctgcagtaatggatcttgacggagggtgttcggcaacagttagcacaggagcacaggcaagtccaggacgttcagacacgacatggtgcgtcctatcggtttacacagcagaaccttccagcatgtaaacctgtgcttacacctgcagcagacattgctacatctctattgat

SEQ ID NO: 23378 - DNA, 496 bp, Glycine max
  unsure (1)..(496): unsure at all n locations
tctcgagctctttattaccttattccctccaaaccctgaactacctctcccttactcccataaaggtagcttagcttcagatgccaatcatcaaattaaccaaaccccttcactcatagagatcatcatcaccaaatggtgctttgttcagctcaaatttttggtggggttttgcaaaagaccttaattaattaattcccttcttctctctttccttttatgttgaaggtaagtactaagtagcatgctcccaatacctcaaagtaaccaaaccaaaaccatctagatctcatctattaccctttcaattagcttggacttttttttatttttggcttgtgggtgttaattgttcaaggcctcaaaantctagggttgtgataaaatggatcctgttgcagcacaaggacgtcctctccctccaccttttctaactagagatcttcacttacaccctcaccatcaattccagccccaccacaacaaccaaaaccac

SEQ ID NO: 23379 - DNA, 286 bp, Glycine max
cagccaccttccccctactacatggcggcgcgtgcgtaccaatctgcccaaaacgccgcgttcgacaacaccaccaccaccgccatactcgaatacaagtcacctcatcacagtaatcattctcaccatcattccaaaggagcactgaagaaaaaaaccaaaccgatcatgccctcactccctgcctacaacgatacaaacacagtcactgccttcagcagaagctttagaagccctagaaaagttgaagtcccgctgaaatcgaccagagctgttcttcctgtgg

SEQ ID NO: 23380 - DNA, 504 bp, Glycine max
cataattgatggaaacagtttggtttatattttggagaaggaactggagtcagagcttttcgaccttgcaagttcctgtaagggttttccggtgttgccgagttgcacccttgcaaaaggcaggaattgttgatttgataaagagccgcacagatgatatgacactggccataggtgatggggccaatgacgtgtcaatgatccaaatggcagatgttggtgtagggatatgtgggcaggaagggcgccaagcagtgatggcatcagattttgctatgggacagtttcagttcttgaataaattacttctggttcatgggcactggaattatcagcgtgttggttatttagttctgtacaacttctaccgcaatgctgtctttgtgttgatgctgttctggtacatattatgcacggctttttctacaacttctgctttgacagattggagtagtgttttctattctgtgatatacacatctatacctactattattgttggta

SEQ ID NO: 23381 - DNA, 544 bp, Glycine max
ggaagagacaataaagatgcagatgttgcagtcaatgggcaagaaacacccatggctaagagacccacatatccaaccctgcctgaagaacccaaggttgaaagaaatctcctatgcagagttggtgttcggcttccagatggacgccgggttcagcgaaacttcttacgcactgatccaattcagctgctgtggtctttcatttctgctcaactaggggaagatgaaacaaattcatttagattaacacatgcaattcctggagcatctaaaattctggactatgaaattaattcaaccttccaggaatcaggccttgccaactctatgatttcggtgacttgggactgagttcgggttcattactgggtgaaatttgcagactgagaacttcagattggtcccatctatatgatcccgtttttcatctttttcatgaggttgtttagtgttcaaagaaaaggttattgaaacttttttgtgtatagactacaaatccgaacgatgggttaagcgatgttaatggaaatatattgatgttatt

SEQ ID NO: 23382 - DNA, 549 bp, Glycine max
cctctttcttcgtttcagttcaatctctctctgtctattcccaattcgcaagtttcactgcgcaatcactgcatatacctattcatttggccacgaacttcacattggggtggcagtatttgaggcaagaaaaatgggagtgattcagaagtttttcgttgcatcactgttcatgtgggcaatccctattgcaattttatatgcttttaaccataatatacttcctggaacatccaatttgtccccatactctatgacactagtgagcggatttcttgctgtcatatctgtcaatgtggtgatagcattttacatatatttggcattgagagaacctacggcggataaacccgagcctgatcctaaatttcttgctgaggccaaagctagcatcaatcagtctacaggggatgctcaacaaccttcccaggctctcaagaaagaacagtagatgtgatgcaggactacaaaagggggaggaccttacatcggaggaattgttactagatcaaggttaaagaagctacaagaggatattaatatgaagat

SEQ ID NO: 23383 - DNA, 402 bp, Glycine max
ggacttgattactttggccgtactatatttacaaaattcttcctgtaggcattcatatgggcaggcttgaatctgtattaaatcttcaatctacatcagctaaattgaaagagattcgggaagagtttaagggtaggaaggtgattcttggtgttgatgacatggatatctttaagggcatcagtctgaagcttctagctgttgagcagctactgcagcagaatcaagatttgaagggcaaagttgtcctagtacagattgtgaatcctgctaggagttcaggcaaggatgttcaggaagcaaagaaggaaacaaatttaattgcccagaggattaatgatattttggttcaaacaattatcagccagttattctcattgaccgtcctgttcctcgttttga

SEQ ID NO: 23384 - DNA, 538 bp, Glycine max
gctttttaaggaaaaagagattgatagtgtggatagaagattgcaaggggggtgccctatgtcacctagagaggcagctatttttctcaaggccatggggtacccttccactacaacaatctacattgttgcaggacctatttatggtgccaatagtttggaaggctttcaatctgagttccctaatgtcttttctcattctacccttgcaactgaggaggagctagaacccttcaagccatatcaaaaccgtctcgctgctttggattatatagtggccctggaaagtgatgtctttgtgtatacctatgatggtaacatggccaaggcagtgcagggtcataggaggtttgaagggtttcagaaaaccatcaatcctgacagatcgaattttgttaagctgattgatcaactggacgagggtgccatatcttgggaagcattcgcttctgaggttaagaatttgcattccaataggctaggcgcgccttatcttagacaagtaggagagtcaccaagaatggaggagaatttttat

SEQ ID NO: 23385 - DNA, 307 bp, Glycine max
cctgactctcctctgtggcaccaccgctctctctgcgttgttggagaacaatcagaggaaaaagattggagggtgaaccgaaaaaaacaattcagaaaatggagaacaacgcattcagagatcaaatcatggaggacaatgaacatgaagaaatgcctgattcctttgtttgctgcgtttgtctggatctattatacaagcccattgtgctatcttgtggtcacatgtgctgtttctggtgtgtctataattcaatgagttgtctgcgggagtctcaatgtccagtatgtaggaatcaatactatca

SEQ ID NO: 23386 - DNA, 529 bp, Glycine max
tgagatctttgcctgcactgtaggtcagaaacctagcaaggccaaatattatcttgatgatcctgctgatgtcttgaagttgcttcaaggccttggtgcttcatctaagccatagtcaaggcatctagcacaattccaagtttcttttgagagcacggtttgagttattggttgcttgtgcttcttctcttgttgagaggattaatattcttcacatgtgaatcagggaatgttaggttattaatgttgcccctgacatatatggtgggaccttgctgttgcagataggattctttgcgttcagtagtgcggtaatgagcttgacaaattcttctcacgtaaatggttacatcaaattgttgtatttgctggtgccacctatagctgtagttgttcctagaactgtagaacatatagttgtttgcattgaacatgaggcaccaaatagcttgtacagttacactatttttcttcactatacataatgacgatctggtttgagaaaaaaaaaaaaaaagggcggccgccg

SEQ ID NO: 23387 - DNA, 309 bp, Glycine max
tacaaatttcaaggaagagaagctggatggagaacgggatagaagtaggcgttcaaatgagaagtctaaccaccgggacaggagtgatgaagatggcacgcacaacagagatgaaaacatggagagaattcctggccgtgacagggatcgagatcatggatcggagaaactcaaaacttctgataataagaggcttttggatgcaaaacaattgattgatatgataccaaagaccaaggaggagttgttctcatatgagatagactgggcagcgtatgataagcatcaattacatgatagaatgagacc

SEQ ID NO: 23388 - DNA, 286 bp, Glycine max
gttgagcttggccccatggaaatacgaactttccttttgaaattttaaaatgggtcaaatcatcattgatgattttatttgaaggaaaaataaacatgtttgatcacatgatttttacccttgtaaaaaatggtagagggagaccaagaatgattttgggggaaaacattaaaagatatgagtaaagatcctctccaatgacgggaaataatatttttgagaatttggttcttaaccaaatctaactcagataataatgtaaccatcccgtctaatgaaataagat

SEQ ID NO: 23389 - DNA, 601 bp, Glycine max
gctcgcattcgctcacactcacacgcacactctttggaatcacagcaagacatctcagacacacacacacaacgcagtgagagagagtgagggtttttattttaacgttttcgttgttattcctttacagctcaacctgcatttctctctcacacactcgcatctcagatcgaaatcgaggtcactgagtgagaagtgtttacgttattctgcgctgttgatgttcatacaaactagatagctacatggtggagagagacatttttctcatatgacttctattagctatattattattgagcggtgttgctatgggcatttgtctttggaaatggcaatggccgtggcttctttatgttctgctgatacatgttgtaatctataaaagcggagaatcacccccgatggtgaggtgctgctcagctttaggacatcagttgttagttctgatggtatcctattacagtggaggccagaggatcctgacccatgtaaatggaaaggagtgaaatgtgatctgaaaaccaaaagagtaacacatctgagtctatctcaccataagttaagtgggtctatatcacctgaccttgggaagctagag

SEQ ID NO: 23390 - DNA, 335 bp, Glycine max
ctttggaatcacagaaagatatctcagacacacacaacgcagtgagaaagaaagatagggagagagagagagagggtttttattttaacgttttttgttgctattcctttacagctcaacctgcatttctctctcacacactcgcatctcagatcgaattcgaggtcactgactgattctgcgctgttgatgtttcatatcaactagatagctacatggtggagagagacatttttctcatatgacttctattaaccatattattattgagcagtgctgctatgggcatttgtcttttgaaatggcaatggccgtggcttctttatgttctgctg

SEQ ID NO: 23391 - DNA, 438 bp, Glycine max
ctcttaccttgggttcacagcaagcctgggctttatcttgtcttcgggagctccaatgtggatgaagggttacgtggttacttgaccaagtatgattgcagctcagcagatataaatccaattggtagtataagtaagcaagaccttcgggcattcttgcaatgggcagccatccatcttggttactcatctttggcagatattgaagcagctccacccacagctgaactggagcctatacgttctaattacagtcagcttgatgaagtcgatatgggaatgacttacgaggagctatcagtttatggaagactacgaaaaattttccgttgtggtccagtttccatgttccagaatctatgctacagatggggtgccagattgacaccatcacaagtggctgaaaaagtataacacttcttcaagtattattctatc

SEQ ID NO: 23392 - DNA, 387 bp, Glycine max
tgcattttgcctgtggatatggtgaggtatgctaatatttggagtgaatattttctcatccccgagtatcacagcctttttggttcttagaatgcgagcttatgttgttgggtcgtggtgttgactttagaaccatggtgcgaagtaaatgaaggatatattgaggctcagggtattatttagtaaaagactgtggtcttgattgtttcttccaccatggtgggcaccgctggcctgtcaaacatgttaatatatgagttatcttttctaaagcattgctgaaatttggggcgagtatggggtggacttgatgacaaccattggtagcatctgatatttccaactgtctgattagtcttgggtaatggagaagctaccggctgcagc

SEQ ID NO: 23393 - DNA, 425 bp, Glycine max
tttttttaactttgttatttcattttgagaaattattgtatggtttggtgtaatcctagttaatcttcatatgacacaatctcatgtttccaatttatgaaaacaaaaattggcgtgtcatgtgaagatttcttgaactaaaatgatcacggaccatatactaatttctcatttaagagggacatatgaactccttttgtacatacgcacccttgaacttgggtgttatagcaaatatcatttttgaatattaggtttaatgcgtgtcttattaatctttgggtgactgaaaacctgtttgttatatcaacttaagaacgtacggcacattgcgtttctccttttaaaaaaaaaaaaaaaaaaaaaaaaaaagggggggcccccgattattgacctcgtcgccccgggatttatttcgggccggg

SEQ ID NO: 23394 - DNA, 314 bp, Glycine max
cctcgagccgaatcggctcgaggcattgaatttttctgtgataacttgcatcatatcaaaatctttgggcaagatagggagcttaattaaagtcctaattaaggatcatggaatcccaaacacagtctgagctaccagttgtagacttcaccaacaaaaatctgaaaccgggtactgatgcatgggtttcagcttctcaagtagtgcgtggtgcacttgaggatcatggtggtttcttggcactctatgataaggtcagtttggagacatacgactctgtttattctgaaatgatgaatttttttgacctctca

SEQ ID NO: 23395 - DNA, 291 bp, Glycine max
gggcaacaaaatggcttttacattccctcttctgatggagaagacttctgtcgttctcatgtgaatatgtcaagtagtggaaaacccaaaagcgctatagtataagattcagaattttatcaaatgtgtcatgtcagtcaaaactcaaaagggatgcagctgccagatggaatgtgaagctgtataattataactattagtctcttgttttgagcaattgagcctttggttggttcccttagccagaacgtgtttgcaagctccatagatgtcatagaaacaattgtgttt

SEQ ID NO: 23396 - DNA, 436 bp, Glycine max
gtggctgtgatgagtagttctgtgagtgagacctatgattcggattctgtggctgtatcgatgaagataaggaaggataagaagaagaaggttacttccgcaaggaaatctttgtcgttacaacaagagcataagaataagcattataagactagagggaaagttgccaacgaggaggaagttaccagcttcaaaactacgagtttggggcagcaaccacagagaatgaagcagagttcactggctgcaaagcgtaagagattacttcggacagcagaagaagaaaaagctctcaaggtataagtctcataaaatatcatattgtcctagaacatactgaattatttatatcaagctctaacaatgtcaaatgggttaaaacttcaaacaaaagtgttgatttcaaatacataatcatagttgaaaaacatataat

SEQ ID NO: 23397 - DNA, 746 bp, Glycine max
ttttcagttctcactattcatttttgaccgccattgtgatcagtttctcacattgattgaaaagaccccattttcctctatgctcctccactctccaccctccaccattcacacgcagagcaacacgacgatctcaccgacaacctttttgtcttcgttaacacacacatctgacacctggcgtgtccttttctcactgcagattaaataaatattaattaactaataaatgtacatatatagtagttgcttaacctggctctatattcttcactctccttcctctcccatttgattcccttccctctcaccaagttttatgatctctgtcatttcctcaactacttttattttccatttatatctactcacaaagcaacatcatttccacttgcatttcacacgcatgtgagacacgacccaaataacacacaaagcaaagtaaggttgctttgcattgtgttaacaaacaaggcaacctcattatttgttgccactttggttctgaaaaagtttcttactttagttgtgggtttgctccgttctctctgttctggaaaacagaaaaacaaaaaaatatgagagcgacacagattgtgttggttctgttttggttgctctgcattcacagtcccacgttgttctgcgccaatgtggagtatgatcatcgagcattagtcatcgacggcaagcgcagggtcttgatctctggttccatccattaccctcgtagtactccagagatg

SEQ ID NO: 23398 - DNA, 723 bp, Glycine max
attgaaaacaagattttcagtgttcatggcggtctttctcctgccatttcaacactggatcagatacgaaccattgatcggcagcaagaagtacctcatgatggtgccatgtgtgaccttctatggtcagatcctgaagatattgtggataactggggtcttagtccccgcggtgctggttacttatttggtggcagtgttgttacttcctttaaccactcaaataacattgactatatatgtcgtgcacatcagttggtaatggaaggatataaatggatgttcaataaccagatagttactgtctggtcagctccaaattattgctacagatgtggcaatgtagctgcaattctggagttggatggaaatcttactaagcaattccgggtgtttgaagctgctccacaggaatcaagaggaacacctgctaagaaaccagcaccagattactttttatgaagtggatttctttgtttttataatctacatgctcaaattgatgtgggagacttgaatcatggagatgatgttgtctgactcgggaggaatcagtgaaggataaatcagttctgcatcccatccgtctacttcacccatctttagtatgaatagcagtattgtgaatttgtatgtggtttgcaatatgttgttattacctttgctcattcaaaagctgggatgaacagaaggtttagagggaaaatgacttttgcatatatg

SEQ ID NO: 23399 - DNA, 645 bp, Glycine max
ttcgtccgcagaaaaatgaaggttttgttgaatctgatttgttagataatcctgtttggcctcaaacatatggcaattgctttgtggcgactttggttgcagaagcagagaaagacaaagatattattgttgttcatgctggattaacgatggagccatcacttgaactgtttcaggaaaaatttccggataggttttttgatgtgggaatggctgagcaacatgcagtcacatttgcttctggtttggcatgtggtggcttgaagccattttgtgtcatacctccgtcctttctacaaagagcctatgaccaggtggtacatgatgttgatcaacagagaattccagtgcgttttgttattacaagtgcaggattggtaggttctgatggtccccttcaatgtggagcatttgatataaactttatgtcatgcttaccaaacatgattgtcatggccccatctgatgaggttgaactcatgcacatggtggctactgctactcgcatcaatagtcagcctatctgctttcggtatccaaggggtgccctggttgggagagggtacactataagcgatggaatccccatcaagataggaagaggaagagttcttgttgaaggcaaagatgttgctttcctaggat

SEQ ID NO: 23400 - DNA, 478 bp, Glycine max
ggactatgccaaattctaatctgcgcaagcaaatgactttataatccaattcttgcgggtatgatgcaaatctaattagaagagcactgaaaggctgaaagcttcagctggtccccgaacatactaaaaagttagcatgcttcttctagctatcacaatgcacagcatacgctgtcaacttacaacatggcttaataatcttggaagaaggaagtaaaaaacctattgcaatgcatcttgtagcaaatctacccccacaatggtatacgaaaacaatccattatttggttggggcagaaatatatactaaggaataacagaaaagaaacgatgatattgtttttcatatccccagttctgtatgtaaggagcgtgtttgggagttattcaaattctcaaacacgcgtgtttgagaaatgctgttttgtattaaaaaaaagcgtgtttgattgcaataaattaaaattaagtctgttct

SEQ ID NO: 23401 - DNA, 329 bp, Glycine max
aggaacgtgaaagtaaaacggacggtggcgatagaagcgtctctcatctccatcgtctcctcactcctctcttctccagcgttcattttttctcgcgcccaaatacaaaatcacatcacaacagggttccggcgaccatgtccgatgctccggcgagtccatgcggcggcggcggcggaggcagccacgagagcggcgagcacagtccccgctccaatttccgcgagcaggaccgcttcctccccatcgccaacatcagccgcatcatgaagaaagcgcttcctcccaacgggaaaatcgccaaggacgccaaggaaaccgtgcaggaa

SEQ ID NO: 23402 - DNA, 493 bp, Glycine max
accagaagataacgaggttgcagctattgatgttagcattggagacatttacttgtcactctgtcgtggcgcggcggctgttttcgcctatcagcacgcactaacagtgttcaaatccaccaaaggtgcaagccacagttgtgtggcattagtgtacattcgccttgctgacctttactacaggacaggaaaattaagagagtcaaaatcgtattgcgaaaatgccttaagaatatacagcaagcctgtggctggaacaaccgccggggagattgcgagtggtttgaccgaaatccctgccatctgtgaagctctaaacgagcctgaagaggcgctgaagctgctacagaaggcggtgaagttgttggaggatatccctggacaatataggacagtagcaggaatagaagcccaaatgggagtgatgttctacatggttgggaagtatatggatgcttggaagtcttttgagaatgctatcaccaagctgaga

SEQ ID NO: 23403 - DNA, 759 bp, Glycine max
tagatcttcagtagaaaaggtttctctaaccgagctaattcgcaaaaagcagcattgcatggggaagttggacatggtaattctgcaaagtcaaaagacagtggtttttccctgtttcattttggtggccctgtagacctttcaactggtcataaatcggcaactgcatcttcaaatggcgacaatgttggagattttaacttaaagagttcagtagatcaagttgacgatgatcatgaatgcaataaaaaagaggctactgtcattgaggagtacaacttgtttgcggcaagtaataccttgaggttttcaattttctaaaatgaattgagaagtataaggtggctgttgaggaattcagtctctatctttatgtggtaatggaggcttgagtactttgtaattcagtaaacaataagcttccttcagcaatttttattatagcccatagagttttattagttgattgttacccaatttgtctgttttttcccttgatgtagagaaagattgcgagtgcagttatcttgaagggtttttttccccttgtatgtgagatcataattcccccttcccccaaacacctttttgctttaaagttttagagagccaaagctgcttcataatggaagctgtaatggggattttgagtggacatcatcaatgtgattgaaagtgttatatttgctcgactctggttgatggtttttttatcagtggatgccaaaaatatattataattggattcagatttacatc

SEQ ID NO: 23404 - DNA, 282 bp, Glycine max
gtaagctctgaagcattaccagcaacatcgcacacgaacgcggcgtacaatttctcccttcagcattcgtatatcaggcctctgattgtgttctaagaggatggggagcgttactgaagggcagttgcggttttgtattgatcgagggggcacgtttactgatgtgtgtgcagaaatccctggtcagactgatgggcaagttttgaagcttctgtcggttgaccctttgaactatgatgctgcccggtggaagggctacggaggatcttgaagattcatggt

SEQ ID NO: 23405 - DNA, 309 bp, Glycine max
aaggaccgtttgataactgcgcttagaaaagagttgagggtttctgatgatgaacacagagagcttcttaccagggttaactctgatgaaataattcaccgcattagggcgtggagacaaactggctgttaccaacctgcaaggcgcacacatctcagcctggtcatgacattttacctagtccaactgtttcagcttcccgacacaagcagaagacatcccattcgggtcaatcattgcctgctttatctctcagtgaagtctgtacagtatacttctgctggacctactggcggcaggcattttgca

SEQ ID NO: 23406 - DNA, 553 bp, Glycine max
aagacttgcaaggttaagaaggaaactcatggtgtagtccagattaaagggtatgagcaagttccttcaaatagtgaaaaggctctcctaaaagctgtggcacatcaaccagtgtcagcttatgttgaagctggaggatatgctttccaattttactcaagtgggatttttacaggaaagtgtggaactgatatagatcattctgttaccgtagttggttatggaaaagctcgtggtggcaataaatattggctggtaaagaattcatggggcactgaatggggtgagaaagggtatataaggatgaagagagatatacgtgccaaggaaggtttatgtggaattgctacgggtgccttatatccaactgcttgattgctgctattaattcatatataaatcttaaagagtttaatttggtgtatgcacgttgtatctctaatcatcattttccttatattttcgggctagtatatatgcaacctattagtgttccaacaagagactcgacccttccagaccactggttctcggtcagattagtccggctttt

SEQ ID NO: 23407 - DNA, 345 bp, Glycine max
cgggcactatccctgctctaataaagttactttgtgaaggtactcccacaggtaagaaggatgctgctactgctatctttaacctatctatttatcagggaaataaagcaagagctgtacaagctggtctcgcagtcccactgatacagtttctgaaggatgctgggggtggaatggtagatgaagcactagctattatggccatccttgcaagccaccatgaaggccgggtagcgattggtcaggccgagccaattcctattcttgttgaggttatacgaaccggctctccacgcaaccgagaaagccctgctgctgtcttgtggtcactatgcactggagatc

SEQ ID NO: 23408 - DNA, 307 bp, Glycine max
tggggctctcaccattgttaggcgccagattgcttcaaaccacagtcaacgtttcaaaactccgcttcgctgttcttctctacccctgcaaaacccactgaatggaagcgaatcccacccacgacggggatgacacctcggagacgccaccgccgcccatggtggacccgtccccatctccgccgcctcaaatgaaagaagaggtgatggacgcggagcaaggcggtgacacatctcttccgatgaccgttgttccggcgcatttgccggtgtcgaaggcggcggcgaagaggccgtcgaaggatcg

SEQ ID NO: 23409 - DNA, 385 bp, Glycine max
ctcgagacctcccagaccgtcttcgtgggcccgtacttgggcctcaaagcccgagagcgatttgagagggattactttctattcaacgtggggctaatgaagctgccgtttgacttccccggcaccgcgtttcggaacgcgaggctcgccgtggaccggcttgtcgtagccctaggcacgtgcaccgagatgagcaaaacgaggatgcggacattaggggaagagccttcgtgcctcatcgattactggatgcaggacacgctcagggaaatcgaggaggccaagctcgccggagaaacgccgccgccgttctccaccgatgccgagatcggtgctacctcttcgacttcctcttcgcggcgcaggacgcgtccacttcgtcgct

SEQ ID NO: 23410 - DNA, 584 bp, Glycine max
cggctcgagcaaatgcaactttgcagattactcttgagctagtttcttggaagactgtgtctgaagtaactgatgacaagaaggtcattaagaagatcctcaaggaaggggaaggatatgagcatccaaatgagggagccattgtgaaattgaaagtaattggtaagctgcaagatggtactttgtttttgaaaaagggccatgacgatgaaggagagctgtttgaattcaaaactgatgaggagcaagtaattgatgggcttgacagagctgtgttgactatgaagaagggtgagatagcattgttgattataggacctgaatatgcttttggttcatcagagtctcagctggaacttgcagtggttccacctaactccacagtatattacgaggttgagctagtatcatttgagaaggagaaggaatcctgggacatggacacgccagagaagattgaagctgctggtaagaagaaagaagaaggaaatgcattatttaaagctggtaaatatgcaagagcttctaaaagatacgagaaggctgtaaagttcatagagtacgatactgcctttagcgaagag

SEQ ID NO: 23411 - DNA, 496 bp, Glycine max
gcaggcttcaactgatcctgaatctgttgctgtgcttccatgggttccactaacgactgcagcattgtctctcaggctttttgagattgattcatccatcagctatgtaaagcttgaaagacttgagccttgtgaggagaaagaagcaagagaatacataaagcttccatcaagatatactcacatgaaatctaatagggaggttgaaccagccgaatttgtccatgatgaattcactaaagataaatctgttcctaagaaaattgtacgaaatggcaataaacgtggtcgagggactaatgaacaaggacggggtaaaaagctggctaacagagtgtgcaattctaaacgagatggtggtcgtaagaatgctaaggtcactgacaatctaagtcacagattaaaacagcaggctcgaggaacacaaggacaaggtgctgggcgaggtcgccgaaccataaggaagcggagaatgggaaagagagctgttgaagat

SEQ ID NO: 23412 - DNA, 272 bp, Glycine max
cgccgcgtgaatcgtactcggcgcattttccgtgtctcatcgagcgtttgttcggtcaaaaggcgaagtcgcggttcttatttcgccgatcgaaaaccgatctggtttcagggatcgttaattgcaggttctgttgaatctatttcgtcggaggtttcggcggcgcggtgatgatcgtgcgtggttttcctgcggtggatgttgatggtctcgtgtcgaaagacgcgaaacagagtaattaaacgcgcgattcgttgtgtaatttagaatat

SEQ ID NO: 23413 - DNA, 458 bp, Glycine max
aatccctctctttatctctgtttttgtgcaaatggccaaatgtttggcactctcactaatcatagcaggcctcttcattggcttggtgagtccacaatggaacatattgaatccaaaatggggaagaagtgatgaagtagtgaatcgtccggaatggaacatattgaaccaaagattgggaaaaggggttgttgttggagacaacttgaagaactactgcgagagttggaggataaatgttgaactaaacaacattagagggttcagtgttgtgcctcaagaatgtgtggaccatgtgaagaagtacatgacctcatctcaatacaaggctgattctgttagagcagtggaggagattaggctctacatgagtggattctgcactttgaaagatgatggcaaagattcctggatttttgatattgatgagacccttttgtccacaattccttattata

SEQ ID NO: 23414 - DNA, 1003 bp, Glycine max
caaatcgccattagttttcaaaatagaactttgcgtggcacccacaagaaggccacacagtcaccaccaccaccacccatttctcccggtgcgcgactcactttattgtgattcatccttccttcctaacagatccgatcattgcacagcggcggaatgatgcccaaaacgattacttctctgtcgtttcgcaggggattgggaagttgtcttttgttgctgcctctgcggctaatgttgttcaggttggcacgaaggagttcacttccaaggtcaaggagggtggttacgatcataaggtgaatgaaactgtcaatgttgtcactcataagacattatatattggacagaggacttggggcataatgaaaggagtcatggctatggcttcccagaagattgaggagtacactaaggatgatccaaactggaagaatgataactggcaacgaaatgagaatgatacaaatggttattatcaggattttaatcgagagaacaaaggatggaattcttctattggaagagaacaatcttcatcagggcaatttaaaactcaaagctctagctcttgggatgattgggaccacaaagatagcaggaaggaagaaccagctaaaggatcaactcattcatcaggtgggcagtttagtacctacaactcaagctcttgggatgattgggaacgcaaagattctaggaaggaagaacctgctaaaggatcagctccccataataatgatgattgggctggctgggataatgccaaagatgatggattcgataatatttatgaaggtgctaataagaaaggtgttggtcataaggggaaatctgatggcacttggacagaggaaggctttctctaaggtttgtacattatgcattactgtcatttgctcaaactgatttcttaatacccctcacaatcgtctatgtgaaccatgaaataacagttgggccctactacccacttggttatgcaacaatagttcctcatttt

SEQ ID NO: 23415 - DNA, 300 bp, Glycine max
caggtcattggacttcactaccagtttcgtgatttgttcctcaagtgacagaaaaatactgtagtttacgcactgatggcatgcaggccaagcaggggcgccaccaaccaaacatgatactcgattttcagctataactttgaatcccattgttcctttttaaacccagacccattcttctcctttccatcgtttcttcagtattcccttctctgttgtaatttttgggaatgttcgttggagagatagtatccacaaatgggtaatctcgcaatatcaatcttgagagcttattgctgc

SEQ ID NO: 23416 - DNA, 800 bp, Glycine max
tcggtttcttcaactaataaagctgaaaaggaccggggggggtctatttcttcctcggcgggggattcaagacccggtcttggtgacttcccagagagttgcatctcctccttgttcatgaatcttgatccacccgatatatgcaaattggcaagagtgaatagggcctttcatcgagcttcctcagctgattttgtatgggaatcaaagttgccaccgagttacaagtttcttgctaataaagttcttggtgaagaaaatattgctactatgactaagaaagagatttatgcaaaactttgcctacccaatcgttttgatggtggtaccaaagaagtttggttggacaaatgtagtgggcaagtttgtttgttcatgtcatccaaatccttgaagattacaggaatagatgatagaagatactggaattatattccaactgaagaatccaggttccagagtgttgcgtatcttcaacaaatgtggtgggttgaagtggtcggggagctagagttcgaattccctgtgggtagttacagcttagttttcagactccaattgggcaaggcctccaagagattgggccggcgcgtgtgcaacgttgatcaagtgcatggctgggacatcaagcccgtccgattccaactctccacatccgacggccagagttcactctcagagtgttacttgcgtgggcctggggagtgggtctactacaatgttggagatttcgtggtggaaaagcccaaggagccaataaatatcaagttttcattggcccaaatagattgcactcacac

SEQ ID NO: 23417 - DNA, 1052 bp, Glycine max
caaattcatgcgtgtgttactattcatttgaatcgtcgacacttcgcactgtctttctaaaggcttcaaaaagagctcaagtaggtttcttggaagccactcttgaagcctactactacgaccctttatatatatccaccacaaacgacacgtacttacataaactccatcacattgaagccaccacttgatggtttcattttcataaattctcaaatttctctcagcagcttctttgtactcttccttggctgagcttcttttattttaattttctctctaagtacacccacccagtttgtgctatatacttgtattttctctatattattacactgatcttgaagaagcatggcagagaaaaccaagaacaaggtggaggttcaattgggttgcggtttgatgggaagaattttccatctcaaaaccaataacaggactagaaaatcctctgctcattcactacccgtgaaggcttgcaacaacactgctcagcaacagacggatcaggccaataacgaagccaaaccctctccaaaccatgaatcaaatgttccaagagatagctgcattggaaccattcctacactgaaagtggagcagaatccagcgagaaagagtagctctagtcaccgtgcaccttcagcataccaaaacactcaaaacgggagagcctcggacgctgcaagaacctcaattcaacgaagccacgactcaaatgaagagagtaaacaacaacagaaagagcacgctgttgttaactctctggaacttgctaggataagtacaagtgctaatcatcatcatcatcaaaacaacgagacgaaatccctggcgaaagaatttgtgttaccaatcactgggaatttgcttgtgaatagcagcccaagaactagtattaccaagagcaaagagttgaacaccttgtccggctcctgttcttacaacagtaataatagtactaacaaaggcatgatggggaacataatgaggaagaacagcgacgagcttgcgcaatttcggagtccgaggaacggcagagtggaccctga

SEQ ID NO: 23418 - DNA, 485 bp, Glycine max
gaagccaccacttgaaggtttcattttcataaattctcaaaattccctctgcttctttgcatattcttccttggctgagtttcttttattttacttttctctccaagtacacccagtttgtgtcatagtggcttcaacaaataaaaacacacttctagttgtttctctattacactgatcttgaagcatggcagggaaaaccaagaacaaagtggaggttcaattgggttgcggtttggtggggagaattttccatctcaaaaccaataataggcctagaaaatcctctgttcattcactacccctgaagccttgcaacactgcacaacagagggatcagggcaaaaacgaatccaaagcccctccaaaccatgaaccaaaagatagctccattgaaaccattcctacactgaaaggggagcagaatccagcaagaaagagtagacaacaacagaaagatcaccctgttgttaactctctggaac

SEQ ID NO: 23419 - DNA, 408 bp, Glycine max
tgatgagtccagtgaagttagaagaagagcattatctgctataaaagctgttgccaaggccaatccttcagccattatgtctctcggcactattgtcggtcctgcactagcagagtgtatgaaagatggaaatactccagttagacttgctgcagaacgatgcgcgctacatgccttccaactaacaaagggttcagaaaatgttcaagcagcacagaagtatatcactggcttggatgctcggcgcctatccaagtttcctgaatatagtgatgacagtgacgacagtcacgaagatatatcaagtagctaagtttgtcttggtgttgtgtccttccctttcttctctggtcggaatacaaaattctcgttgataaccaaatttttggcagcacaatgatatagtcc

SEQ ID NO: 23420 - DNA, 793 bp, Glycine max
  unsure (1)..(793): unsure at all n locations
cgtactcgtgggctagnttctgatgaccgattgcttgtgagacctgttcttgatccccaaggatgggatcatgatgtgggctttgatggtataaacttggagactactacagaaataaagaagaatgtatatgcctcagttgtgggacagatgaataagaacaaacaggatttcagtattcaatctgagtgtgtggcagcttatgttgatccatcgggccctacttattctatgggtgttgatgttcaatcctctggtaaagatttcatttgtaccgttcatagcaacacaaagttgaaaaacataaagcacaatattgctgactgtggtgtttccttaacatcttttgctaaaaagtactacgtgggtgcaaaacttgaggatactgtgtttgttgggaagagattaaaatttgttttgaatgctggccgcatggaaggtgcaggacaaatggcatatggtgggagttttgaagctaatttacgaggggatgattatcctgtaagaaatgacaatgtaagcttgacgatgacagtcctctctttcaataaagaaatggtgttgagtggaagtttacaatccgagttcaggttatctagaagctcgaaagcatctgtaagtgctaatctaaatagtcgtaaaatggggcaaatatgtataaagataagtagctctgagcatttacaaattgcctcggttgcagttttctcgattttgaaattcctatcacgtagaaaggaaactaagaacgtggtgagggatgtaatggactgaagtctgctctcgttgttta

SEQ ID NO: 23421 - DNA, 682 bp, Glycine max
attcaaaaaaatttatagaactttctatttttataaatgattgtataattttatcataccaaaaaaattctccttttttcattttcccacgtggttgtttgtgcaacaagttaagcaacgtgaaatgcagcagcaggcccttggtatatataaccagcatttgagcaaaagttagaacaggaagctttttggtaacattaactaagcacaaagcattatcattactactataagcttatagttgaaatctttgagcatagaaaaaagatgccgatttctagaattgccattggaaatccttcagagtttggccaagcggatgcgcttaaggctgctcttgctgagttcatctcaatgctaatatttgtctttgcaggagaaggctctggcatggcatataacaaactcacagacaatggttcggcaacaccagctggggtggtggcagcatccctgtctcatgcatttgctctttttgttgcggtctctgttggtgctaacatctcaggtgggcatgttaaccctgctgtcacatttggtgcctttattggtggattcatatccctcctcagaggcattctgtactggattgctcagttgcttggctctgtagttgcttgcttgctccttaaatttgccactggtggattggaaacatctgcgttctcattgtctcctgggg

SEQ ID NO: 23422 - DNA, 273 bp, Glycine max
ctgacttgaagatccaagacagatattctccctccctccctccctcctctcatttgcaaaaaatggaatatgtatgtagcccacttggttgggaattctaccaccaggaagaggggttagaggacttgagacattctcttctgtacacaaccttggagctagaggcaacaattgcatcagctaaggaggagattacaagaagagaatgtgaattgattcgtgtgaatgacctcttaagcagggtcatcaaggagagagatgaggcacaagcaa

SEQ ID NO: 23423 - DNA, 291 bp, Glycine max
cgttcctccaataattctctcttctaccattcattcatttcatggtcattggccatgacccaaaccatgtcaggcccaaatgactggctccaattctacaaccaaaatctcacaccttcaatccctgacttcaccgttactactgcagctgctactactgctatcgtcgcggccacgagtcctccacaggacatgccgaatttgagcccatcaggctcgacccatttaagcccggaaggcgcgtggccaagcccagcgccgtcgctcccgggcctcacggcgaactccgac

SEQ ID NO: 23424 - DNA, 486 bp, Glycine max
cggctcgagctcctttcagcaaccatgaaatcttcaggagcattagctacccttgtgcttctgatccttcttcttgcgtcaacttcagaggctgcaatttcatgtagtgatgtgatcaaggacttgaggccatgtgtgagctacttggtgagtggcagtggacagccaccagctgcttgttgctcaggagctaaggctcttgcctctgctgcaacaacctcagaggacaagaaggctgcttgtaactgcatcaaatccacttccaagagtatcaacattaactcacagttggctcaggctcttccagggaactgtggaataacccttcctgtggctatctctcccaatgctgattgttccaaggtgggttgaaacttgaaattgcagggtgctgcagatcatgctgaacatttttctgctacatatgtattggagtataacatattctgtaataatcaggaatctacctacgtggatttctttact

SEQ ID NO: 23425 - DNA, 349 bp, Glycine max
cgaaagttgaaaccttgaaccttttgaatcagttggacggttttgcagaaattgacgtttcaaatttcaattgaagtagcacgcacgtttcatcatccactcgcaatcgcgatcacccgttgccgatcccgaagcagagaaaacctaagccaacatgagtggcgacgccccaacccaaacccaaacccaagccaccgacaccaaaccagaagaaacccacacccacacccaaaccatcactaccaaaccggaagaatctcattctcaatctcagtctcagcctcagcctcacactgccgattatgctccataccctaaactggaccccaccgatgttgcgccaccactc

SEQ ID NO: 23426 - DNA, 415 bp, Glycine max
ttactttttaaagatgtaacatttttgtgtttgagtgactgaataacagtgtaaaagctttaattatgttatttgaatcttttttgttcttggtcaaaaatatgttcatacaagctccaattgcctcttgtatcttttaaagcgttcttccttttaattatgaatcgtcaaaatggttgagtttgagcaacttctacactttccagtttccaatatccatattatcaagcatgatcagttcaacgtccccatgtctgtgccagattggattgaaccaataatctcaacaacttaaaagatatttcaaaagaaattggaataaaatcaaacaaatcttacctgagagcccagtcatgttctttacagtgaagtctgtaaatttgttacaagttataggaatttttttcaaagttga

SEQ ID NO: 23427 - DNA, 439 bp, Glycine max
aaaaaaagtagatggcaggtaacatagcaagaaaatggagagacctcagtggcagaagccaactggaaaggtctgctagatcctctagacattgatcttcgccgttacataatacactatggacaacttgctcaagctacatatgatgctttcaactcagaaaagacatcaaagtatgccggcaacagccgataccctaagaaagatttcttttccaaagtaggtttggaaaacggaaaccctttcagatacgacgtgaagaagttcctctacgcaacttccaaagccagcgacgcagaagcgtttctgctcaagtccttttcgaaggactcgtggagcacgcaatcgaactgtggccactgatgcagggaaagaagcgttggggaggagggacatagtggttgcttggagaggaaccattcagctgcggaatgggtta

SEQ ID NO: 23428 - DNA, 767 bp, Glycine max
gtcaaacagtgctttgactcaattggaatctcgtatatttggactcatggataactcatatgattcatcctcatccttgagtttcgtatcatctcacctgtcacatggttctagtaatcacaacgtgtcttccaccaccagcaaaaatcattgggcaaatattgaaattttgagtctgaataagctcagtggaagccttgagaagctattgattgagactgagtatgattatagtgatgctgagattcttgttgaagacatccctgtgggtattcatcgctgcatattggcgtcgcgtagtctgtttttccatgagctttttaagaaagggactgatggatcaggcaaggaaggaaagccaaggtatctcatgtcagatttggtgccttatggcacagttggatatcaagctttccaagtgttcttgtactatctgtatactggaaggctaaaggcttcaccaacagaagtgacaacatgtgtcgatgaaacatgtacccatgttgcatgccgccctgctatcaatcatgccctagagctgatgtatgcttctgccacttttcagatgaaagagctggttttactttgtcagcggcatctcctaaattttgttgagaaggctcttgcggcagatgtcattcctattcttatggctgctttcaactgccaactagaccagcttctctctcggtgcattcagagagtagcaaggtctgactttgacaacacatctttggaaaaagagctccctcatgaagttttgactg

SEQ ID NO: 23429 - DNA, 546 bp, Glycine max
aattaattatgcctaagaattttatgtctcctatataatttgtttttatgtgtggaaaaaatgtgcagtgtgataggaacaactgtacttggaatggggcattatacagtaatgtatggacaactcagagaaaatgaagaagagacaagctgtgacgaaagctctgattctttggacaagatggtaccccttttgcaagaaaagatggaagtgtgaatagaacttcgaaagattctagaggcagaggaattcacctatttttcagaatcttcctccctttcgtttgattcgtttcaaacgattgtgatacaaatacaagtctctcccatgttgcaaatattttaattgtaattaactccaactgtgtatatataaatcatgaaacatgtaagtagcatgcaaaaaaaggtggtcgaatttttatttgagacctttatattttcgttgtacaaaaaatttctctgtaaatatatgtaatacacgtatctcgagctttactgtactgatatatgtgattcacaagttgtttttttgggaaaaaaaaaa

SEQ ID NO: 23430 - DNA, 446 bp, Glycine max
ttttttttttttttttttagataaaggggggctgagatttttcttttccttttctcaattacagataaagtcgaattgtttttacatagcaataaacattttactctagtagaaagcagagaatcttttgcagtttgcttcttttcaaacagccttcattatggaagtgtgataggaacaactgtacttggaatggggcattatacagtaatgtatggacaactcagagaaaatgaagaagagacaagctgtgacgaaagctctgattctttggacaagatggtaccccttttgcaagaaaagatggaagtgtgaatagaacttcgaaagattctagaggcagaggaattcacctatttttcagaatcttcctccctttcgtttgattcgtttcaaacgattgtgatacaaatacaagtctctcccatgttgcaaatattttaatt

SEQ ID NO: 23431 - DNA, 706 bp, Glycine max
ttaagggaccacttgtaagactctcttctcaccaccttagacacactgagaagcaatatctggtattctcctcaacaccagagttttgggttcttggtggcgctttgcttgctgcagcttccttctcagtttcaatttccaactttattcaggtatactccttttctttttctattcttaaaaaaatcaagttttccttttgaatctttgtgatgattcaagttttttcttctcttttgaccctgctagaaagaaactctcaagcaatacccagatccaatgaagctgctctcttattctagcgtacttgggactatccttagcgcaatagtctccgggatagttgagagggacataaatgcttggaagataaagcgtaacaaggatgtcattctcattgttctaactgtgagtatcaacatatcgggcaatatgattttgatttacataattaaatagcaagattatagataatgcacaaactattttatatgatcattcgaaatcacaaattatcatgtataataaatatattgatgtttataataattatttcaaaaattataacaatagtaattcctaattaattgtgggtgtaaaactattgtacttgtatgacagttaaactcatataaaaaggcatatcaatactgcaataaaaatacatatgctgatagaatatatgtaacgctatactacaggcact

SEQ ID NO: 23432 - DNA, 426 bp, Glycine max
  unsure (1)..(426): unsure at all n locations
cttttgaccctgctagacagaaactctcaagcaatatccagaaccaatgaagctgctctcttattctagcttacttgggactatccttagtgcaatagtctcggggatagttgagagggacataaatgcttggaagataaagcgtaacaaggatgtcattctcattgttctaactgcactagttgggggagtgattcgtcctaatattcaagtatggttcactcgcatgaagggtccactttatgtgccacttttcaagccatttggtattgcatttgccactacttttgcagtttgcttcttttcaaacagccttcattatggaagtgtgataggaacaactgtacttggaatggggcattatacagtaatgtatggacaactcagagaaaatgaagaagagacaagctgtgacganagctctga

SEQ ID NO: 23433 - DNA, 433 bp, Glycine max
tcttctatacaaaaaatggaaaagatcctttggtatatccctatatcttgctgttaagcattcaattgcttccagctgtattatacttgtctaaggaagcaggagatgaaggatataacattgatgctgcccacctttcaattgtgctagctgatcatggggtcctttctgaaggtgctggttctgggcaaaagttgggagtgatggatgcttatgcggaagtgtccaccattatcaggcagtatggatctatgtatttgcgtcttggtgatctccaaatggccctagaatactacgcacaagctgctgctgcagtgggtggggggcaattgtcgtggactggtagaggtaacgtttgatcaacaaaggcagagaaatttgatgctgaagcagcttctaactgaactattgttaagggatggaggcatatatc

SEQ ID NO: 23434 - DNA, 349 bp, Glycine max
attcttcttgtggtggtctgtgctgaggtatctctagttctaacctacatgcacctatgtgtggaggactggagatggtggtggaaatcattttttgcctctggttctgttgctatatacatctttttgtactccgtaaactatcttgtatttgatctcaagaatctgagtgggcctgtttctgcaactctttacttgggatattccctcttcatggttctagcaatcatgttggctacaggcacagttgggttcctttcctcattctggttcgtgtattacttgttctcttcagtcaagttggattgaagactcttcacagttaaaaaaattagctctacagagaaca

SEQ ID NO: 23435 - DNA, 1229 bp, Glycine max
aaaaacgagagcttcattttcctgttctctttcttcactcttttccagtctccaacccttcttcttcttcttccttccttcctcgtttcgttaaccttctaattcaattcattcctcacttccttttccaaccgaaccttttctccgataatcagagagagataataatggattggggaaacgtaaccgcggaggatctgatcgacgcgctccgtgaggtggattggtcgtcgccgccgcgccctctgtcggaattcttctcgcgattcaccgttcccaggtcttcctccaaatggaacagccgcctcaaatgcaatctctactactaccggaccaactacttcattttgattgtttctgttctcatattgggttttcttcgaagaccgctagctattgtagctgcacttcttacggcactcaacattgcttttctgaatgacagctttgcaggtacctttagtgagaaggtaacaagaacagttaggcaattttcaccacatttagctgccaaaatgagacctcctctcacgcctgttattcgtggacgtccatcatccaagagagcaatttatatatgtggtcggccgcgttgggtgtttgtcttgatattttcttctgcaagtttcttcctttggtttgtttctgctggtctcctgactgttttatgggctcttgctattggtcttcttgctaccatcctgcatgcaagctttagaacacctaacttgaaagctcgtctaaacacattccgtgaagaatttcgtgcagtatggcgcaattatagtgagctgtagcttacataaaatttgttggacttggatgtgctgctgctttattgttgaagtattttccattaattggaatggaacattctatagcaagctgccggccattggagactaccagcagattgtaaattttcaggaatcttgttttttgtaaagtacactgttttcgttgtttatgtctagcggaagctttggaatattgatacacgctgtaacctagacattgtcataattctagttgccaaaattcttaattgctctggacattggtgacataaaatacttcaatttcttttatgtttgttattagtaggtttcattttattttgatattgtggttgtgttctctggtaaagattgtaacaatggttgcttgcattgtatgatgcatgcatctgaagcagtttattttagtaagaagtgggatagtagaacttc

SEQ ID NO: 23436 - DNA, 670 bp, Glycine max
cccacgcgttcgcaaattctttcaaaacgggtccaagcccctacttaatcaacccgaggaggacctctcaaattttctacaaaggcagtgtttgggttgggacatcaagctaagaaagggaaagagaaagatcacagaaagagaattcatctttctttgcgaacagctaaaaacctcaaagggaaagaaggcatgaatagaggtgttcttcagagctcaccagtgcaacaaatgatgactggaaaccctaactggtggaacatcaatatcaatagcatggctccacaagctcctcctttcttgtccactcctaacaactttcctatcccttgtgctcccacttctcttccctttccttcttggcatgagaatcaagatcttccagagtcatggagccagctacttatgagtggagtggtggatgaacaaggtaaggctgggatgggtcagtttattcagactaagaagttggagagctgggaggatcaaatgctaggtcaggctccaaacgcttctcttgttgatgttaaacaagaaaacttggttaacagctatgcatatgggcatggaagcgaagaacttcagtcatcaaagccatcttggtctccaaaatcatgtgtgacaacaagtttcagtagcaacatgttagatttctctaacaataagacag

SEQ ID NO: 23437 - DNA, 289 bp, Glycine max
ggatgaaaaaaaattcacctcacccatcagacccgtaaacttccttcttagacccgaaaaccttctcattaccccaacccagaggagtgttgattatgttggtggtttcgaatcttctgctggagaagagctcaaaggccgcaacgcccaagagctttctcttcggattcttgtcaagcaacaaacatactgaatgtttcccaagcctacaaagacgcgctggagaagaagatagggttgtagctccacaaccaccaatttgtgttgggaaaacaagggaatacacaat

SEQ ID NO: 23438 - DNA, 652 bp, Glycine max
gtcattattggagctgagagtcaccctcttcaccttcatggcttcaacttcttcattgttggccaaggaaatgggaactttgaccccaaaaaggaccccataaagttcaaccttgttgaccctgctgaaaggaacactgctggtgtgccatctggagggtgtgttgctgttcgctttcttgctgataatccaggtgtttggctcatgcattgccaccttgaagtgcatactagttggggcttgaaaatggcatggatagtccaagatggtaaacggcgcaatcagaagctgccacctccaccttctgatcttccaaaatgttgaaaaaatcgacaaccttaatgtttcgcttttctttgtctatttttggggttagatttggaggtatttgctcctgccttttgttttcaattttgtccacatcttccaattttgggatttctatcctttgtagccaaaaaagaatgtttgggggaattagattgttatggttgttttagttcttatgtgatcactcaagttagaaaaattatgagtgcatgggagagttttatgtaggttacagtattcaattatcttcatactgaattgtaatatatacattctctattctgaaagccctaaagctcctttagtaaagatttgtgtatct

SEQ ID NO: 23439 - DNA, 492 bp, Glycine max
gaagaattcttcccacttcggctggagtattatgagagaagaaagaaacatatactgaacaaccttgaacaacttctgttgatattggacaacaaagttaggtttatattaggggttgtgaatggagaaattgtcgtgagcaacaggaaaaaggctgaattgttgattgagctgcagcagaaaggttttactcccatgccaaggaaaggtaaatctgcagaaccccaagttgctggggcaaatgatgaagaggagcaggaagatgacaacaacactagagagcaggaaactggaagtgttgaaggagtgaaacgaggtgactatgaatatctgttatccatgtcaattggaactttgaccctcgaagctgttcagaagctgctagcagagaaagctgaaaaagaaaaggagttcgagattttgaaggctacaccatcaaagtctctgtggttgaacgatcttgatgagcttgagcataaacttgatgacata

SEQ ID NO: 23440 - DNA, 447 bp, Glycine max
tactttatcccttctctactcatccgcaagtaactccattctcgaccctcttatacccaccacaccctcctacaccctccaacaccgtatccttttccccgaccaccacctcctcatcctcaccaacccccaacaacaacaacaaaagctccacgaactagagtgcgtctactacacgctccaccccaacgcttcctcttccggttcacctgaaccggttctcgaagttcaggttcgaccggtcctgtccacggaccgttatgacgaatctcgatccattgttaggtgcccacttccccaaacgaactcctctgccggcggcgcccccaaagccgtcgacttgcggcggcgcggtgaggtgggtcgccggagtttgggcattttgatgaaccaaacggctcaatcttgggacagggtggcgtacgaggcgaccctcgacggagacac

SEQ ID NO: 23441 - DNA, 328 bp, Glycine max
ggcactgctgctcctactacagctgatttttctgtatttaataactttcaacattctgcttttgaaatgacttcccataaatccaacagagaaacattgagaagagacaatggctctatttatgaatcttctattgaatcttctgattgtaaagctacccgttctctctcaagtgtggtaccaaaggaggcgtttatgagacagaagtctagaaagagcagtgattctgtgttggaggaagcaatttcaatggtcagttctggtggctttgaagtttatattaacagtttgatgcatcaaaaacacaaccatgaggatgacaacatca

SEQ ID NO: 23442 - DNA, 286 bp, Glycine max
ctactctctccgatttccataccataccacacttcttcttccaccttaagctgcgcacttcttcactctctctcattctctacgacgccgtttccaagcgaccattaccaacgcttcctcgagcttccaaagctgctcagagaggttttgtgttttctgaatggcaaccgcaccggctcatgctccggtgaagtcgcagcctctgcacaacttcgccctccccttcttgaaatggggcgccacggcaagaacaacaccaccaccaccgccgctcaccaccacgctt

SEQ ID NO: 23443 - DNA, 946 bp, Glycine max
ctcgagccgtctcacgtttttacacacgtagacacatacacattcataattcattgctatcaccacacacaagcctagctcctcatcataccactgcttttctcttccctctatcgtttgttctttccttcattcactctcgccgccgcgcgtgctaaaaaccgtcgattccagaatgggcagcgacggcgtgccgtcgacggcggcggcggaggtcatggcggtggtggccgttgagctcactgacgcctccagctggtggcacgacatcgacgactctccgctgtggcaggatcgtatcttctacactctcgccgtactctacggtatcgtggccaccgtagctttggttcaactggctcggatacaattgagagtgccggagtacggttggaccacgcagaaggtctttcactttctcaattttttggtgaatggggttcggtgtgtagttttcatcttctttcggaatgtgcagaggttgaagccagagattgttcaacacatcttgcttgacgtgccgagtcttgctttctttacaacatatgcacttttggtcctgttctgggctgagatttattatcaggcacgtgctgtatcaactgatgggctgaaaccaagtttctatactattaatattgtggtttacgttgttcagattactttatggttaatattgtggtggaaacctatcagtggactgctcattttgtctaagatattctttgcaggggtctctttgtttgcagccattggctttcttctctatggtggaagactattcttaatgctacagcgctttcctgttgaatccaaagggcgacgtaagaagctgcaagaggttggctatgtgacaaccatatgttttttatgttttcttgtcagatgcattatgatgtgttttaatgcatttgataaaaatgcggaccttgatgtcttggatcat

SEQ ID NO: 23444 - DNA, 365 bp, Glycine max
tcagcttgattggatgttcagatattccgttcaattgattcaagttctgtcaaggggtttccaaaggagccaaaagatgcatcaagcatgaatctagtatgtgggaagaatgtgctgattgacatgagcatacatacagcatatgtaaaggccattcgtgctgcacaacattacatttatatagagaatcaatatttcattgggtcttcatataattggagtcaacataaagaccttggtgctaataatttaattcctatggaaattgcgctgaagattgctgcaaagataagggcaaatgagagatttgcagtgtacattgttattccaatgtggccagagggtgttccaactggtgctgccac

SEQ ID NO: 23445 - DNA, 863 bp, Glycine max
ttctcttcttcttttttttattttttatcttctcttatcttaaacttattcttctgctacaccaatcccatccttggtccatgtccagttcaagccatctttggcatgtgccacttggcctctgacacaaaaacttttcttttcggaaccaatcatttttcatcaaacttcaacatttacataactcttaattttaatcacttttgttcgtagctacatcaacatggaccacatgggagacccgaagagcatcatacatgagctgctacaaggtttggaattggcaaggcaactccaagtgtatctccacctgccaacttcgtcccaagaaacacgtgacctattgatccagaagatcatatcaacatttgaaaaagcacttgaaatggtaaattgtaaagggccagtgccagcgggtgagtcatcacatcatcccctaggggctgcattaatccgagtgtcagattcacctttgagcagtagtccccgcagtgaagactccgatagagatttcaaggaccaggaccccaatgctttcaaaaagagaaacactttgccaagatggacgaaacagattcgagttaccccaggaatgggggtggaagggcctcttgacgatggatatagttggagaaaatatggccagaaagacatccttggagccttgtacccgaggggctattacagatgtacccacagaaatgttcaaggctgtatggcaacaaagcaagtgcaaagatccgatgaagaccccaccattttcgaaatcacttaccgaggaaaacacacctgcacagtggccaacaacgtgggttcttcatcaccaattccactagaaaaccaggaaccaagtttgaacaaca

SEQ ID NO: 23446 - DNA, 289 bp, Glycine max
ctcggtattcggctcgagcaggaatgggagtggaaggacctcttgatgatggatatagttggagaaaatatggccagaaagatatccttggagccttgtacccgaggtaattaaaaccaaatttaaccctcacaaactattatgttcacattctaatttctaagtctcatggattgaactagatttatataattatatactttgtctgtatgcaggggctattacagttgtccccacagaaatgttcaaggctgtatggcaacaaagcaagtgcaaagatcgatgaaga

SEQ ID NO: 23447 - DNA, 711 bp, Glycine max
tggagatagagttcaacgagctgattatcgaatcaagtttctaattattttcaagttggtttgattcattgttacccctaatcacgtggaccaagagaacaaaacagcagaagggagtgaaaatgcaacagatgtgaaaagcttgatttggcaatgatgaccaacaccaaagaagaaacaaggatcaaactgcatatatccatctgactttctaccgtttactagaagaccacttcttttagtcattgataacgacaacagcaaagcttttaaggacatagccgaagcggaaaagggagagtcagttgctatgctcctttctccaagctgttcgcctgctttgtctgattgctcacataattcaaatgggagcctattcaccatgtttcttacagctccgctgcaagctttctgtatgctgttaggactttcaggcactgatattgatttggacccattcaacaaagcggaaatgctgctctcatcttcattaaataactggggactagcattggcaacatcagacacacttaatcctgtttggggacagattttcggtgatcccttcataaggaggcttcttttgagattcatattttgccaggctgtgttgaccctatatgcaccagtttacaatgacaacaaattccttccaacatgtgtcccttctcttccgacacctgtcctgcccccaagttactcatatcagag

SEQ ID NO: 23448 - DNA, 443 bp, Glycine max
atggatatgcggttaagcaagagaatacttctgcgagtgtgacactgtatggcctcgcgcagtgcacgccggacttggctgccggagactgcatacggtgtgtcgccgatgcggcggccgagtttgtcaagtcttgctgcggagggagcataggggcgagtgttctgtttcccagttgcattgtaaggtatgagacgtatccgttttatcagcattcgggaacctccgcgccaacaatgattaagcgtggaggaaatattggaactgaagtgattgtgatcgttgttgtcttgggtgtcgttttggtgatgctttttggctttggctattgtttcatccggataaaagcgagttagaaacggaaggccggtgacagagaaaaatttgggccagaacacactgtcttggagtctttggaatttgaattggttacaattgaagca

SEQ ID NO: 23449 - DNA, 454 bp, Glycine max
tgttagcatttcacacactaattaagcatcatatcccaaaccctaatcgttgtgatattcctagttgtgtgaaatggcttccaagggcacagttgcatccacttatgttgctctattcctatgtctcaacatgctttcctacactatggtgagctccacctacaatatccctgtaatccctgatccatcagtgccttatcaaaagggtacctgccctatagatgcacttaagttgggtgtgtgtgccaatgtgttgaacttggtcaatgttaaattagggtctccaccaacgctcccatgctgcaacctcattaagggtcttgcggatcttgaagttgctgcatgcctttgcactgccctcaaagctaacgttcttggcatcaacctcaacgtcccaatttccttgagcgtaattctcaacaactgtggaaggaataacgctggcttccagtgc

SEQ ID NO: 23450 - DNA, 482 bp, Glycine max
ggagatagaaacgcgtgcgccgacgcgtgcgcccacgcgtccgctcttgttctccctctaaacactctctaccctgcctccaaaaacttgttgtttggcacttcttcacactcagctagcagatcagtcactgaagtggataagaatggaaaatctcagcaatggtcacttagaatcctttgtcaagattccaacaataaagtttaccaagcttttcatcaatggagaattcctagattctgtttcaggaaaaacgtttgagaccgttgacccaagaacagaggaagtgattgctgaaatagcagaggctaacaaagaagatgttgatattgctgtgaaggccgcacgtgaagcatttgattgtggtccatggccacgcatgcccggtgctgaaagagcaaagattatgctgaaatggtcagagctaattgaacagaacgcagaagaaatagcagcattggacaccattgatgggggaaagc

SEQ ID NO: 23451 - DNA, 313 bp, Glycine max
cataaataactcttgtgctccctctacagtctacacacactctccacattccccccagaaacttgtttggtacttgacactcagattcactcaagtggataaggatggcaaatctcagcaatagccactcagaatcctttgtcaagattccaacagtaaagtttgccaagcttttcatcaatggagaattcctagattctgtttcaggtaaaacgtttgagactgttgacccaagaacagaggaagtgattgctgaactagcagaggctaacaaagaagatgttgatattgctgtgaaggccgcacgtgaagc

SEQ ID NO: 23452 - DNA, 279 bp, Glycine max
agtccacaaccctttaagcatcgagcgagcctgtgaggcgtaagtgttttgtgctgctgacaagttagttttgtaggtctatttttgggttgaacggtccataatcttttagagactaagcatgtaggacataacataactgcttcgcgctgctaacaactcaatttcgtgggttggcctcttagttggacagtccacaagccaataatttattcactttgtttttggagacaatggtttggtttccaaagacaaggtcatacgacacagctatacaag

SEQ ID NO: 23453 - DNA, 445 bp, Glycine max
ctcagattcaagagaacatgaaagcaatcgatgtcattccattactgactcctgttgtgatggagaagattgaagctgttgttcaaagcaagccaaagcgccctgaatcataccgatgaattgaagtttttccatggtggacacatatatgcattagatgggaggctccgtcatccccgtgcacttgagtgaaaattcttgttgaaaattattggtgtggttgatgtgatttcttgggacttcttttctttgtcattttttctttctggcactgattatgccttctcttttatgggttcaaactttccaaattgattttggaagcaaaggatttagatcttggattctaggtttacataggtcttccagattaatacatacccattgtttggatagttttaatattttttgaatatgtcaaactattatttggattttgagagct

SEQ ID NO: 23454 - DNA, 287 bp, Glycine max
ggcagaacgccctgaatcgtaccgatgcatggaagttgtttttaaggcggacacatgcattagatcgggaggctccatcatccctgagcaccggagtggaaattcatgttgacatttattggtgtggttgatttgatttcttgagacttggcgttttctcatcggttcttcctgagactgattatgccttatgttttatgggttcaaactttccaaattgattttggaagcaaaggattaagatcttggatttttaggtttacattgttatcattacatgtaattgc

SEQ ID NO: 23455 - DNA, 618 bp, Glycine max
ggttcattcctcactgggagcgaatatatccttgaaagcgtgctgggtgtgggaggcacgtgacgtctacacaaacaaaataaaaacccagtttctctccactcactaccactaccgctatcacccaatttccccccttcgttcttcagctcatgacgacgtcgttcggaggaccagccaccacctcagcgccgctcaaggacaccaagcttcagatcccaagcttccattgcttcaggtcttcctccgcctctgctctcccccgcaatgccctctcccttccttcatccactcgctctctctccctcatacgtgctgtttccacgcctgcgcagtctcaaactgccactgtcaagcgcagcaaagtcgaaatattcaaagaacaaagcaatttcataagatatcctcttaacgaggacattttgacggatgctcctaatataagtgaagccgccactcaattgatcaagtttcatggtagctatcaacagtacaatagagaggagcgtggttccagaagctactctttcatgatacgcactaagaatccatgcgggaaggtttccaaccaactttacctcaccatggatgatcttgctgaccagattgggattggga

SEQ ID NO: 23456 - DNA, 261 bp, Glycine max
ctatcacccaattgcagtgttcgcttttcactctctttccgcacagcatacgtccccaccccttcttcctcttctccaccatcgttcttcagctgatgacgtcgtcttttggaccagccaccacctcagcgccgcttaaggacccccaagtttcagatcccaagcttccatggcttgaggtcttcctccgcctctgctctcccccgcaatgccctctcccttccttcatccactcgctctctctccctcatacgtgctgtt

SEQ ID NO: 23457 - DNA, 293 bp, Glycine max
gcttgcagcagtggttcaggcttgccatgatatggttcctcctgatgcagttgaacccttgttcaaacaaatagtaaatcaatttgtacatgaccgttcacgtccagaggctattactgttggaataaatgcagtcagggagatatgcatgcgcatgccattgttaatgaatgaagacttgctacaagaccttgcgctatataagaagtcacgtgagaaggcagtttcaatagcagctcgatctctgattgggctattcagagaggtttgcccctcactgctagttaagaagg

SEQ ID NO: 23458 - DNA, 426 bp, Glycine max
gcatcccttgcagcgaggtcagtgctacaacttctggggggcaatagttcctgttggtgctcacttgaaatgatttagttgttactccattcttgacattttttcaaggttttgctaccagcagtgcagcagcctagacactgataaattcagaagacatcctttcattccatcgaataataatttcactacatttcaaaatcactgtgattttgttctggtggcacaggcttaccctcatatattgtctcaagattgatagctagatcttcatatttcgtcttccttttcttttattgattacattgtataaagcatttgtccagatttacatgctggcagattacaatggttactcattttcataatttgtgtatgtaaatgctttactgccacggaaattgagtgatacaatttcttttaaaa

SEQ ID NO: 23459 - DNA, 377 bp, Glycine max
aaacaattggcttgcaaatgccaaacctccaaaagctttacctttatggcaacaatttaactggaccagtaccagaaagcattggtgacttgccaagactccaggaactggcactgcatgaaaataagatatctgggtcaatcccttctaccattggaagcttaaaaaagctcaaaagtttgctgctttactcaaaccaaatttcaggtacaatacccctctcacttgggaatttgaccaatttggtagaattggatgttcatgataatgccattatgggtcaagtacccaatagcataggtcagatgcaggctctggagaagcttgatctttcaagcaatatgcttagtggaagcataccttcttcactaaccaat

SEQ ID NO: 23460 - DNA, 1008 bp, Glycine max
tcgcttataaccaatgccggagcagttaagtctctgatttatgttctaaaaaccggaactgaaacttcgaagcagaacgcggcctgtgcgctcttaagccttgcattggtggaagagaacaagggctcgatcggggcttccggtgcgataccgccgctggtttctttgcttctgaacggttcgagcagagggaagaaggacgcgctgacgacgctttataagctgtgttctgttaggcagaacaaggagagagcggtgagtgccggcgcagtgaagccgctggtggagctcgtggcggaacaggggaacggcatggcggagaaggccatggtggtgctgaacagcctggcggggattcaggaagggaaggacgcgattgtggaagaaggcggaattgctgctcttgtggaagctattgaggatgggtctgtgaaagggaaggaattcgcggttttgacccttcttcagctctgtgttgatagtgtcagaaacagagggtttcttgttagggagggtgggattcctcctctcgttgctctttctcaaactgggagtgttcgagctaagcacaaggctgaaacacttcttcgatatttgagggaatcaagacaagaggcagcatctacttcaagttcttagacaagtgattacattgctacttgggaagttggtaattatacaatgtaattggttgttgtatatatagtgtttttgatggtttgtacagtgtggttaagatagttggaattggaaccgtgtttattgaagttagatgaagctagcgatctatagactgaccctttagatgtatgaatatagctaggtttgggagtttgctttcccttgtttcgattcgctggtgtttcctgaagctacatggttgtctttttggggttgattaggttcccttctgtttagatgaccctagttttgtgaaaagggtttctgattgtattattgtatggtaattcatttgcgctcgtaatgaaagtacggagcttgtactgc

SEQ ID NO: 23461 - DNA, 289 bp, Glycine max
acttgataagattccgtgcaaggacatgcccagccttgacttcctcaagcataagcatgttgctgaatcaggaactgcttgaggctcgagacattcacttaataagtttgccaatagtaaagattccagagtggtttacgtgccagagtcggggaccgtcaatttttttctggttccctaacaaattcccagtaataactgtttgcattgttacctcaggtcctaagatatattccaattatctggttctcaacgtgattattaataagaaacataaacatcgacatca

SEQ ID NO: 23462 - DNA, 439 bp, Glycine max
aaagctgataaggatccattatccccagatacctcagaatcttctcaaactaatcccacaaccgagaactctggcacagtgaaaatcaatgtgcatggaaagtgggtatcccttgtttttggaatcattctcatgactgtattctcatcataaaccattgcataccatgtagttaatattcaagagtgttatgattgtgagaaaggagtgagtactgagtgctttagtggtgagtttatcagagtggattagggatatgagattgttgtatccctctatgaatttattctgaggtatgctatatatgattgcttcatatattttttatgcacacttccacggtggttggttcaatattttgcaattttatgatgtaatctgaagaaaaaaatcatcaaaactctgtcccaaatttaataataaaaatcaatagtttgtt

SEQ ID NO: 23463 - DNA, 314 bp, Glycine max
gataaggatccattatccccagattcctcagaatcatctcagattaattctacaaatgagaactctggccctgtaaaaatcaatgtgcatggaaagtgggtgtcccttgttcttggactagttctcatgcctgtattctcgtcataaaccattatttgccatgcagttaatattcaagagtgttatgattgtgagaaaggagtgattactgagtgctattctggtgatatgagattgttgtatccctctatgaatttattctgagatatgctatgattgcttcaatacattttttatgcaaaaaaaaaaaagaa

SEQ ID NO: 23464 - DNA, 286 bp, Glycine max
atcctcctgtcaaacaatgatctatcccttgctgcttaaagtaaccttgtttgtggttgtaggttattcaacttcaaggtgatcagaggaagaatgtttcggctttcctagtacaggtaactataacctcatctttgtgttatatagtgtgttgtcccgattaatttctccattttaattttcatatgttttttgttgtctcttctgtctttgctgtttttcataattgtgtttctaggcttatttttggaatggctcattttagagaataagcttcttgattgtg

SEQ ID NO: 23465 - DNA, 336 bp, Glycine max
gagaccactagaaatgtcaacccaactagtcatcttcatcagggcttttagaaccccttactggtctcttgtcaccatggattcagaagtacttaacttattagcccttatcttgccctttttactcttcgttattgtggcactgaaaataggaagaagaaatctcaagaaatctgagtcaactccaaaaatacccccaggaccatggaagctacctatcatagggaatatactccatcttgtctacatctacaccacaccgaaaattaagagacttggccaaaatatatggacccttgatgcatctccaacttggggagctcttcataatcgttg

SEQ ID NO: 23466 - DNA, 322 bp, Glycine max
gtcgagcgcgtcaacaaacttgtctacgttcgcgcgttacgctccaggtataaacctgaggttggtgacattgttatagggcgtgttgttgaggttgctcagaagcgttggagattggagataaattacaatcaggatgcagttttgctgctctcttctatgaacatgcctgatggtgttcagaggcggaggacagctgtggatgagctaaacatgcgctgcattttcgaggagaatgatgttgtttgtgctgaagttcgtggtttccagcatgatggcttacaccttcaagcaaggagtcggaaatatggaaagcttaata

SEQ ID NO: 23467 - DNA, 390 bp, Glycine max
cttcaaacactgcctacagatcaaggaagcagaggtgggaattcttattgttgatgaagctgagagattgataccaatgcaaaagtccgatgataaggactacgggttggaagccttagaggagattatgtctgtcatggacagtggaaagattgtcgtaatatttgctggctacagcaagccaatgaagcgagtaatcacttctaacgaaggtttctgtagacgtgtgaccaagttttttcaatttaatgatttcaactcagaagaactagcacaaatccttcacattaagatgaataatttagcagaagatagtttgctatatggatttaagttgcataccgattgcagtataaaatccttagcagcattgatagagagggaaacaac

SEQ ID NO: 23468 - DNA, 305 bp, Glycine max
atcctttgaccaaagatctacagtattcagagagcaactttaatgggcttgaacagtatgctcgaaacaagcgtgttcaggttgcactaacagaaaagtgggccgaaacttacaagaacaaagggataggattttactcaatgcaccctggttgggctgagactcctggggttgcaaagagtatgccaagcttctctaaatcgctttcagggaagcttagaacaagtgaagaaggtgcagacacagttatctggttgacattacaaccaaaggagaaactggtatcaggtgcattttattttgat

SEQ ID NO: 23469 - DNA, 447 bp, Glycine max
atcgacacgtgcgtcggccaaaacagtcacgtgcgagactcggatattgcgaatctcccttacctccaggccatagtgaaagaagttctccggctgcacccaccaggcccgctactatcatgggctcgccttgcggtccatgatgtccatgcggacaaagtcctcgtgccagctggcacaacagcaatggttaacatgtgggccatttcgcatgactcgtccatctgggaagacccatgggctttcaagcccgagacgttcctcaaagaagatgtttccatcatgggatccgacttgaggcttgcacccttcggggctggacgtagggtgtgtccgggccgggccttgggcttggccacggcccctctctggctcgcgcaacttcttcgccacttcatatgggcttcccgcacaaaccgtggatctttccgaatgccttaggctttc

SEQ ID NO: 23470 - DNA, 330 bp, Glycine max
aaatcaatcaacaaccgcaaaatcaagctccactggaacttcacccgcgccgagttcattcaaaactccgctgagccagagtcacgcttctacttggcaatctcacacaatggcaaactccaattctttttgcggcgaccttgtccgcgatttgactcggcgccacaaaaagctcgacgttaaggctaacaacgttgttgacccagttctggtgtcgagaagagagcacgtgttcggaagaaggtgttacgtgtcacgtgcggtgttcatggggtcgaagcacgtgatagagatcgagtgcggagggggtgtgctgggagtgaaagtgga

SEQ ID NO: 23471 - DNA, 402 bp, Glycine max
tcgagcaggcaatgaatgaagcatgaaacattggatgagcatgaggcgcatggcggtaggagcagtctcaaactccactctttttctaccttcctctcttctatcttcttctaaacctaatcccttaactatcccattctccttctatctcaccaaaacgtcaccgttttccatttctgttctcactcgccaacgccgcttcctttccgtttcttctttaaccgctgaccaccacaacctctctgatttcggagatggtgacagcgttgcaatttcaaacgaaggtttgaagatgcttctcaaagggatgacttatccagaacttgaaaaatgggttcaatcacatggatacaggcctgggcaggctatgatgttatggaagcgaatgtatggaaacaacat

SEQ ID NO: 23472 - DNA, 667 bp, Glycine max
cctcgagccgattcggctcgaggtttctgcgaggcttaagaaacctcgcagaaccaaagaaaactcactctcacacactttggttcacaaaaacctttcacttctattttcaatctttctagttccttctcccatattatagtacccttttatcccaagttacttaaatttaaaacctttattactgctcatacttgtttttcgctttgttaagttttaagaaaaatggaggcacattctccagttatagccaagaagctatggaatgtgttgaggatcaccttcttcatgatcaggaagggcttggtgtcaaagaggaagctgattatggacatgaatttgatgatgaagaaagggaaattgctcagaaaatctatgagcaatttcatgtcatctcatcaccatcatcattattcaaagagtttggcacgtggttatggcatgcaggaatatgaattctcatgcagcaacagtccacatcctgtttttttccatgtgccaaagaggaagcatcatttcaacttcccttgcatgaacaccccagaggttgttgaagagcctaataataggcctgtggttttggtgcctaataatatgacacctgaatacactttcaaccttaggtttgataatattaatgcatctgattttgcacctggggagagga

SEQ ID NO: 23473 - DNA, 363 bp, Glycine max
aatgaaactacgtgtgcaacttcaggccgcaaaaggaactgttgagttcctaagggctgatgttgcaagagctgttgatggctacaactccgttgctttagagttagaccagtctaaagctcgggtgaactcactagaggcacttgttagcaaaattgagaaagaccccatcaataataaatgcatcccttctgaaaatgttgcagatgaccataaatctgagcaccaacctgaaatattgaaagagggagaggatcctaatcagctggaagcagcagttgtttctttgaagtccgaggttgaacaattgagatctgctatagagactgctgagactaaataccaagaggaacagattcgaag

SEQ ID NO: 23474 - DNA, 374 bp, Glycine max
gttttaaattctacaaccagactcatgaaatctcctcctcaatagttaactaacacatccttaaaatattcctcttcaatctgctcaatcttccactcttgtgttgtcttgtgtgtgtttctccgcctagtcctagatctgtctccccaatggctggtttcttctctcttctaaggcgcctctatctctccctttacaattggaccgttttgtttggatggtgtcaagttctgtattttgttctcaagacattgaacgaatcgggtcatcaacatgtttacagtgcagcagaaaaacctttgcattatgctcaaagcgctgctgtgttagagattcttcatggcttggtaggattggtgaggtctccagtaaca

SEQ ID NO: 23475 - DNA, 593 bp, Glycine max
actaactgcgtgcgaaggattttactgcgatcaattcaaaccaaactctaacacaaaaccaaaaatatggactgagggttataccggatggtttcttgcatttggtgatgctgtgcctcacagaccagtggaaagatcttgcatttgctgtggcacgcttttaccagcgaggtggaacttttcaaaattactatatgtaccatggagggactaattttggccgggcttctgggggaccttttgttgctagtagttatgattatgatgcaccaattgatgagtatggatttattagacagcctaagtggggccaccttaaagaagttcataaggccataaagctttgtgaagaagcattgatagctactgatccaacaattacatcccttggtccaaatctagaggcggcagtttacaagacaggatctgtatgtgcggccttccttgctaacgtagacaccaaatctgatgtaacagtaaactttagtggcaattcatatcacttgcctgcatggtctgtgagcatcttaccagactgcaagaatgtagtgcttaatactgcaaagattaattctgcatctgcaatttcaagc

SEQ ID NO: 23476 - DNA, 386 bp, Glycine max
gttactctcctttgtttcattctctaacttatcttttgtttagttttgctgatctgtgtcgtgcagtctctggcgaggttaccaaagactccgtggtgcccaacaacaacgtttgatacatcaagagacacataacataacagaatactcaaaacattctccatttctaatcaagaaaacaatcagaaatgttacctcaaacattagccatccctgcattactctttgtggtattcatatttattctatctgctgttgtgttgcaatcaaaacaaaatgagaaatatccacctggtcccaagaccctgccaattattggcaacctccacatgctagggaaactaccacaccgcacccttcaatcccttgcaaaacagtatggacct

SEQ ID NO: 23477 - DNA, 292 bp, Glycine max
catgcccgctaccaaatacacacgaattcaaagtaggggatgatcacaaatggggacttgtgtacaaaccctaagctacatgtccgtgttttggaatgacgcgagcttctgttggctgaaatcaatttctcactccgcaatacagttccttctgcatgttgcaccccaacctcccttacaccgaacttcgagcgcattgtcccctccgccctcgaactcatcattgtgatcctaatgattgagacatttctcttgcactcaagatcgtggtggtgatcggtgagaatggttg

SEQ ID NO: 23478 - DNA, 330 bp, Glycine max
tactcgagccgaatcggctcgagtgagctttcacttcttccaacttcttcatctatctacttctcttctcttctcttcccttcttctgttgtaaccaacaacaaataacacttttatccctcagaaattaaccatttttcgtttctgggttttctataattttgttgattttccattccttctattttctgctgctgctaggtagcagtggtatgtctagcttatgagttatgagctatgagcatctttctattttgaagagaagattggaatttttttctctttagagaaaggcttcttcctagtggttggatttttatccatcaagtt

SEQ ID NO: 23479 - DNA, 402 bp, Glycine max
atgcgtcaacagatttgttgccgcgtatgggcggatgcccttggtatctacttcagttaaggctgttgatagccgcaatatctggtcttggtgacgctggaattttgattttccttacatttctagaaattctactgccgtccttttattagctagttgagttactcaattcatgttagtcacagttgtataatatattggatcttatactccattcatgcgttttgccgctaatcgatcaaattccttaggttgatttcttgtattagatatgtaatgcaaggcagcatcgtgtggtactgtttccccctcaaaatattaagaatttcattgtagaatattattaaagggttattacaccctaagagatgaagctctacctgtgatatagttattatttat

SEQ ID NO: 23480 - DNA, 502 bp, Glycine max
ggtggtttcaatttggagcacatccctgcttgcgtcgttcctttctttctctaccttttcggtctctctctctctctctctttccaagtacctgtataatatgcaaagagacagaaagaagggcagtaagtatcctcccggggagtcttctaatcctcaatcatcagaaaaagatgatcacaataatgatacaaatcttgctgaaggatctagtaaaccagagctgagtaacaagaatactccacaatcactgaaggccaaatctaaaattgttaagaaatccaagggtggtaagttcaagaccataataaataaaggttctcaacagattgggggaaagagaagacttagaaagaacaaaaaagtagtgggcaatagtgatgaactgcctaaagagaagagtgagaaagatggaaggaataaagagaaggaaagtcaaaataggagcactcatgaaaaaagtcctattgagaatagccatcgagctgaaaaaaataagatc

SEQ ID NO: 23481 - DNA, 478 bp, Glycine max
atagaaattaaagacatgctcaaagttggcgtgccactcaaggttgttgggattgttgtgttatctcttctcacgccatcactaggaactattgtttttggaacaaacaatgatactcaataagggacattgaccaaggaaaactctcgttggtttggaaattgattgatttcttctccaaattgcagaatcttgtttgtctaggaggttaatgaaaatttaaatgtgcagggccttctgctatatttaggtaatggggaataccctgtgtagatatcaacagggcaaaggagaaggagagaaagatctccatctctttctttcttgcttctattttgtatttctttgttaatttgtttataagttttttacagggttatattatatagatccaattattaagtataggatgaatttccagctgttgtaaatctttaaaccagtaatagatgaacggaattgattttttttattgtgt

SEQ ID NO: 23482 - DNA, 522 bp, Glycine max
tcactgaagactttttgttgttccgtagtgcctccgaagggagaggttcaagcaaggatgcattgaagaagtactacaacaagaagaatagtaacgaagaggttaaagggtcgtcgagttttagatcctcggattcgtcgagatcaagaaaggaaccgctttcggcgcatgagttgcactacgccatgaagagacaagagtccgaggatatgaagaagagaaccttcttgccttacagacaagggattctgggaaggttggctggtttcggaatctagttttaattaccagatcatggtgatgatgatgaggtttccttgatgaattttcgtgtatacccggttgttgtttttgttttttagtgaaaaagaaaatgttgtattcttttgttaaattgtaatttctctcaagtgggtttaagctgtgtatgttgacccaatcatttgtcctttatgtaaaggccaggtaattatatattatgatcccagttgcaatttgcgaatcatcgcggtcaattttaat

SEQ ID NO: 23483 - DNA, 709 bp, Glycine max
tgggcagcatgaaggtgcatcagttcacacgtggattaatctgggagcacgaacctttcctcacacttggctgcaagagattacgccctcttgctcccaagcttcccaacaccaaaactatcactacccctttcgatctcaagagcttcatcaggcccgaaagtggccccagaaaacccgtttcctctgacgacactaagaaggatccaccttcaccccaaggccagattgaaacgcacccaggagggacacggtggaatcctacgcaagaacagataggcatattggagatgttgtacaaaggagggatgcgaactccgaatgctcaacagatagagcagatcactgtccagcttggaaagtacggcaagatcgaagggaagaacgtgttctattggtttcagaatcacaaagcacgcgagagacaaaagcagaagcgcagcagccttgcatcttctcatagtcctcgaactcccacaattcacagtgttgttactttggagacaacaaggggggaagtggtagagagagatcacgaggaagatagtccgtacaagaagaagtgcaggagatgggtatttgactgcttggaagaacaaaacatgtcatcaccgtgtgagcaagaggaacatagaactctggagctttttccattgcacccggaaggcagatgaaggggtttgagtttgattgaccatttatctatcat

SEQ ID NO: 23484 - DNA, 300 bp, Glycine max
gatgggcagcatgaaggtgcatcagttcacacgtggattctgctgggagcacgaacctttcctcacacttggctgcaagagattacgccctcttgctcccaagcttcccaacacccaaactaatactatccctaccaccccttctgttcctttcgatctcaagagcttcatcaggcctgaaagtggccccagaaaacccgtttcctctgacgacagtaagaaggatccaccttcaccccaaggccaggttgaaacgcatccaggaggaacacggtgaatcctactcaagaacagataggc

SEQ ID NO: 23485 - DNA, 384 bp, Glycine max
acagacgaagatcaacagagattagaacctcacaagtatcaaataagctaactcatacaacggtttactatcaatatttggtagggttatgaaaccaaatactgctgcaaatgattggttctcttcttgttcttaagcttcttaaaagcacttgactcgatttgcctaattctctccctactcacacccaacatctcccctatctcttgcagggtcttcgtccttccatcatccataccaaatctccatcttaccacctgcctctctcttgcattgagactgtccagagcctcttctaggtccttcttcatgaactgcttaaggagctgttcttcagctgtttcggcatcaggatcagaaattacttctgagggtttaagattc

SEQ ID NO: 23486 - DNA, 283 bp, Glycine max
gcgcgcacataggttttttcaagacagtgacagtgtgacatcacgttcttttccttcgtaggtgcgcccgcactcaccaaccaccagatctctccaaccttatttatttacactctcctccacaccccactcttttctttttccacattcgcattcatggaacgtgcccggaggctagcaaacaaggcgattctcaagaggctaatttcctcggccaaggttaattcccattcgcgttctctttcatctatttcccattccttttcattacccaaaccagagg

SEQ ID NO: 23487 - DNA, 760 bp, Glycine max
ctcagcttggagaggttatccgtgagaaaggacaacagcttgacacaccagttctagaaaatggagataattggagtgtaggacagcgacaacttgttgctctgggccgagctctgctgcagcagtcaagaatacttgtactggatgaagcaacagcatcagttgataccgccacggataatcttatccagaagattatccgaagtgagttcaaagactgcactgtttgcaccattgcacatcgaatacctactgtcattgacagtgatctagttcttgtgctcagtgatggtcgagtcgcagagttcgacactccttcaagactattagaggataagtcatccgtgtttctgaagttggtgaccgagtattcatcacgttcaagtggcataccagacttttagaacaaatggaacgtgtgaatgctttcatagtgtggtggccggagcttaagacagttcaaaagttgaatcaggaattgatgccacccttgcatgccactgctgcattcggggcatgcgtagagacacgagctggaaacaaacaaaataaaagggagtggtttgtgcctcctcatgaatcaagcatcccactaggagaaatttgtttgattattccccttaaagttgaggaattcatgcatggttagcatgctttgtaacacaaaataagttgatctgtgattacaggaaagcaacgaagtagtttgtagaatgaggcacaggattttgcttggttagataaagtgtagagtttaaat

SEQ ID NO: 23488 - DNA, 725 bp, Glycine max
aaacaatagtgacagcagtgatgataatgactatggaagcagaggcttgagcattcgtgatggaagtgacaatggaagtggcactcagagttcatggactaaatgtctagctcaagttggcagtcctcatccagtttcacctcataaacagttggttgatgcccctgatagcacatgtgcccaagtgatgcaaacaaagactgaaaaagttagtagtagatgggtgcatgcgacggaaaaagagtgccatgaacttattgatcttgatgatgttgcaagggttaaggacttggctatgggaatatctttgaatatgcaactagagcatccactcgaggaactgtctagcaatccaattgtgggtaaaggggcaaataagatgtctgatgtagatgatatgcagatcattaagagaaagagcaatgtctgtgaaaaaggacaattggaatacaatggtgataaaaccgggacacgggaaaatcaggctatgaatgttattgatgttactgatagcaacagtccactcgctgaaagcagagacttgaacactccaaatgggttttctggtttttcacaatcaaaagcaaactgttgccccaaagagtgatccatcccttgaactaactttggaaaggctgggagaagtaagagatggtaaaaatttcacaggtgaagaatgcaatgtcttgagacattcagatcagtcagcattctcaaaatataat

SEQ ID NO: 23489 - DNA, 285 bp, Glycine max
cattcacaacacaacacaaccaaatccaacatggtagccattctgaagagacaaagagaaaccgaagccgaggagagcatcataagactggcagaaagtctcatgcaactgtcgcgagtccaacaaaaaagcaagcctcttctcaaaaccttttctccaacggagttcgagtgcaaaacctgtaaccgcaagtttccatcttttcaagcccttggtggtcacagggcgagccacaagaagcccaagttcgaaggtgaagaactcaaagaggaggccaagaagggt

SEQ ID NO: 23490 - DNA, 284 bp, Glycine max
gtgagatagtgaacccattttgcttccagcagctctgaggccctcctgtggatgcatcaagacaacagcatgatggcgccagacttgaggtcagcattgggcaagggcaactaccagagcagagaaaccagataatataccatacctaactgttcgcctggaagttactcttcatgggcaagtgtttgaattttctcttgttactgcgtgtcgaacaatcatgtagctgtagatatagtgattgtggaaggatgaagttgccaattgaccgtggcgattcctct

SEQ ID NO: 23491 - DNA, 938 bp, Glycine max
ctcgagcgaattcggctcgacagctcgagcggctcgagcctgtgtgggccattgtactcaacaatttcacctttcactatgctttatatgtgctcatgaactggctcccaacctactttgaattgggccttaagcttagcctacaagatatggggtcctctaaaatgatgccctatctcaacatgttcctcttctccaacattggcggcgttgtcgctgactacttgatcaccaggagaatattatctgtcaccaaaaccaggaaattcttgaacaccttaggattcttggttgcttctcttgccttggtggtgattcccagtttcagaacttctggtggtgctgtcttctgttcttctgtggctcttggtttcttggcacttggcagagctggctttgcagtgaaccacatggatgttgctcctagatacgctggaatagtgatgggtgtttctaatactgccggtacgttagctggtattgttggtgttgacctgactgggaagcttcttgaagctgctaaggctgctaattctgatctttcaagtcctgaaagctggagaatagtgtttttcattcctggttttctatgcgtctctagttcttttgtatttctactattttcaactggggagagaatttttgattgaggtagccttgtcattttcatggctcgtgagctgttgttattctggggatttaatttttattccatctccttattatatcattcttggataggagaggtcatgttgtcataactggatatgaatttttgttgttattattttttctccatcttgtactattcctagctagtaaaggctacaacccagcttgcatcaagagtgatattttcatttatgtatttctgaatgtcacttccatagtttctttaatcgtaaaaatgtttttacgattaaagttctagatcgcga

SEQ ID NO: 23492 - DNA, 290 bp, Glycine max
gttattttaatttaatttccttacagtaattcttttttatttagttattgcgccttcccttccaggttcaggtcacagtaatttcgtttttgattggaaaacacgatctaggatttgcattgggattgcacgtgggcttgcttatcttcatgaagaagtaagaccacatattgttcacagagatataaatgcaagcaatattctccttgaccaaaaccttacacccaagatttctgattttggtcttgcaaagcttattccatcatacatgactcatgtcagcacacgtg

SEQ ID NO: 23493 - DNA, 231 bp, Glycine max
cggctcgagaaaacaatttcagatcttaccacagaattgaatgagcagcaaagtcagctgcagggaaagaaagaattggagttgtctttagaggaaaaagcagaagaatctgccaagatttcatctgaactcaattttttggagaagagcttgcattctctgcataacgagttgcatgctgagaaaactgtcagagagaagttggagaaaacagtctcagatcgtaccaca

SEQ ID NO: 23494 - DNA, 271 bp, Glycine max
acgccatttctttcacaggccctcaaaagcatacacgactggatcaaggaaaagaagaaaggttcacactgatgatgaaggaattgaaacaagatggcacaaaacgggaaaaactagagcgggttttgcatctggtggtgcagtaaaaggttttaagaaaatactagtactctacaccaactatggaaggcaaaagaagcctgagaaaacttactgcggtgatgcaccaataccaccttggcaatactgaagaagagaaagatggagaact

SEQ ID NO: 23495 - DNA, 677 bp, Glycine max
cacacaacacaagacattcattcttaatttcttatccttatactaatgtcatcgacagcagaagcacccatccatggggatatcttagaggccatattctcgcacgtgccactcatccaccttgtgccggcctctcacgtgtcaaattcctggaagcgtgcggtctcctcctccctcgctcacgtcagacccatcaagccatggctcatagtcctcacccagagcctccgccactcgcacgtgacaactctccacgcctacgacccccgctcgcacgtgtggctccaaatcaataactcaaaatactgtcacacctcccccgtgcgatcctcacactcgacgctcttctacacactcaccccatccgagttcgccttctccctcgacgcgctgcacctcaactggcaccacgcgccttccccgcgcgtgtggcgcaccgaccccgtggtggcgcgcgtggggacgtgcgtggtggtggccggcggtgcgtgcgagttcgaggacgatccgctcgcggtggagatgtacgacttaaagagccaatcctgggaggcgcgtccctccatgccggcgctgctgaaaggttcgacggcgtcgtcgtggctgtcggtggcgatcgccggagaaatcatgcacgtgactgagaaacactccggcgtgacgtactcgttcgacac

SEQ ID NO: 23496 - DNA, 259 bp, Glycine max
aaaaaacacttagtaacagaaacacaaagacattcattcttgtaccaatggcaacagaagaagcacccatccacggcgatatcttagaggccatattctcgcacgtgccactcatccaccttgtgcccgcctctcacgtgtcgaattcctggaagcgtgcggtgtcctcctccctcgcccacgtcagacccatcaagccgtggttaattgtcctcacccagagcctccgcgcctcgcacgtgacaaaccttcacgccta

SEQ ID NO: 23497 - DNA, 1099 bp, Glycine max
gtgagttaaaacacattataagaagcttaatttatcagtgacgaagcaaagctaatcaacaaactgggactcacacgaaaagcatggaccataataacttgtacctctccctccttctcctcttcgtttctttcgtgaccctctccctcttcgtcctcttctacaagcacaggtctccattcgtggccccgaacctgccacctggagcaaccggttacccggtgatcggggagagcctggagttcctgtccacaggatggaagggtcatccggagaagttcatcttcgaccggatgatcaggtactcctcccaactgttcaagacctccatcttcggggaacccgcggtcatattctgtggggccacctgcaacaagttcttgttctctaacgagaacaagcttgttgcagcgtggtggcccaacagcgtcaacaaggtgttccccaccacgcttcttagcaactccaaacaagagtccaaaaagatgaggaagttgctccctcagttccttaagcccgaggctctccaacgctacgttggaatcatggacaccattgctcgaaaccacttcgcttccctttgggacaacaagacggaactcaccgtctatcccttggccaagaggtacacgttcttgttggcttgtcgtttgtttatgagcattgaggacgtgaatcacgtagcaaaatttgagaacccttttcacctgttggcgtctggaatcatatcagtgcctattgatcttcctggaacgccgttcaacaaagcaatcaaggcagcaaacgcaatcaggaaggagctggtgaagatcattagacagaggaaggtggatttagctgaagggaaagcatcgccaacacaagacattttgtctcatatgttgttaacatgcgatgagaagggacagttcatgaatgaattggatattgccgacaagattcttggccttttgattggaggccatgacactgctagtgctgcaatcactttcattgtcaaatatcgtgctgaactccctcacatttatgatagagtctatcaggagcaaatggtaattgcaagactgacatcgccaggcgagttattgaagttggatga

SEQ ID NO: 23498 - DNA, 525 bp, Glycine max
actgatgcaaaaattgagattagtcctagttgatcatgcattacaaaatggtgacaaagaggtgaattcaagtacctcaattttccaaaagattggtgcctttgaggaagagctcaatgcccttttgccaaaagaggtggaaagtgctaggattgaagttgagaatggaaatcctgccattcctaaccgaattaaggaatgcaggtcttacccattatataagtttgtgagagaaaatttgggtacaactttgctaacaggagagaaagtcaagtcacctggtgaggaatctgataaggtatttactgcattgtgtgaagggaagttcatcgatcctttgttggactgtctaaaagagtggaatggtgctcctctaccaatatgctgagatggtgctaccttttttcttaagaaaaccaaaatttacttttcattttcctatgatgtatgttttataacgctattggacgtgtatttgaaactgtaggaatttgtatttcaatttaatatatgttctttttctgt

SEQ ID NO: 23499 - DNA, 710 bp, Glycine max
aatgcaatcattgcttgtacaagggatggaaaatgtgtctgtaattggatcagatgctgctaaagcaatcagtagggaaatgcctgttgaactcttgcgagcaagtcttcctcacaccaatgatcaccagaggaaattactactagattttggtcagcggctctgtgcctgtggttggatttaacagttatactgggagcagtagtggtcatgtgaactcagagactgtgctaagttgatagatgattggagagaagtcctcctaattataatggtatgtgttgaaggtttcatcaactgtacaactttgtatctgtacttgtgtatatctggagcaaactgaagtggaagtgcaagttgcttctatggtagaggtttctgccccttttgtatatttatcatagtgccataacgatgtggtagcattatgatatatttgcaatcaggctctccatgtattatgatatattcagcattatctgttccctcatgtcttttcttttactcatgacaggggagcttattctattactgtgtctggtataaacttttagtggttagcctgtacaggtttaggcacatatttgattcccatgtttcctttctgttatatatacaagttgtggggttgcttgtattcaaatttactcctgataggtcaccgttctagtggaagtggcattgggttgggtggtgccataaactttacc

SEQ ID NO: 23500 - DNA, 613 bp, Glycine max
tcgagacttcggctctgtttctggtcagttctatcagagtccataaattaagagacttcaaaatgaaatttgttgggaacattatttctagtttagtaatagttacccttaaaggtatgttaaatttgattatacaaaacaaattctgaacatagctttgtcattcctgcagtgagatcgataaggcattctgcggttttctgtaccaatgtaaatatcaaccgtatcagagaatattgcaagagaatggatgtacatctgcactgttctatgctgccacctcaacatctatgtagacagatgaaggagaaatttctaaccacaaaattacaaattctcaaaatgattaccacgggatggatcagggcaataatattggggttgcaactggaaactggggatgtggtgcctttggaggagatcctgaagtaaagacaataattcagtggcttgcagcttctcaggctctaagacctttcatagcttactacacatttggcttggaggcattgcagagcctagacgaggttgcccattggatttggcctcagagatggacagttggggacctatggaacatgctaattgagtactcattaaatagatcaaaagg

SEQ ID NO: 23501 - DNA, 409 bp, Glycine max
atcagaatgggattaagatccagtggacggggttccctgttgggtacacaccccctgatggcagtgctgattacatcattaaccatctcaaattcaaagtcttggttcatgaatatgaaggaaatggtgttgaaatcattgggactgaggaggaaggtatgggtgttatctctgaagctgaaaagaagaaggtatctggatatgaaattgttggctttcaggttatcccttgcagtgttaagcgtgatcctgaagtcatgacaaaactccacatgtatgacaatatctcttcaacaaactgcccatctgagctagacaagtaccaaccgattaaagagcaagagaggatatcatttacatatgaagttgagctcgtgaaaagtgatatgagatggccatcgcgttggga

SEQ ID NO: 23502 - DNA, 500 bp, Glycine max
aacgctgctaattaattattagtttcacttcaatgactcaaagggatcgtcgcaccctatcattcccggcggttcacccatgcgaaccatttctccgccgacacttgtcacctctctaatcactctctcccaatccatatgcaatttccaaccccaatcattccccacccaacgaaggaacgccagggaaacaatacgccaaataagcattgtcttaatgttccttcaagaaattcgactaatccccaactccactatcctctctttggcggaactccacttcaccttacaaaaaatccactttttattgcaagattgcaccctccaaggctcgcgcctcctcctgctcgccaaatcgcaacacgttagcgtccctgttccccgccctccttcgctccgtggccacctctctggacgtcttgcctcttcaccagctccacttgtgccccgaagtcagggagctggccgaccttgttaccaagcaagccagcaaggccaag

SEQ ID NO: 23503 - DNA, 483 bp, Glycine max
  unsure (1)..(483): unsure at all n locations
cttttggacttgatggtccaaaggatgttgcgatgaaacttgactgtcagatccgaggatgaaactgttagcgataccatccatgagattgtggctagcggctagtgcactcggtcaagaaatgttggctcaactcggcctttctttttgttactgagattggagtttagcagcctcatagatagccgtgtgtaaaaagtattgcaaaactgtacacttcttaatatatgcaatttattggtcacccattttgcatgcttgttagaccggcaacaatactttccagtattacgttgggtgtgttggagtaaacttcaatggtgatgattatacttttcatttatttgtagcaactgtaatacgaattttggggatttgcataaatatttgttttttcaatgatttggatatttgttaaaaataacaattgtttagtgcaaaagatgtcactattttgtgctttaaaaaaacaacnancaactt

SEQ ID NO: 23504 - DNA, 345 bp, Glycine max
cttacgctttctcggacgcgtgggcgcaagggggctctcaatgcagagaacaatctctgcatattgggcgcaactgctattgaagataaactgcagcaaggtgtgccagaatccattgagtctctaaggactgcaggtattaaagtatgggtcttaactggggacaaacagcaaactgccatatcaattggatactcctcgaagctccttacgagcaacatgaatctaattacaattaataccaacaatagagagtcatgtagaagacgtttgcaagacgcccttgtcatgtctagaaaaaacatgactgtgcctggggttagtcacaattctgaaggaagatca

SEQ ID NO: 23505 - DNA, 433 bp, Glycine max
tatcaaactcccatggtatgcacgcattcaggtggcacttggagctgcaagagctttagagtatctgcatgagaactttcagccacctattgtgcatcgaaattttaggtctgctaatgttcttctgaacgacaatttggaagtgtgcatctctgattgtggattagggccattactctcttctggctctactggtcagttatcaggacgcctccttacagcgtatggttacagtgctccagaatttgagtctggaagttatacgcagcaaagtgatgtcttcagttttggtgtcgtaatgctagaacttctcactggacgaaaatcttatgaaaagtcactgcctcgtggagagcaagttttggtcagatgggcagccctcaactccatgacattgatgcattgtcaaaaatggttgaccctgcttaaaggg

SEQ ID NO: 23506 - DNA, 970 bp, Glycine max
ggattctgaggttgagattagaaggaagaatagtaattgcaatagtactagtaatggtaattcgttgccgaggcctgcgagtttgaatgcgtgtgacataatatcgtgttctcaaggctttgatctatcagggttgtttgaggagaagggtgatgaggcgaggtttgtgtcttctgctccggtgtcgaagattatatcgaaattggaggaggttgctcagttggttagcttcactgtgaggaagaaagattgcagggtgagcttggaggggtgtagagaaggtgtgaaggggcctttgactattgctgctgaggtttttgagttgacaccttccttggtggtggtggaggtcaagaaaaaaggaggggataaggccgagtatgagaagttttgtaactctgagctgagacccgcgttggagaatttggggatggaggattctgcttcttcttcttcttcttgtcatcaatctacacacactcaatctgaattccaaatacaacatcgaacattttctgactctgcccttaacagacattcagataataatgaatgcttatatgatcaagagttgggtctagcagaagagactagtatcccacaacttggtgaaccaaagttcgaatttcaacaggaaaatgtgcccatgtttactatttgactgtgtctacaacactattgttttcaaagaatgaaacatgtggaaaaccaaaaaaagataatgaatgtttgcattaattaaggtaccaggagaatgacagaagatgacaacatactatttctctcttgttatttttaggctgtgtgtaagttaaattttactttctttttccctcaagaattttccggcatttttaggtttgctccttgactggagcattagatgctactgtatttctttgtccaaatgttgtattattgtaaggctaatttaattttaaatatagtgaatgaagaagtttatatgtgt

SEQ ID NO: 23507 - DNA, 310 bp, Glycine max
attccaatactcgcttctgtctgtcttttgctcttccaattataagcacaacccaatcttttaattcgttacccgatctccatttccactgtgtccacggaactcaagaaacacaagtttttgagcacaatggaatctgaaaacggggttgctgtggaggaagagaaacgtgttattggggtaacaaccaaggtggagaatgtaaagaaagaagttgaaaatgactgcaatggtgcagaaattatgaccaagaatgaagtatctaaacccacattagtggctaaacgccccatttcgctggtgacaaagt

SEQ ID NO: 23508 - DNA, 833 bp, Glycine max
cagaggtggtggtggtggcggtggcggcggtggcatgagatcaaggttccctggtgggatgtttggtgatgatatgtttgcatcttttggggaagggggaggaatacatatgagtcaaggtgcacctcggaaagctgctcccattgagaacaaattgccctgcactcttgaggagatatataaagggactacaaagaagatgaagatctctagagaaattgcagatgccagtggaaaaaccatgccagtagaggaaatcttgaccatttaatgtcaagcctggctggaagaaaggaacaaagatcacattccccgagaagggaaatgaacagccaaacgtgacacctgcagaccttgttttcattatagatgagaaaccgcacagtgtcttcgcccgcgatggaaacgaccttgttgtaacccagaagatttctcttgcagaggcattaactggttacacagtgcacctcactaccctagatggtagaaacctaaccataccaatcaacaatgttattcatcccaattatgaagaggttgttccaagagaaggaatgccacttccaaaagatccatcaaagaaggggaatttgaggataaagtttaacatcaagttcccaactaggctcactgaagagcaaaaagcaggaatcagaaaactcttaaaatgcctaagcgtgagatagtatagtatttgtcagattcccccctgggaactactttttttttttttttgtgaagatgtaagatataccaatatattttggttgattccccctgcgaaaaaattttgatttgattatttttgtgtggtttatcagttaataatgtgc

SEQ ID NO: 23509 - DNA, 588 bp, Glycine max
ggttaatggtgctgttgagatctgttttggttcttttcaccggtatgcccagtacttgaatttctctcatcctttaatcaaggagagcttcaatccaaagtcttgtgcttgggcctatggcatgaatatatttaatctcgatgcttggaggcgtgaaaagtgtacagataattaccactattggcagaacttgaatgaagaccaaactttgtggaaagcagggaccctgtcacctggtttgatcaccttctactccacaaccaagacactggacaaatcctggcacgtgcttgggctaggatacaatccaagcattagcatggatgagatcagcaatgctgcagtcattcattacaatggaaacatgaaaccctggcttgatattgctttgaaccagtacaaaaatctttggaccaaatacgtggacaacgatatggagtttgtgcagatgtgcaattttggcctatagttgagatcaacacgcagctgtcatcatgataaaagcttgagataacatgaccattgttgtgtaccgtattcttttggagctgagaatctcaagttaaatgtagcctgtcaccgaaaagt

SEQ ID NO: 23510 - DNA, 635 bp, Glycine max
aatggatctccccgttatagatctttctccctccctctccggcgagtgggacccacttctctgcgccgaggtcagccgcagcctcagggaaaccggcgcgctcctcgtcaaggaccctcgctgcaccgtcgaggacaacgatcgcttcatcgacatgatggagcgctacttctcaaaaccccgcgacttcaaacaccgccatgagagaccccacttgcattaccaggttggggttacaccagagaaagtagaagttccaagaagcttggttgatgaagaaatgcaggagaaactgaaagcgatgccaaaagaaaaccagccaaacactcctgttggacctgatctcaaatggagatacttttggaggatcggtcctcgaccgtcaaatactcgttttcaggaacttaatgctgagccagtaatacctgaaggtttccctgaatggaaagaaactatggattcctggggatacaaaatgatagcagcaattgaagtggttgctgaaatggcagctattgggtttggtcttccaaaggatgcattcacttctcttatgaagctgggcccgcatctgttagcaccaacagggagtgaccttcaaaaatatggtcaggagggaactatctttgcaggat

SEQ ID NO: 23511 - DNA, 325 bp, Glycine max
cttgcaacaatacataagcatcgaagttcaagcaagcgtgggggttttagggttgcttcgccgtgccctcacactcacactgttctgagatggagaataacgagattctagaggagcttctcaacatcgaggttgaaattcaagatgtccaagaacaaataagggctttgatcgagaggcaagagagtttgtacgagagaaaatcggagctgagtgctattctggaagcgtgtaaggaatctggaaacgaggccaataatgcggctttcagcgctgcggaaaattggagtggggaattttgaatgggattctgaagctgatgatg

SEQ ID NO: 23512 - DNA, 299 bp, Glycine max
gacagaatggcacacattaatggaaaattcatggataaaaacatcagattcactcttgtgaatatcagctcaaatcgttggctaaccataaggctagaaacattaggaggcctgatgatttggttgatagcaacatctgctgtcttgcagaatgcaagagctgcaaaccaggcaatgtttgcatctacaatgggtttacttctcagttatactttgaacataacaaatctcttgagtggtgtcctcagacaagcaagtagagctgaaaacagtttaaattctgttgagcgtgtcgacac

SEQ ID NO: 23513 - DNA, 490 bp, Glycine max
ctctctctctctctctctctctgtattagtttctatttacccatctggaaatgtgcctgagaaactgattttgcttaatatttgctgctcctatggcgttttaaatatagatctcactgagctctgatttctcatgtctgtattcattttgccacaggaacggaagcatacctgtttcctttatccaaaaattattaatgaagaaactaggcctgaaaagtgacgatgaggttgagattaaatgcatgggacatccagtgcttccttcactgcaggtgcaaaacttggttgacccgtggcgggttgatacggcggcttcgggacatagaattccagcaaccattggatcctcggggaaagattttgtcatgatcctaacctatggtcggaaggtcctacacccttgattgtggttcccagttcttcccctttcacatttttattatagcatgaaaaatcgaaaaccttcccagaataattgcttcctcgt

SEQ ID NO: 23514 - DNA, 420 bp, Glycine max
atttgggctgggcctcattgcgctctggacttgccacatggcctctgatctcggatggtactctcagcgtcgcgctctctactcgacaattgatgggagctatcgtgcgccaatcgatggttggaaatcccagtattctagatattactacggatgcgctgaaaggggacgcggttatgctcctgctgtgcctgagaggatgtcaaatggctacttgcttattggtactagtggaggattgaaccaacaaagaactgggataacagatgctgttgttgttgcccgaattcttaatgccacactagtagtaccggagttggatcatcattcttattggaaggatgacagtgacttcatccatattttcgatgttgattggttcatttcttatctcgcaaaagatgttactattgttaaaag

SEQ ID NO: 23515 - DNA, 368 bp, Glycine max
gtaaagttttctaggtttgttccattaagggctttctaattttatacaaatgctttgttgtccttgccttcaggtccagcaatgcattatgaagtatcaatcactttgtttaatctacatagatatgctggcctgcaaattggacctagatcttctctcacagcctcacttgtagtgaggagagagagacaaaaggtccaggtggaacccacttgaacctgtgtctttctcactcctcgctgcactctgtgtagcagatggggagagatctggggttgcaaatttgtaaaatgttagggatccataaacaaagattgtagtgattatgatgaatgacaataaacatggatgcccccttttatgcttgg

SEQ ID NO: 23516 - DNA, 445 bp, Glycine max
ttgccagcatctgcacctcaattttatcaacaggtgcagtctcctactgttcctctgcctgaacagtatggaggagcttcctccagcttgagagtggccaggcctcctatattgcctggttcatatgtgcaaggggcttatggtcctgtacttctttccccaggggttgtccaatttccgggatggagtcattattcggcacctgtaagtcctgtgccgatctcctggcgctcaacctactgttggggccacttctttatatggagtgacccagttgtcatccccaacatcagcttttgctagaccatatactcctctgtcctctactaccggcccttcaggaagcaatctgaaggatcaattttttcctgaaagacccggtgaacctgaatggcaatactatctgagaacaggggactgtaaatatggattagcttgtcgatat

SEQ ID NO: 23517 - DNA, 437 bp, Glycine max
atgatcccggatcttaggtgtattgcaaactaggttgttgctcctcaaacatgccaggaatgctccaatgcttatattattgtccggagggatgccttagatgagtgcctcttcattcttgaaatggaaaggctcagcatcgaggacgtcttgaaaatggagtggggtactctgaactcaaaaatcaaaagatggatttgggctgtgaaaatttttgttagggtgtatcttgcaagtgagaggtggctcagtgaccagctttttggggagggtgagcctgttggtctatcttgttttgtcgatgcatctaaggcttcgatgttgcagcttctgaatttcggtgaagccatgtccattgggcctcaccaacctgagaaattgtttcgtgttcttgacatgtatgaggttctacaagaccttatgccagacattgatgc

SEQ ID NO: 23518 - DNA, 478 bp, Glycine max
cattgttcctgggcaagatccttaacgagttaaggatatgcaatgagcatcattgacccttctcttgctggaaatgccaaaaccgagtccatttggagggtggtagaaattgccatgcagtgtgtagcacaacatggtgcctccaggccaaggatgcaagatatcattttggctatacaagatgcaaccaagattgaaaaaggaacagaaaataagctaaaatcatcatcattttcaggtagtagtagttcaaagccacaacattcttcccggaaaactctactcacaagctttcttgaaattgagagccctgacgtatcaaatggttgccttccatcagcaagataattaaattggacatgccttacattccatgtgttgattttgtttctatatttacttctttttaaccattattattctaccaatatgtacttttcaccagtaacagtttgacactgactagtgacaacattcc

SEQ ID NO: 23519 - DNA, 830 bp, Glycine max
aaaagtcttgtttgtgtggctggtttggatcttctccaagattggcaactggaatatgtggaaggtctcaagaattgtggccaagatgtcaaacttctatacctaaaggaggcaactattggtttctacttcttgcctaataatgatcatttctataccctcatggaggagataaagaacttcgtcaaccctaactgttaatatactatttaaccttacttaaaggatcccatacataactaaaagcctgacatttcacctgggtaatgtttcttttttttatttttgtatctttttttcttttcttttcccaactttataggggtggtgtgtagttatataaatgtgtagtgctacttactgtgataacatctatggtggtaaatctggagctttctgtgatcggtgtggtctactgcttcctgtgctgtgttcatatctttttgaagggtagcaccagtttcagcagtttgaagtgccagagttcagttctttagtggggtttggctgaagcaacgtaaatgaagcttgccctatttaactttttcaacctcaatagtaggaggaggggagatacaagatatggcttggcttatcgctttggttcagtgaatgcatttatgttgtataacatatattattgactgggaactggagcaaatgccatcctgttatgaacttttatgtctatatataaatgtcttgtttgtttacttttcagttagaattttcatcaggaagaagctaaggttgtaatatatttcatcctgttaaattaaattaagcagtttcatcttctaaaaaaaaaaaaaaaaaggcggccgccgact

SEQ ID NO: 23520 - DNA, 304 bp, Glycine max
tttctctctcttaactccactaagtttaacccctcttctcttcccccattaaaacctatttcaccaatccaacaaggtgctgctcctgcttctggttaaggttttggttgttgttcttgttagtgatcctcatggacgctgcatcggaggctgcggcggcggtggcggctccacaggcagagggatcaccggctgcggcggcagcgccgagccgctacgagtcgcagaaacggcgcgactggaacacgttcttgcagtacctgcggaaccacaagccgccattgacgctggcgaggtgcagtgg

SEQ ID NO: 23521 - DNA, 310 bp, Glycine max
caaaaaccgaaacacctcttcatcaagattcccaaaaaacatataacctatttcaccaatccaacagggtggttgtgatttttgttgttgttgttgttgttagtgatcatcatggacgctgcatcaggggcagcgcctgcggcggtggcggctccccaatcagagggatcaccggctgcgccgagccgctacgagtcgcagaagcgacgcgactggaacacgttcttgcagtacctgaggaaccacaagccaccattgacgctggcgcggtgcagtggcgcgcacgtgatcgagtttttgaagtacctcg

SEQ ID NO: 23522 - DNA, 386 bp, Glycine max
  unsure (1)..(386): unsure at all n locations
ggcagcacagcagtgagtgaacccaccgtcaccacaccacaccacaccacaccaacaaagtagaaatacttgtaacatttgctgcaattacaactccatttgtggacaatttgatttgggtggtgcctttgcgaatagttggttgaacgagctcctttgcaaccatgagttttgtcttccgagggagtaggggagatattgaaagtggcttttcagaatatgttcctgaaagaaccttgatgcgggttcatccagctcgaccagttaatggcaattctctagcttttcttatcacagttattttgatattcatgatattaaactcccctcagatgttacatcatttgttgctctgggttgtactggctatctntgtgatggctaca

SEQ ID NO: 23523 - DNA, 380 bp, Glycine max
ccagcacagcagtgagtgaacccaccgtcaccacaccacaccacaccacaccaacaaagtagaaatacttgtaacatttgctgcaattacaactccatttgtggacaatttgatttgggcacaaacaatacttccaggtggtgcctttgcgaatagttggttgaacgagctcctttgcaaccatgagttttgtcttccgagggagtaggggagatattgaaagtggcttttcagaatatgttcctgaaagaaccttgatgcgggttcatccagctcgaccagttaatggcaattctctagcttttcttatcacagttattttgatattcatgatattaaactcccctcagatgttacatcattttttgctctgggttgta

SEQ ID NO: 23524 - DNA, 568 bp, Glycine max
gttacctgagctacttatcagacatgtggaagcacgtggctgtgtatttgaatggagagataaagagtttcaggctgaattggaccccaagtgttggaaattacagttggaagatgtgatataataggatttttctcaggttctttgaagttttgataaagacaactcagccgcatggctcatgaaattcaattcggaagtcatcatcttctctctcttctctgttcacctaacctacactacaagaaatgaagaaagcagcatgaaaaatgccagaagtattctgtttagtccattggaggctacacaggcatttggaatggagattgttgatcatccttccttaagtctcgctcgcctaactaggatgagttttgtttattcttttttcttttttttgctgcaaatagcaggattagtgaagtacttaaagtgttacaaaccccatctaacgtctttcatttatttattttgggagtacaattggaaatgttcagagaatggagaagcagtggctatcgaatgtataaaaacactaacttctgttcaatcttttcttttgacagtg

SEQ ID NO: 23525 - DNA, 1194 bp, Glycine max
aatttgaaaggttatgagaatgaaaatcagttattgggtgagaaaagtaatcgtgatatacgacgagctccaagctttagtggaccattaatgcttccaaaccgagcttcagctaatagtttatcagccccaatcaaatcttctggaggattcagagattccttggatgataagtctaaggctaatctagtgcaaattaaaggacgattttcagtgacatctgaaaatttagatctggtgaaggatattcctgtaagttcagtttcacgccgatcttcacagggatcaccaatgaggaaatctgcgagtgttggtgattggatggtggatttcaaacaaatgcagtcttccaatgattctgccaatatcaatattcctgcatcacttctagtgcctcatcttcacaatctttttcagcagacatctattcaacaggatcttataatgaatctgttgaatagcttgcaaactgccgaggcaattgatacttctcagaatggaaagttaccaccattacctcgcaattcagagaacaatggaagtgctgatacagcagtttcagagagggaacaactactgctgggcagaatttcagaactccaatcccggatgattaatttgaccgaggaactgacttatgagaagttaagatacgtgcagttgcaacatcagcttgctctctacagccaggaacaaaatggggaaagagaggaatttgcatgaaagcagataattatgaacctccaggcgagtgatcaatcatacgttgaactccaattctttctcttttctgaggagaactactttttggatgtttatagtcagtccttgataagtgtcatatatatatgttatctgatccagccatgtgttcaataagcttttgtgacgatctatatataaagcccagctagtgcaaatgagcaaaatgatgatcggtcatagttaatctcattatttatttcatttaaagattcagatgtaaataagcttctctgttgtatcatactgcaatgccctatgtttgcagatcaatccgaaattctcgtgataactgataagaaagttgtggggactaccccgggggagaaataacatccctacacattgaattggttttattattattactatatcggatttgaacttgtataggctttttgtattctacatggtaaaatgagtcaacatggt

SEQ ID NO: 23526 - DNA, 303 bp, Glycine max
tatttgatcctagatgggtagctgaagttcttcacagtattcctgtcttcttctttcttgttatgcccttcacgcatggtaggacacattcttggtcagcagcattgtgtgattttataaaaggatttttgttccatgctgttgggattatatttgcagttgttgttcctgttgcatgttctatgctgagattactgttctcttctcagacaatgaattggtttgctcatccatacttggctttcgcgatgtttataccttgtgcacttgttggacttgtaattccaagaattatctggagac

SEQ ID NO: 23527 - DNA, 993 bp, Glycine max
taatcatgttgcagaactattgaaggctgtcaatgggattagggtaattgcaagaaaatgctcgtggtactatgtctctgtgcattgtgattgcaattaccctaatcatgttgcagaactattgaaggctgtcaatgggaacttccgtagtcatccttgtctcaataaacagaagctactatatgcaccaatgggtaatctgctgattctgcagccagatgagaaattttcaccaagccatcatctcctaccatctggcagtggtctatatcttttgtgttgtccattatcagaatccgatgacacagagaagcggctccgagctgctcagatggtcttcttaaactcacctcatccacttgagatattaagtgaccgatctgcttatggatctggaggaagtatacaacgagatcatgacatgaactcttacttaaagtctttgagaactgtgattcgcaaagaacttaaccagatccgtaaagctaagagggagcaacggcgtaaggtgtggtggcctcttctgttatctcgtggagctgataccagcattgttgctgggaggtccatgatatcaatcaatgtgggtcaacgccagtcacccttctccagcgtgatacaaacagggagagagtccctgaaaaggttcagtaggattgttacatcccaacatatgcatttgtttgtgttgcttttgttccctgctcggttgttgctcttgggaacatatagcgtaattaacctcaaatgaatttataagatgattcattattaagcatgggggacacaattgtatagggcgagggcacatgctttgtaggacattacccatttagacgattctttattcattgatttcaaaattgaaatattgcgttcttacgagtccttgcttgcagaggaatattactctaaaatagtaattaatatttagaaatttaattgtattttaattcaagttatatgcttatattggtcccatgttgagtgttt

SEQ ID NO: 23528 - DNA, 561 bp, Glycine max
gtgctacaaggtttttcgttattcagggttctgagacgttggcttcatggcaagcaaacctactctttgagccaattaaatttgagggtttagatgtacttgtgcacagaggtatatatgaggctgctaaagggatatatcaacagatgttgccagaagtacgtgctcacctaaaatctcgaggttctcgtgcaacttttcgtttcacaggccattctcttggtggaagcttggcattacttgtgaatctcatgctgttgataaggcatgaagtgccggtctcctctctacttcctgtgataacatttggttccccatccatcatgtgtggaggtgatagtctgctagaaaagttaggtttgcctaagagccatgttcaagcaattacaatgcacagagacatagtaccacgagcattttcttgcaattaccctaatcatgttgcagaactattgaaagctgtcaatgggaacttccgtagtcatccttgtctcaataaacagaagctactatatgcaccaatgggtaatctgctgattctgcagcctgatgagaagtttt

SEQ ID NO: 23529 - DNA, 318 bp, Glycine max
  unsure (1)..(318): unsure at all n locations
ttttagagtctacttcctttgatctattcgtttctacaattattgtaatctacccaatattttagtgtttcgacatattccccatcaattcaataacttgccgtgtaaattgatccattctaaacaatatctcccttcttagccaaaaagatcaaagtttcgttatttatagccaaaggctttctgggtcgttgtgagtcttgtgtttgagagattaagacctttttgcattgcaaatggctgctgcaactgctggagttgttggtaggaaatggttcgtctgcttcttggatgcgattcanaggcaaggaaaggaag

SEQ ID NO: 23530 - DNA, 296 bp, Glycine max
caacactgcgattcccagtaataattgtcttgttgatgccatctccaaccatcatcaaatacgtctttttctgatcaatagacacattttcctcgtaaacaccggcggtgacgtagatcaggaagtaccccgccgtggatgcagtcttgttcggggccgcggcgagggcgtcgccgatggtggtgaagtttccgcttccatctttactcaccgtcacaatgtcttttaccttaaccacgtcgcccaccgtcgccgcctgaaggagctttctcttactcaccgactcgtagatcgcg

SEQ ID NO: 23531 - DNA, 651 bp, Glycine max
gaggaggcaagaagtactgagttaagaacttcagcaaaacgttcagttcctgctagttcactgtgccaagccctcaaaacaagatcctgtaaaagaggatggtagatctggaaaacctgttgctagaacttctggttccttgagcagcgacaaggatctacaacccatgcattggagggaagacacactggaactaccaatgtaccttcttcaaatggtaacaccatttcaggttctacaaaaggttcaaatccaccagtcaagatttcattggatggccctggtaatgaatccatggcagaggttggagttgccaagtcttctgatatcagggcttctatggtgaaggatgatggaaatgatattactgacaacccaagaggagcctcttctcgcgtagttcattcccctaggtatgaaaacacaggagtcacttcaaagtctaatgataaagttcagaagagagctagttctgctgaagaaccagacagactaggtaaacgacggaaaggggatgtggagctaagagattttgaaactgaagttagattctctgaaagagagaagatgatggatcctagatttgctgatgacaaatcgggaccagaggaacatggtctgtacagggcaggtgataagccattggaaagg

SEQ ID NO: 23532 - DNA, 470 bp, Glycine max
ggagattgcatcaaacaaagcactttctttagccgatagcagagttatgtgcatagtagacaatgccaaatgcgtaatgaagattgtaaaagaatgtggatcattcagtagttacatatggggttatgtgaatcataagccaataataagcagatacagatacccaagaaatgtgccattgaggagtccaaaggcagaggcacttagcaaggacttggtgaagcgtggatttcggttcgtgggtccagtgatagtgcactcttttatgcaagctgcagggttgaccattgaccatcttgtggattgttataggcatagtgaatgtgtgagcctagcagaaagaccttggaggcatatctaacatacactctttcactggcagaattttcagttggggtttataagcacaccctctcacaaagttttttagagaaattattattacatgaatgaagatcatcatggtttca

SEQ ID NO: 23533 - DNA, 386 bp, Glycine max
ctgattgtgaagacgggaaaggtgtaaatttgacatatgatactcgtacaagtttggcactttttcggtcatttacagcagccgattatgttgcagctcaatgtattagacgaaggagtatgtattaccacctggagattttcaagaaagtggatgtcatagtaacaccgaccactggcatgacagcacccataatacctcccagtgctcttaaaagtggtgaaacagagatgcagactacagctaaccttatgcattcgttgttcctgcaaatcttttgggattccctgccatttctgtcccggttggttacgataaagtaggacttccaataggtttgcaaataatgggtcgaccatgggcggaactactgtactgcgtgtagc

SEQ ID NO: 23534 - DNA, 494 bp, Glycine max
tgaagaagcaaatcggtaataggacaggaccgtacgagagtgcgatgcgatgcgaatgtgcgtgactgagggagtaggatgtcttcttccattgtcagcctcagactcagggtttccactttccgctcacatggaaaatcaaagagatccggtgtagaaatctcgtttctcagtcatcttaatctcaatggaatctattggtaaagaagaaaaaattgcttgtgtgatcggtgaccgatcaactagtgatgttgttgtgaggctacgcacacaggaaggtcgagatgattggctgtactgccattcagagattcttgtgaagaactgcaagtattttgctgatcggttgtctgagaactggccaacatgtcagatccttgattcccgcaactgtgttgatgtctattgccaggagttgaattttgattaccatgtaaatcttatacgccttctctacattgtcatagatggttcagttgatgatttgtggcatg

SEQ ID NO: 23535 - DNA, 802 bp, Glycine max
  unsure (1)..(802): unsure at all n locations
cttgatcaggggccgaggtagcattaaggatccagctagggaggaaatgatgagagggaaacctgggtatgaacatctgaatgaacctctccacattctagttgaggcagaattacctgttgaaatagtagatgctcgtttgatgcaagcacgtgacatacttgaagatttgctcaaaccggtggatgaatctcaggatttctacaagaagcagcaacttcgggagttagcaatgctgaatggcactcttcgcgaggagggttctcccatgtctggttctgtttcacccttccacaacagccttggtatgaagagggccaagaccagggggtaaattcccctaaagggtgaaagggcttttggagcttgtgttaattttctacatcatcacttaccatgccacaggtgatgctgtcaacgaatgccctgatctgcgatcggggcactggcatcatagtgccagttctaacttgttctatgtccagtgtgtttacattgagtttgggggaggtttaaagatggtagcccgtagtaaaggtccaattgagtttggtgaatttgctttttttttttttttttttgggtgggtaaggcggtttggttaaatattccccaaattgtctatattaaatatggggttataatttaagcttccaaggccagttttaataggcttttggtattttctgcgaggaaggtaatgttatggtttgtccccaaattgtgaggcagataaaaatatctacatctaccccnnnnnnnnnnnnnnnnnnnnnnnnnnnnnnnnnnnnnnnnnnnnnnn

SEQ ID NO: 23536 - DNA, 339 bp, Glycine max
gaaaaagaaaacatttgaaatatcgagagattagagacagcgccgcctccgaagatcaaacttggttgagaaaatgatgtgccgtaggacggagttgtatagagagttgaagcagcgtatcacacatcttcgacatttctgcgacacgcaacaaaaacatcttcaagatctcgaattgctcaagtgcttcaaatctgagattcaattcgagcttgcctctaatcactttcagaatgctcgaagtgattcctccttaggggactttgtggtggacccgaactcacccagttccaaagatgtggttttgcgaagaaaattcgattcgggtgaggaaattgc

SEQ ID NO: 23537 - DNA, 433 bp, Glycine max
agcgctgatagctctagcggctttcgctttggagtatggaaatttctggaaccttcagcaggcatcagaccctctgggaaactcgttgagactgctgaatcaaatccaacacagacagcttcccgtgactgatatcaacgcaacagtgaagtcggtcatggaggccgttgagaagatcagacggtggggaaccttgtcttctgatgaaacttatgagactgaggatgttcccgctctatcagatgcattgcaactcatccccctccttgtttactgcgttgtcgcttccctcgtcgcttgcaacaccaacatccagggtgtttcgaactatgtattatcggacttccgttgcaaactttctaccgttctggatgagttcattcatcacctggagatatgcgagcaacataaagctagtatattagactaccgg

SEQ ID NO: 23538 - DNA, 704 bp, Glycine max
tgggttccaaagtgctcaactcaactactctaacctacttcacataaaaccacaacaacattgttttcatcgacccagttgttcctaggcttccacttccactgcccccattatctacccacaagctaacacacaaggcccagtcttgcctcttgcatttgcacttacaactctctctcgtttctctctccagatctaggtgctctgcctcatttttcatttggacaagatggcaacaacaacagtttccaacttgccaactgctatgtcaagacccaagattccttcatcacaaaggattgcaaatgtatgtcctgcaattcttggaggtagatctaaggttggttcatgttataaactggcaagtgtttgtcatgttgcatcagcacaacctttccatcagggcttggcaatgacatcaggtcctgcaaaatatggcaaaatcctaacaaaggcaatgtccgagtctagttcaaacaaggaagttgcaggattgccaattgatttgaaaggtaaaagggctttcattgctggtgtggctgatgacaatggatatggctgggcaatagcaaaatctctcgcagcagcaggagctgaaattcttgtcggcacatgggtacctgctttaaatatatttgagtccagtttacgacgtggaaaatttgacgagtcacgcaaattacaagatggttcgttaatggaga

SEQ ID NO: 23539 - DNA, 234 bp, Glycine max
attatctacccacaatctaacacagaaggccatgttttgccgtttgcatttcctcttcaaactctgtctctccagatctaggtgctctgccttcatgttacatttcgacaagatggcaacaacaacagtttccaacttgccaattgctatgtcaagacccaagattccttcatcacaaaggattgcaaatgtatgtcctgcaattcttggaggtagatctaaggttggttcatg

SEQ ID NO: 23540 - DNA, 285 bp, Glycine max
taaaagttcaatataagaataccacgctaccaaaaactgcagatttggttgatgaagaagattttgatgaacaaaacgctgttgagtatacaaaagttcaatataagaataccacgctaccacaaactactctgaaaacaagtgtcaaagagcttgacttagaggctgcacttgctgagcgtgagctccatgttaaactaaggaaggaagcagcggacagaggtgagaaatacaaaattaccaaactgaggcgcaatgttgagatggatgagtatgactacatgc

SEQ ID NO: 23541 - DNA, 276 bp, Glycine max
ggagagtagatacttgttcgaagccaagacgattaaaaagatggagattttgatcctttccactcttggatggaagatgaaccctccaacctctctctcttttcttgattacttcacaagaagacttggattgaaggatcatctcttctgggagttcctcactaagtctgaaggcgttcttccctccctcatcggagattcgaggtgcatcagttatctaccttctgtgttggcaactgctacgatgatgcaagttctcaaaagcgtagagcctag

SEQ ID NO: 23542 - DNA, 516 bp, Glycine max
cttctcggtctctccgatcgtgtccaatttccagagctttcccccttttttctctaaactctgatttcaatacccgaaacttaaaactacgatattttcctcagctgtcgtttattccctttccgattctccaacgacatcccttcaacttcgtgtttaaactcctacttgctgcgctgttaatatattctttattcttttttttcctcccgtttctagcttgatccctcacacagagctcaaaagttgttccaattccccaagaattcgaacacgagattagttcctagctctctctgttcgagttctttggacctttgattcgttgcgtcgtttccataacactcacgaaatcgtagactctccgcaatgctgctatcgtgacttctgtgattctgtctgatggcgagatcgtggggtccataacatgggaacctgggagacatagatttgtacaggtgcttggctgtgaacttggcgactctgcaatagtctgaatttctgtaacatctgctt

SEQ ID NO: 23543 - DNA, 528 bp, Glycine max
ctgtcgtgtgggcggacgcgtggggcttctcgctctgggtctctctctctctctgtggcggcgtgtccaatttccagacctttcgcaatcccccttttttctctcactctgatttcaataactaagaaaaattattccctttccgattccccaacgacatcccttgaacttcgcgtttaaacacctacttgctgcgctgttaatttattctatattccttttttttttttgggttttttcccttcgtttcaagcttgatccctcacgtagacctattaaaaaaagtgttccaattccccaagaattcgaacacgagattagttcctagctctctctgttcgagttctttggaccttggattcgttgcctctccgcaatgctgctatcgtgagttctgtgattctatttgatggtgagatcgtggagttcttaacatgggaacttcggagaaatagatttgtgcagtaaattggctttgaacttgacgactcagcaatactctgaatttgtgtaaaatctgctcgtgca

SEQ ID NO: 23544 - DNA, 515 bp, Glycine max
attgtctcttccttcggtctcatctccgctgctccagctcctccactgcaagtgtcaagagagagagtgtgcgtgtgtgagtgaatttcgaaaccccaacctctctttctctctcttccaccaagtgacacagatcggtgggcttatacatacatacatacagggaccccaacggccctttcccttttagttttatctgcttcgcctcgggactccctttctctctgttactgaatttaacactgctcagctttcatacacttcaatcccattttattggccacctttcccttattcacagtactactacttccttattcaacagacaccaattccagtttctcttttcaggtttcggaatcaatcaatgccgtgtttttagatacctgcctgctttagctaccctacgaacaaccttttcacataattggtaatagtcataaaatagcaagtcccagatttttattttacacgattctcctctggagcgttctatttcttgcttctactctctg

SEQ ID NO: 23545 - DNA, 367 bp, Glycine max
actttctctgtctcttctctctctgctcctgaatttaacactactcagctttcatacacttcaatccctttttattggccacctttcccttcttcacagtgctactacctccttatccaacaccaattcccgtttctcttttcgggtttcggaatcaatcaatgccgtgtttttagatactagtacctgctttagctacccttctcatagaattggtaataaaatagcaagtcccagattttttatttctttcttctcctctgtctattttattcccaatcctctagggtcttggccttttcttcattccccccccttttgttgataaaaaaaataaggcaataacttttgttgcttgtactttttg

SEQ ID NO: 23546 - DNA, 292 bp, Glycine max
taaacattgacttgatactgatcagatcaattaacacacagagagagagagagagagaagcatagcaaacatgggaagagctccttgttgtgacaaagctaatgtcaagagaggtccatggtcacctgaagaagacaccaaactcaaatcttatattgaagagcatggaactggtggcaactggatagccttgcctcagaaaataggcctcaagaggtgtgggaaaagctgtcgtctcaggtggctgaattatcttcgtccaaacatcaaacacggaggtttctcagaagaa

SEQ ID NO: 23547 - DNA, 284 bp, Glycine max
gagcgaatcggctcggtccagtttcaccctctttctaagtctctacactttctttctagttcgtaataatggacggtgtcgtcggagcaatccggcgaaggcgtgacgctggaaaagcttcagagttctctgaagaagaacgttccagaagcttcccgaagagctgcaaaaacggttgcggaacctggcggttcggtttctgcgaagaggagagtcgaaccgcgaaccggttcggtcacggctgcgacgaagagatcgggttcaatcggaggttcttcgagtgt

SEQ ID NO: 23548 - DNA, 530 bp, Glycine max
ctcgagccgaatcggctcgagggaaaagctgcgccttgtgttgacactactttgctgtgttcattttcatgtccaaagttctcttggatttgaagatggaatcagcagatctcaattcccagaagggttcctcttcggaacatgcacttcctcataccagattgagggagcacctcttgaagatggcaaaggtttaagcaactgggatgtttttagtcatataccaggaaatataaacaatgatgagaatggtgacattgcagatgatcactatcatcgctatttggaagacatcgagttgatgtcctctcttgggataaatgtgtatcgattttctatttcatgggcaagaattctacctagagggatatatggggacataaatccaagtggggttatgttctacaacaagatcatagacaatctgcttcttagagggattgagccatttgtgacaattcatcaccatgactacccgggagaattggaagaaagatatggtgcttggcttagtcccctaatacagagag

SEQ ID NO: 23549 - DNA, 385 bp, Glycine max
gatggaaatcggtttggagaggggtttccgaactgcacttagtgagttcatattaatgcaactgcagcttgccccagtattcttcacattttcacttgggacaaaaactcattattttggaagaacattacttcatggaggtgcgaaatatagacccactggtcgaggatttgtggttttccatgctaaatttgctgacaactatagactttactctcgtagccactttgtcaagggtattgagctcatgatattacttgttgtatatgaacatttttggtcattcttacagaagtactgttgcatatatcttgattaccgcatcaatgtggtttatggtgggtacctggctgtttgctcccttcttgttcaatcttctgggttt

SEQ ID NO: 23550 - DNA, 633 bp, Glycine max
tctgggaggttttactccttgcttgatccaacatatgctaaggatcacattccaattattgcatctgtctctgatcatcagccaactgcttggtcgtccttcatgtttgatttccacatcttgctgttccttttccctgctggcctctatttttgcttcaagcgtttgtctgatgccacaatctttttagtaatgtatggtcttacaagcatgtattttgctggggttatggttcggttgattcttgtggctacccctgctgtgtgcctcattagtgctattgcggtttctgccactgtgaagaatttgactcgggtagtgagggccaaaagccaagctgttcaaagtggatctacaaaaggaactagctctgcaaaaagttctgccaagggtgtagttgacaactcccagcctttccaaaagaatggtgctattgtgttactccttggtgctttctatttgctcagtagatatgccattcactgcacatgggtcacatcagaggcttactcatctccctcaattgtcttggctgcgaggggtgcccatggcaacagggtcatctttgatgattatcgtgaagcttacttttggcttcgccagaacactccacaagatgccaaggtgatgtca

SEQ ID NO: 23551 - DNA, 410 bp, Glycine max
ctgctcgagcacaaaccaactcccccaaaatctcactttctctgtttttgctctgttttcctctgttttttcctcatcatcacacattaaaatggagggtctaattccatttgtgtacaaagctgtaatgcaatacaagaatgagaaacaagggcctattggttcatggctttgtgagtcaccttcttactcatacatgaaacttcccggcgactcaggtcggtttcaaacctctgcttcttctccgtttgggtcagactatggtttttctgcttcttcaccatcttccaaactttgtacttcttcttcaacccaaatcatagtttcttccagtgttcaaccgccacaccgtggcatgaattcacctagagttccaacatgaacttctagaccaacatgttctggtacaa

SEQ ID NO: 23552 - DNA, 310 bp, Glycine max
tgcaagtgtgtcaacaaataataatcacagaatacagaatggtgtcgctgcaaagaatagaaacggagagatagaatcatctaggcaaagagatgcattggatagtgggatcaagcattcaaacattgattcaaaaataaaggctaaaaagttcaatttggagctgaatagaacagcagaaattgtggaagtatccagaaaggaatcaaagaaacaaccagggggtgataaggatcaatcagagaaaagtgccgaacagaggagtgaatattttgatcgggagatggagaaatggcgaattcgtacaagt

SEQ ID NO: 23553 - DNA, 483 bp, Glycine max
acgcgaacgcaagctcgggatccggcgcgtgctcattaatcttcaatgctatgtttccgctgtttctcacaagacacaatggagtacaaagtgaaaaccacgagcatcaacaccttctccaccaatcccaatccatgttcccactatgctgtcaaactctcctccatcttcatcttcttcacctccttcacaatctcccactcctttcccttcaccctctctgggctctccctctgctgctccaccgtctccgccgccgcctctgccaccggtggtggttagcccttgtgctgcctgcaagatcctccgccgtaggtgtgtggagaagtgtgtgttggctccatatttccctcccactgatcctctcaagttcaccattgctcatagagtctttggagccagcaacatcatcaagttcttgcaggaactgccagaatcccagagagaagatgctgtgagcagcatggtttatgaggcaaatgc

SEQ ID NO: 23554 - DNA, 588 bp, Glycine max
acgagtctatgcctgtccaaggtcctgcttgcaatgctacggataagttggttgggtggcatactttcaattcgttgcggtatacagggaggagtgcggtttatattgacgacagggcgcctgtgctgcccagaaagcttgagtggtctgggtttgtgttgaattcctggttggtttggaaggatgcggatggtaagccagagtgggttaaggatcttgatgaatttggatggggttgatgaagagatagagactccattgtccttgctcaagagcacctctgtggtagagccgcttgggaattgtggacggcaagttttgctttggtggctgagggttgaagctcgcacagacagcaaatttccttctcgatggataattgaccctcctttggacatcactatcccatcaaaacgcagtccatggccagatgctcctcctgagctcccatctaatgataaagttttaaccaacacacaagagcagacatacaagccctctacaagaaccaaatcacccagatcccggcgcagtagaagcaagataaagcatgataccaaagtgataggtgtgcaagtctcaacatat

SEQ ID NO: 23555 - DNA, 400 bp, Glycine max
tcggaacaataccatcagaacttctaagcaaagatttggttttgaactactctggaaatataaatcttcacagagaaagtagaataaagggacacatgtatgttatcattggttcatcagttggagcttctgttctacttttggctactattatatcttgcttatatatgcataaagggaagagaagatatcatgagcaaggctgcattgattctctccctacacaaaggctggcttcttggaagagcgatgatcctgcagaagctgctcactgcttcagttattctgaaattgaaaatgctacaaataactttgagacaaaaattggttctggtggttttggaattgtatactatggcaagctaaaagatggaaaagagatagcagttaaagttttaac

SEQ ID NO: 23556 - DNA, 1636 bp, Glycine max
ttatgaagtcatacaaattgtcagagctgagtgatgctgagcttcgcagcctcatcgctcgccctcgcattgatttctcttcggttttcgctctggtcaaccctatcgttgaccacgttcgcgaaacacgcgatgctgctgtcaaagaatacacattgagattcgacaaagctgaattggataacatcgttgaacttgtctccgaccttcctgatccacaactcgatgcgcatgttaaggaagcttttgatgtcgcctacaacaatatatatgcctttcatgctgctcagaagacacccgagagaaatgttgaaaatatgaaaggagtccaatgcaagcgagttgcaagaagtattaattctgttggtctttatgttccagggggaactgctgtattaccctcaacagctctgatgctttcagttcctgcacagattgctggatgtaaaactattgtccttgcaactcctccagctcaggatggtactatatgcaaggaggtagtgtattgtgcaaagaagggtggggtgactcacatccttagagctggaggagctcaggccatatctgccatggcttggggaacagaaacttgtcccaaggttgagaaaatttttggcccaggaaaccaatatgtcacagctgcaaaaatgatactacaaaacagtgaagccatggtttcaattgacatgccagctggtccatctgaagttttagtcattgccgacaagcatgcgattcctcgtcatgtagctgctgatttgctttcccaggctgagcatggtcctgatagtcaggttgtgcttgtgatttctggtgaaggtgtggatctgaatgttatagaagaggaactcaacaagcagtgccagagtctcccaagaggagagtttgctgctaaggccctaagccacagttttattgtttatgcacatgatatgcttgagtcaatcaagttctcaaacttatatgcacccgaacatctaattgtcaacacgaatgatgcagagaagtgggagggttttattgagaatgcaggttctgtatttttagggccgtggacaccagagagcgttggtgattatgcaagtgggacaaatcatgttcttcccacttatggttatgcaaggatgtatggtggtgtttcattggattctttcttgaagttcataactgtgcaatctctcacagaagaaggcctaagaaaactcgggccatatgtcgttaccatggcagaagttgaaggtcttgatgcccacaagctagcagttaccctaaggcttgaggacatagaagtcaggcaggtatcaacatgacatgataatctacgagtcaacgttaatcattgttgagtttttcgaagatcgtaagggagaaagtggtcagtgcaaagcaaagagctttgataccatatttgagatctagagttcagagaaactagaaagaaagtgagataaaattgagaaaaatgtatttctatattgaatcagttacaattgttgagttactcatatttactgttgagctcgactcataagtacagttataactgaattagagagaccaacagtcactgtagctcaactgtcgataactactactaaataatagaaatggtccccgagtaaattactattct

SEQ ID NO: 23557 - DNA, 572 bp, Glycine max
ctcgacgtcgcaaacaacatgctacaaggcccctgccgcgccatcctggccgacctctgcgccggagaccaccggaaaacgcgaaacgccaacgccttcttctccttcttcatggccgtcggaaacgtcctgggctacgccgcgggctcttacgcggccaccacaacgtcttccctttcactaaaacaaaagcatgtgatgtttactgcgcgaatttgaagagttgtttcttcctcgccatcgcgcttcttctcactctctccacaatcgccttgacctacgtgaaggagaaaacggtgtcgtcagagaaaacggtgaggagttcggtggaggaggatgggtcccacgggggcatgccgtgcttcgggcagttattcggtgcgttccgcgaactgaagcgtcccatgtggatccttctgttggtgacgtatctgaactggatcgcctggttcccttttttgctattcgacaccgactggatggggcgtgaggtgtacggagggacagtaggggaagggaaggcgtacgataggggtgtccgcgcgggtgcgttggggctgatgttgaactct

SEQ ID NO: 23558 - DNA, 780 bp, Glycine max
tcgctttgtctctgtttattatgtggaagttagctcccctgactccgtccaccaccaccaccaccaccaccacctcccctcttcctttcacctgtcgtttgtttaccctccctttacgtcaccgttttgattgcgaaacgcaaccctccacaccataaaccaacacacaacaacaccctctaatatatatatatatatatataaaactttccaccgttaagaccaagacagttacaaagtcttccttcacacgcatcctccttcccctgttttttcttcttctctgttctctgttctcttcctcacaacacaagccatgaaagctttcgtggctgtggctctgtttgcgttgttgttggtgtttgttgatgcgaggtttgtggtggagaagagcagtataactgttctgtcacctcataagctgagggcgaagcgcgatggcgccatcggaaacttcggtcttccggactacggaggattcatcgttggctctgtgctgtatcccaccaaaggctcccacgggtgtcaggtcttcgagggcgataagcccttcaaaattcactcttatcgtcccactattgttctccttgatcgtggagagtgttactttgccttgaaggtttggcatgccgaacaggctggtgctgcggcagttttggtgactgacagcattgaggagtctctgataaccatggattctcctgaggagagctctgatgcagatggctacatagagaagatcacgattccatccgctctgatagagaaatcctttggtga

SEQ ID NO: 23559 - DNA, 339 bp, Glycine max
gtcttccttcccacgcgtccttcgtcttactcttgcttcccctgttttttcttctgtttttcactgccaacaacaacagcacatacaaacaaaccatgaaacctttcgtggctgcggctgttttgttgttgttgttggtggtggtggtggttgttgatgccaggtttgtggtggagaagagcagtataactgttctgtccccgcataagctgaaggcgaacgcgatggcgccatcggtaacttcggtcttccggactacggaggattcatcgttggctctgtggtgtatcccgctaaaggctcacacggatgtgagaacttcgagggcgataagccttc

SEQ ID NO: 23560 - DNA, 949 bp, Glycine max
ggtggcatcatgaatgggcctgccatgaacggccataaagggaatgggggtgtcaagaagggtgaggtcattgatctgcctatacaaatgaagggcaaaggtggaaacttcagcttcagcgagggtaaaaatgaaataaagggcaatggagatggtggtcaaaagaacaaaggtggaaagcaaaagggtggagataataatcataacaatggtaacaagaaaaagaactccaaaggcaaaaatggtggtggcttcctagttcgtttcctaggcttaggaaaaaagaacaagaagggaggcggaggtggaggttcagccgacacaacaacaagcaagaataaaaacaacaacaaaggaaagaaagatggaggtaaattcgacaaaattgactttgacttccaagattttgatatccctcctaccaaaggtaaaaatggcaagggtgggaataatggtaaaaacaataatgacaagggtcatggtagcaataatggcaatgtgggccaccacatgggccccatgggtcagatgggcccaatggttcagagaggtccaatgaatcagatgggcccaatggaccatatgaggaatatgaacatcaatatgccggcggtgcaaggattaccggcagcctcggccgcagcagcgatgaacggtggttactaccaaggcatgcagatgcaaatgcaacaacccaacccttacaacatgcagcagcagcaacaacaacacaactaatggccatgatgatgaaacaacaacaacaacaacaaatgcaagcaaacatgaacatgtacccaccacacatgatgtatggaaggccacacccacaccaacaccaacatccatctatgaactactttccacccccaccaatgccctcacaccccatggcggatcctatcacacacgttttcagtgatgagaacactgagagctgcagtatcat

SEQ ID NO: 23561 - DNA, 301 bp, Glycine max
agattttcttgtatatattcctagcattttggtttcagttgctttccataataattaagaagaatggtcgttctcatcgagcaatcagagctaacaagaccgcaagctgaggagaacaatgatgatttggtattggatggtggtttttccttgctcaaatcaccttcacatgttggatttacagtccctgatatcaattcatatggtcactccttcagaaattattatgatgaaagcgaaaggaataagtctgtggaggaactttaccgacaacaacacacgaatcaaacatatgaatttg

SEQ ID NO: 23562 - DNA, 283 bp, Glycine max
ctaaaaccaacagcaaacatagaaatggaacattagaccccaatcatgtcaacatggtctactgaaaattggcgtagctgcgtttggttccttcgggcactttctggcaaagactctgatcaaacaaggccacactctaagggcaacttccgtactgactactccctcttatgcctcccaatgggtatccaattcttccagggatgatgctgcattcctgaggctgacaacgatgtcatactcgtatgtacgtccatcctatctctctccgaggttctcagct

SEQ ID NO: 23563 - DNA, 319 bp, Glycine max
atattaataaaaagtacaactaagatagagaggttttagttttacttctgggttttcattgcttacagagtgcctctacctttcaaagagcatattcatatcagcccttgaccttgtctctggagccaagccaactgagacttcaatcctgatctgaagggtcttttttctttctttggttttgattttgaaccccactttccacatttgcatcttgtttggaatcctagaacatcttggtttggttgttgtcagatttgtgttgagagggtcgagaattggttcatatgagggaaggaggagggggtttgtgggtcaa

SEQ ID NO: 23564 - DNA, 469 bp, Glycine max
tcttcttccacctcaagtttcttctctctctctctatctctctttttccacaagctagcttctcataattaaccttcatcatatcatatccctctctccactttcctacgagccttttttctctctattatctcccccaaaagtagtgttcgtgactttgtgtctcctttgcgagcaacagggagaggctcttgtgagtggttcattcacagataatggcactagaggctgtggttttcccgcaagatccatttgcgtatggttgcaacaaggattatttgtactccttagttggagcaacacccaactacggtaatttccaagcagcggaagaagagaaagtcctcctaggaatcatcaacaacaacatagaacacaacctttatgcaaattgggattcatcttctacctcaatgttgcaaaatgtcaaggaacaacaatgggattctcactcctgccctgaagcatg

SEQ ID NO: 23565 - DNA, 290 bp, Glycine max
cgggggcaggagaacacctaatgaaaggtcttgcggctagggagtgctgcgtttcattgtcactctcgcagtctggtgctgcctctgcttgcacgataattctacgctctgttgttgaggatggcaggcaatgtggtactgatagcagtgcaggggccttggttgtgcagtcagatgcatctttgacagatcaaggaaaatcatcaaggctgaaagctgtagagattgctgctgcatacacttccttgtcttttggagtagggtattttggaagctctatggaacggccc

SEQ ID NO: 23566 - DNA, 332 bp, Glycine max
cttggatggtggcttcagggagatcagtgtttatgttctgatcaagccaattgtaccacgcttcagtctccgatggatggaaagcccgggttccggtgtcgctgccgcgacgggttcgtcggcgatgggtttttggccggaactggttgccggaaagcctcgtcatgcaacccagcgaagtacatatctggtcgatgtggaggaacaacgagattcattgtcttaattggagggttcgttgtgggtgtttcgctgatggttactttgggttcattgtgttgtttctatcgccgacgctccaaattgagagtcacaaatagcacgaaaaggcg

SEQ ID NO: 23567 - DNA, 251 bp, Glycine max
gcgtaactttgagatagctaggaaatggcataccaaatgcaaatgcaaaagcaaaacctgagataccgagggtggtgcccctcgaacgattaccaagtccatgaagtaatagggcctgcactactacgcaagggccttgatcgtcctcgacatcagaagggtcgcgtggcgttcaaaaccgatctagaagagtccataacagtagcagaaccaacccctgtgcctgcagaaactgaaacccctactactac

SEQ ID NO: 23568 - DNA, 312 bp, Glycine max
aaaaccttcctccttgcactcttccttttcaccactcaaatgctactactctcgcttgctcacaaaaccccttcaattttctcaggtataggaagacgcaattctgagcgaattgcaaccttcacgaattgaatttgtttctgttaatttttgtgcgtatttatcataagctacgaatttcgatagtgtgtaaatggcgacctgttatactccctcgaatgctcgaacttcggcgggggtgctggctgttgttggaggcagaacgatttctgagaacacggtatcagatcgtgcctctgagaattcaagaga

SEQ ID NO: 23569 - DNA, 389 bp, Glycine max
ctgattggttgatggaatgggacgaagaacaccctgtttccaagctaatctcataaaccctaagcacgctcttcgcaccgaaacaaaaaccttcctccttgcactcttccttttcaccactcaaatgctactactccgcttgctcacaaaaccccttcaattttctcaggtctctcttcccctcatctccctaatattctcacgcatttcctcttcaacaccgttctcaatcttcgtgctttttattaactatttcatttgccgtttctcccttttcattctcttctactattactctgttatgtacctacactctaccatagtacacttccttaattatttctcacttgccctaatgtttcggccattatttgttttatttattttcc

SEQ ID NO: 23570 - DNA, 466 bp, Glycine max
gatgatgttaatgacctaacatagggagaagatagagtgataatttcatgggtgaataacactactaatgatttcccaccaccctgtcactacataccccgaaaccttgtgttccgagagatatatgttaatatttctctatctcgtattgggaatgtggattgttgttcaaatagtatgggcaattgtgtattgtcatctaatccatgttcttgtacaaataaaactgggggtgaatttgcttacactgcaaaaggcctactaaagggagagttcttggacgagtgtattgccctcagccatgatcctcaaaattatttctattgcaaagcatgtccccttgaaagatcaaagaatgatgattgtttagaaccatgtaaaggacacttaaagaggaagtttattaaagagtgctggagcaaatgtggctgtgggaaacattgtggcaatcgggttgtccagcgtg

SEQ ID NO: 23571 - DNA, 255 bp, Glycine max
ggctcgagagtcagttatacctatatgaacactctgagaaggccgatctcactagccccacaactccttcagcattgcatctttactttacctttctaagagtgttcatataggtatagtaaagatgcaatgctgaaggagttgtgttgcctgtgagaccagcgttcaggtgctgtgcaaacctgcgtcctgccctgtatctataatcctgcttccgggttcaagctaaatacattatgtggattgtactctgcg

SEQ ID NO: 23572 - DNA, 953 bp, Glycine max
gtcgacaaatttgactttgtcgtgtgcatgagtgcatacgttggcgtggtctttggcagtgttgaaattggcttagtcatagctattgcgatatctgtacttcgggtacttctatttattgcaaggccaaggcatttgttttgggaaacattccaaattctgtgatatacagaaatgttgagcactatccaaatgcaaaacatgttcctggaatgctaattctagagattgatgcaccaatttactttgccaatgccatttatatgagagaaaggatcacaaggtggattgatgaagaagaagaaagaatttaagctacaggtgagactagtttgcagtatgttataattgatatgagtgctgttggaaacattgatacaagtggaataagtatgcttgaagaggtgaagaagattacagagagaagagagctacagcttgttttggtcaatcctgtaagtgaagtgatgaagaaactgaacaaatcgaagttccaaaatcatttagggaagaaatggatctatctgactgttgaagaggccgttggagcatgcaacttcaatctacgtgcaagcaaaacgaacccaaagaaagatgaaacagagggttggaacaatgtgtgactgagtcatatgccaaagagtattctaaataactcaaaaagcttattcgttttcgtcttagtaatgttaccactacaatgtgtggcatgagaatttctgaatcacgccgaagaagttttaaaggcataggaaaatgaaagatgcaagggtcttctaatttctcaactctgcatccttagttagaagaaaatctcctatgtataggctgttgaaataatctttacgtatcatgcttgataatatattcaagagaaatgctagcaacacactctcagacacactcttttgaacacatgtaaagaggtaaagaagtgtgttgctagcactcct

SEQ ID NO: 23573 - DNA, 536 bp, Glycine max
gcttgatcagcgtgagtactttgaaacaactctcaaactgaagcaaaaagttaacctccttcggatcctcaagaatgcagggattgagccagatgatgaaatttacaccctagaaagggttacagaagctataataaaaggcactgggtttaccccagggatagagtgcaatagagattcagctcgtaatagtcaactttaccaagtgtacatgtgcgtggacacttctgggtcaaatctcattgagtgccctgtgcttccaaggagcagatgtggtgaacaaattcaattccccaaattttaagaagaaaatttagttcggtaaaattgacatgtaatttccccattgcatttgtcttcaaagtaataaatgttcgcaacgaggccttctaatgtcctcccactgcatttggaggacggaacagccccaagttttttaagtcattcatgtattaatcttaatacaaaatttagcggttgagttctgtttaagaattcaatatcaagttcaaggtgaattttaattacatggtatc

SEQ ID NO: 23574 - DNA, 309 bp, Glycine max
tgggagatttcatccactttttcaatttttctactttgactctgtggaatcactccctacagaaccgcttgatgctaatgatttaaaaccattgaatagtcgttatgatgcacagatttcagtttttggacaaaagttacagaagaagttagaggacgctgaagtttttgttgttggatctggtgcattgggatgtgaatttttgaaaaaccttgccctaatgggagtttcttgtggtcagggaaagctcacaattactgatgatgatgtcatagaaaagagtaacctaagtaggcagttcctcttccg

SEQ ID NO: 23575 - DNA, 206 bp, Glycine max
cgcgaacattaggagtcaaaattgttatttacgatgcttttccttttcttttcactctctaaccggcatgtactataggcacttcaggatcctaagaagtacttagtaaattggttaagaggttttttcataatatcttgtatcattagctactgatttgattgatttgaaataaggacctatcaaattatttttttgttattaat

SEQ ID NO: 23576 - DNA, 384 bp, Glycine max
ctcagcccttgtcttgtcagaataccaagctgcaaccataaagagagacccttttggctttcggttactccttgaccacaaaaacaaatcacccgcccaaaacattgatgtagtcactgatggaggacagaaaagccaccacaatctctgtaatatcagtgtttgcactggtcatcctcatcatcgtcgctcgtgtttccttgaagctctcgcgtgccttcttcctcatatgtggcgcctctattgctgtgatcctcgctgtcttttcttgtgcactcataaggcaccgttacaaccacagaaggaggttgttggagtcacagttgaagacagaagggagagagcttcgaatagagtacagtttcctaagaaaagttgctggtg

SEQ ID NO: 23577 - DNA, 404 bp, Glycine max
gctctttttccctttctttctcctctctggtattcccttggtgtgattctcccaccatctccctaaagagccatcaaactttataaaaagaaaaaacataaaagcattggaacgccatggttttctcctctattccagtctttgtagatcctcccaattggcagcagcaaccaaaccatcctcaagcaagtaataatggtggtgataactcccagcttcttccacctttgccaccacatcaacctcatgtgggaggttctgttggttcaatcaggccaggttccatggcagatcgagctaggctagctaagataccaccaccagaagcagctctcaagtgtccacgttgcgattccaccaacactaaatttcgctacttcaacaactatagcctctctcaacca

SEQ ID NO: 23578 - DNA, 613 bp, Glycine max
ccaattcccacaacaaacgcacaacgttacccaacaagagtgagtgtgacccttcgcctaaactaaacttctcttcccttatttcaggatttattcatctctccaaaactcagaatttcaaatcaaataaataccaacaatgccctttgccaccaagcttccaccggctccggaaccgccagctatcttgaaacctgccggaaacagagtaaccgtttcccaagagccgaaacagaagaagaaggagaacagcgtgaagaccagtccacagcgtcccccgcaaattctgaacaccgttgtgcaaagcaacgtgtctttggacagcacgtgttcctcagatagcaattcatcaaccaaaaaggtgaagcccgcaaccgcaactgtggcgagtaggagaaacgtgaagcgtaacgggtttaagccggtaagggttgtgccagacgccgtcgatgtagcaacagtgttgccgcctcttaagagatgtgaatggatcactccaaattctgaccccctttacactgctttccacgatgaagaatggggtgttccagttgatgatgataggaagctatttgagcttctagtctttttacaagcattggcagaacaccgt

SEQ ID NO: 23579 - DNA, 483 bp, Glycine max
ggagagaaattgcaagacataaccattggaagagaataatgaagttattaggtttacttgtgttggtattgggcagtaccatcagggccaatggtgcagtttctgaagtttcttggagagaaatcagcaatatcaatagggaagggccttaccttggtatagtggtgccaaatgcctttgagctgggtcctcttcttcgttcacctagctttgtgcctcataacaagtttccttactttgattttgccggaaaacattttcgcattggtgtattggaaaagaatagggtacgcttctacccaaatagatatcctttcttctacttgtttttttttttatatcaacaaatgttaatggttgattttttgttagtagatgaatttgaacctacaatctcccctttcttcattaaccactagatcaactttatatctctttttcttgttttagttgataattagtaaccatgaactgaaacaaatc

SEQ ID NO: 23580 - DNA, 422 bp, Glycine max
ccactctctcgcaaaccaattttcacattctttgtattgagttacttgagctagccgcaaccatggaaccatccaaaaactcgcagaagccctcacatttccatgactacctccccgtgatggcgaacaagctcggcggggacggcctcatcgatgagctctgcaacggcttcaacctgctcaaggactccgacagaggggtgataacctttgagagcctcaagaggaacgctgctctgctgggcctgcaaggactcggcgatgaggaccttcggtcgatgctcgggcagggtgatttcgacggcgatggcgcgctgagccagctggagttctgtgttttgatgttcaggctcagccctgagctcatggaggggtccaagttgtggctggaggaggtgcttcagcaggaacttgaacattga

SEQ ID NO: 23581 - DNA, 762 bp, Glycine max
cccacgcgtccgcaggagcgaaaaggctcttctgcacttcctgtgactgtgagcccaatgcctccccctcagaaatctcagcctcctcagtctacatggagtactgtttcctcacggtcaatttcagcatcctctccatctaaaaatgcttctccaattcagataaattcccaagcttctcaatcaaagtacaaaggggatgatgacttgttctggggtccaatcgagcaatctaagcaagatactaagcagtcagatttccctcagcttgcaagccagggtagctggggttcgaaaaatggacccttaaaaggtaattctcctggattattgacaagacaaaaatcagtgagtggcaaaccaactgagcggtctctagcatcatcacctgcctcttctcaatcagtgctgaagttgaaaaaagatgccatgacaaggcattctgaggccacggacttcagagattggtgtgagaatgagtgcgttaggcttattgggacaaaagatacaagtttccttgaattttgcttgaagcaatctagatcagaagctgagatgcttcttatagaaaaccttggatcatatgatcctgaccatcaattcattgataaattcctcaattacaaggagttgttaccgtcagacgttttggacatagcttttcagagtaggaatgataagaaagttactggatatggtgtggaaggcacggcatcggttagtgcagatatactggatgtggactacactgaaggatcctct

SEQ ID NO: 23582 - DNA, 280 bp, Glycine max
cggagaaggagaagatcctttaggagggagaggtgggggtttgagaagactaagatcaggaaagaggaggggcttagtggggatagtgatcaaagtggtgtcatgctcataactagacccaaaggtggaattaggtctctttgcatggacttggaggaagttaaggcttgtagagatcttggatttgagttggaacacgaacgtatgcttgagatcccttctcgtctctctttttccaattccacacttgacactagcagtggtagcaactctcccatcg

SEQ ID NO: 23583 - DNA, 683 bp, Glycine max
gcagagcacaagtagaagatggtagtccagaattttttttccaggctttgggaataaagtcttcctttctagcagatatattggcgtccgtttcatttacagcccaacatgggaaacttcccaaaggctttttctagatcttactcgatttcaggcccggctagattttccttctggtttcaaatttctttcagctgcaactggtcgaacacatcttctcaattctcaaaatcccgctattcagaccgattttacccaatgctacactatcacttcagcagcagatcgtcggtcccgtcagttttagagttgattcaggaattacagttgatctgaagaaccctgattggccgattcatgcaccggaacccgtatttgctttggaatatgcattgcaagtacttggttcagcaaaagcagtggcatggtattgccccaaacgccaagaatttatggcagaacttcgtttctttgaaacataagccatagcctgataggcactatagaaatatcttctgttccttaaattgcaaaagctagttggtaaaaggtccattgattttcatgttgccctatggcttgtcaatagatttgtgttttacaatttctcttgttttactacctctattggaattgtagttacggaaggtatcagaaatgaaagatagatccaaaacagtttt

SEQ ID NO: 23584 - DNA, 257 bp, Glycine max
agaagattgcatttgcatcaagatggagatgcaacaactcctcactatgggcttcccggacgagttagccgcccaagccttggctgccaccggcggcaaatccaccgtgaaagccaccgaatggatgctctctcacaagccaactcttccacattccagcccaagctcgatcgcttcttccattcccaatcacaagaacatgacgaaccctccaaacgccccaaaccttctccttctccttctccttctccagcaca

SEQ ID NO: 23585 - DNA, 465 bp, Glycine max
ctagagatcgaccattagcactctaatggctccaacaaatgtcacatgcttcagagaagaaaatgaatccgagaaaggggaggaaataacaatagaagaagacaagctaagtcaagaatgtaaggagttgatactctctcttcctagggagagaggttggagaacacgttatatatatctatttcaaggattttggtgccagccattggaaatccaagcaataatcacttttcagaagcacttccaagctaaagacagtgatgttattgtggccacaattccaaaatcaggtaccacttggctgaaagctctcacctttgccattgtcaatcgccatactcatagtatcactacatcaatgtcatcacatcctttgcttacttctaatcctcatgaacttgtgcctttcatagaatacaccgtttatggtaatgcccctagccatgttccaaacctatccagcat

SEQ ID NO: 23586 - DNA, 269 bp, Glycine max
cggctcgaggtctgaattacaatttggattttcaaaccccatgcccactttctcttgactttagccatctcttattccttaaagctagctagcttgatctccaagttctctctcccactctgttttctctctcttgacccatttctccattttcttatataatacaattactggccctcataaagccattccctcgttctttcacaattgcttcctgcagttaacaacaatatgtcacgacccagcactttgctactcctcttcatgct

SEQ ID NO: 23587 - DNA, 433 bp, Glycine max
gtcaagctcagctgggattgttccttcatctcctgaaagcagtttagactctcctgatattcacccttttagggtgtcttcatcacgtgctgaaaaagcaagacagcttgcagttgcaggtgcttcaggtgctggtgctgcaactctgaaggaaatttcactgtcaggttcaactagtgatggatatgaggcttctcgtggggaagatagtgaccgggttgtcccttgtaggattgttcagagatctacaaattggactaatcttcttttcagagctgatcaggatgacaaggcttttaaaatgtctctttcatcaaccagtgttggttatagatagtagaaagttttgaaaaacttaacttgggtgtcaattagataactatctttctaactatttcatgggaattgttcttctttgagttgtgagctagag

SEQ ID NO: 23588 - DNA, 426 bp, Glycine max
aagcagtttaaccttggccctaatggtggaattttgacttccctgaacttgtttgccactaagtttgatgaggtaatttctgtgattgagaaacgggcagatcaacttgactatgttcttgtggatacccctgtacagattgaaatatttacctggtctgcttctggtgctatcattacagaagcttttgcatccacatttcccactgtagttgcctatgtagttgatacaccccgttcagaagatcccaccactttcatgagcaacatgttgtatgcttgtagtatcctctataagacaaggttacctctcatcttgacattcaacaaggttgatgtagcagcacatcaatttgctttggagtggatggaggattttgaggcgttccaaacagcagcaagttcagatcagtcgtacacatcaact

SEQ ID NO: 23589 - DNA, 370 bp, Glycine max
ttcttgtttcgtcgattttgatcggaattggagaaacaagggtacttaaccctccaagcagcaaaccctcaccgttgctggaatttcaggctactaaatcatcaaaggaaagaagccccaaagtcactgattgcagatcacgcagaagcccagttgttgaggctcttgattcggaaggtggttctggggacttgttagggtgctgctgaggcatttcatcactcatctctgtggtgttgaatttgccccttccaacatagacagaagaaagcactggattgagggttgagtgcttgttgttgcttgctgctgctgctactgcttctgcctctggttgtggagactatgttggagggtcgttcctgcgtgg

SEQ ID NO: 23590 - DNA, 311 bp, Glycine max
tctattagtgcttatagtaatactcacagaactgcataaagctgcttctgtcgccgtggctggttcttcttcctcttgtctctctctctctcttctctcagcttctgctgcaatttctttctctgtttgtttcgttgttattttcttttggttacttgtttctgctttggcactagcaccggttcttgtctcccttggactctgaccctgttgttgccagctttgactcatgaagatgcttgtaccattgctcttgctggtggcattgagcaatgccgttagagttcatggagatggagggcaatgtggtt

SEQ ID NO: 23591 - DNA, 400 bp, Glycine max
  unsure (1)..(400): unsure at all n locations
agcaattcttattgttcccatgtttcagatagcatggactttgttctcaatatgtacaggatttatatattttcaagaatatcaggtatttgatgcatnaaggacaacaatgtttatgcttggaatgatgtgtgtgtttattggcatttctttgctggcacctgatgaatcaaaagtttcaggtcctgagactaaagatagttctttggattccatggtgtcttctgccatatctacagaagctaacaggctggtagtgtctcctgaagaagcacaaaacaaagatacgagatcattagttaaagcaatactaataaagattacagatttgttggtaaaggcaaagactacttgtgcattgtctcttggttttggggaggataccatcaatgcatcatca

SEQ ID NO: 23592 - DNA, 547 bp, Glycine max
agataacaataacaattactgctacaacaacagttaccgtagctgagcaatggcttctatggccagaggcgccaagagacgccactcgataataagtagaaaaatgctgatcctcttctccgcttccctttcatgcgtcgtcgttttagttatttgttctctcttcagattccactctcccaaacccccaatttcaatttcaatttctcgcgtcgtcttcgatggccctcccaagatcgctttcttgttcctcgttcgccgcaacctccctctcgatttcctctgggacgctttcttccagaacgtcgacgtttcgagattctcgatatacgttcattcggcgcctgggtttgtgttggatgagtcaaccaccaggtcgcaattcctctacggtcgacaaatcagtaatagcattcaggttttatggggagaatcaagtatgattcaggcagaaagattgttactggcagcagctttagaggaccctgcaaatcaaagatttgttcttctctcggacagctgtgttcctctgtacaacttttcctac

SEQ ID NO: 23593 - DNA, 290 bp, Glycine max
cctttccttttccttcttgttgctggagattacccttgatctcgaaaccaagggagaagcactatcaggtattcaagttgaggcttaaaaaaaaaaggcgtgtgcatgtaaatgattaaccagatagttccatttgagagttaaagcttccatttcattgcaaggcttgatttgcttgtcgtgaattggataactccaatcaaaacaccgccacctctgtcttcgcgttcaccactgtgcagtaaatatgtctgacaccgaagaccatgcagcagagtattccaatggtg

SEQ ID NO: 23594 - DNA, 313 bp, Glycine max
  unsure (1)..(313): unsure at all n locations
aaggagngtaaggttttccaagaagaaaactatgaagcaaagatatggactcagaagaagagtgtcgtctcactagttccaatggatcattggacgagggtgataatatgcctgagcctgccttgtctgatcgatcctttgccaaccccactttccagcaggaactattgaggaggcatggtttgattcagctgcagtatttgactcagcattgtgatgatgactaccagagtgttaatgatgatgtgatatctctgaatggaactgaaaccaattgtggagtttcaactgatcagatgcataaacccgggga

SEQ ID NO: 23595 - DNA, 852 bp, Glycine max
ttgacgcgtggggaattggacatggccttgcatcctgctcatctttgaaggagctgtacctggctggaaacaagatcagtgaagtagagggtctgcaccgccttttgaaactaagtatcctggatctctcttttaacaaaatttcaactgccaaatgtctaggccaacttgcagccaactacaatactttgcaagctatcaacttggatgggaatccagcccagaaaaatgttggagatgaacatatgaagaaatatctacaaggccttcttccccatcttgtctactataatcggcagcctatgaaagtgagctctttgaaggatggagcagaacgttcagttcggttaggaatgaattcccatcagtttgatcgcggccttagagcggatcgcaagaccacaaggaagggcagccaaggtgttgcagccacaaggaggccatcaaccgcgtctactcatgctcgcagaagtgtggactcaccaaaactgtccaagggcaagcagactctcctgccaccaactagaaccaaagtatcaacccaaagtcggtatcattttgattctcccagcaaagtattgaacttggtgtcagagcgctccatgcgcaagagtcgcagtgagggaaattttggagttctgtgagaggctgttccataccaaattgatttgttcaccacctggtttttggagtgtgcatctatttactttgtcgtttcgtatttgtcatgtttttctgttagcacagtttatcccctctcttttgattaagtttggtgcactagatattgatacattgatttgtggcctgtaccgcctaataagctgctttatgcaaaagttatactattcc

SEQ ID NO: 23596 - DNA, 551 bp, Glycine max
tgagaatcgaaggataaatgtgtgatgaaactcgcattacgcaattcgcacacgttgggcgtgcaccgctaaacaaaacataaacctttgctaagaaagtttcttccttttttctcttctgctgtttgaatgtgaagacgcagcacagtgatgaagtgaagtgctgcatcaacctcaatgatctcagttttggaccttttggtttggctcaaaaggttgaatttcaaagaaattcttggttgatggttgatgctatgtctcatcagtgtgttctataagaagttggggttttgccatcgctatgtatgtagctagtcattgcatttgagaactgttggggatcttctccaacattgtagaaggttgagaagacattagttggtgggcatggttttgtgttcgagggatttgagctttggatgcagattgaagagggctaactgttaaatccataactcccatcaaggtttttgctttgtgtgtttgtggaaatagcataccctttgagctgctctgtctattttcttctggtgtcttgttctattttctgg

SEQ ID NO: 23597 - DNA, 1184 bp, Glycine max
cctcgagccgaatcggctcgagattctcataagaacaaaggaaagacaaagagagagatggagaactttcccgtgatcaacttggagaatctcaacggtgaggcgaggaaagctaccctgcaccagattgaagatgcttgccagaactggggattttttgagttggtgaatcatggaataccccttgaacttttggatacggtggaaaggttaacaaaagagcattataggaaatgcatggagaagaggttcaaggaggcagtgtcaagcaaagggttagaagatgaagtgaaggacatggattgggaaagcacgttcttcttgcgccatctcccaacctccaacatctccgaaatccctgatctcagccaagagtatagggatgcaatgaaggaatttgcacagaaattggagaaactggcagaggagttgctagacctgttatgtgaaaatcttggattagaaaaagggtacttgaaaaatgcattttatggatcaagaggtccaaattttgggacaaaggtagcaaactaccctgcatgcccaaagccagagttggtgaagggtcttcgtgcacatacggatgcgggtgggattatccttctcttgcaagatgacaaggtcagtggccttcagcttctcaaaaatgaccaatgggtggatgtgcctccaatgcgccattccattgttgttaaccttggtgaccaaattgaggtcattaccaatgggagatacaagagtgtggagcatcgtgtgattgcccaaacgaatgggaccagaatgtccgtagcctcattctacaaccctgccagtgacgctcttatctaccctgcaccagcattgttggagcaaaaggcagaggatacagaacaagtgtatccaaaatttgtatttgaggattacatgaagctctatgcgacactcaagttccagcctaaggagcccagattcgaagccatgaaggcagtaaactcattttagactatttccaactccatcacaccttaacaggagctatacctatataatatactgccagaagaatttttattgatttggaaatttgaagaagaaaaaaaacagcaatgaggaaaccattatttgtattctaattattcaatttcttattacaacaggtgatttgattacttccgttttaataaataatgaattattctgataag

SEQ ID NO: 23598 - DNA, 482 bp, Glycine max
gtgaaatgttgcaatcagattctacaagagcagtgttcagctaccagaactgcaggcttgcaaggcttctgattttgtcagggatgtgtggattggaaggtggacaaggcatggcaagaatgatgactgctcgatagaaaatgatggtaggtaccggtgcctagcgccggattttccttgccaagctccttggtgtgatggttccttgggaattactggagagtaatggttgggtgtattcaactcattgctcattcaagttgtattcagctgagtctgcttggaattgcttgaagaacagatggattttcttctggggtgattcaaaccatgttgacacaataaggaatttgctcaactttgttttagacttgcctgaaataccttctgtccccagaagatttgacatgaacttttccaacccaagagacccttctcaaacagttaggattacaagcatcttcaatgggcattggaatgaa

SEQ ID NO: 23599 - DNA, 304 bp, Glycine max
ctattttcagaggcgacaaaagggaagctaacaaatcccccaaaacgtgaatgttatgcccaaattataaaaactaggttttgattatattttcccctcgattttccttctctgagagtatcactgctgctgctgctactcccttttctcgtcctcagtgtcgagttatttccccccctcaaattttcgtttttttccctaaaaaaaagggaaagtaaatggcggcggcgatttcttcaccgatggctcagtctgtggcggcggcggcgactccagtaatagctccgggagtcgcattgggcgg

SEQ ID NO: 23600 - DNA, 233 bp, Glycine max
aatgtttggacatcaaattgaagttagtttgttttcatacagttttcctatgcatcactattatcaggtacggaccattccctccaacattttagcacttctaatgtctccgctgattacagcattatggtgtatttgctgctacttgaccattttgcggggagaccaaactatcagagcaagttctatgcaccaaaccacagacttcggctctgtatttctgaataaaatgg

SEQ ID NO: 23601 - DNA, 679 bp, Glycine max
atagcacaacacagcagttacgcaaggtctttatttgttcttcctcaagcaccggcaacgcaaacggatgcattacaaaaaataaaatgagataagaaattaaaagaagacgacgttctctctcggttttgattcccaatggcaacgcgaaagctgattcgtgatttgttactctccaaacgatcccttcttcaccaccagggttggagtaggagtagaaggttacctttggtttgggaagataggcgtagatacagtgtcttcaatgagttctctaagaacattaaaggccaagctgttagaaaccaagaattccaacagtctgtcaaggagctgaaagaaaaagcagatgaacttaaaggggtaaaagaagagctgaaagaaagaacaaagcaaaaaactgagaagctgtacaaacaagtggatgaagcgtggacagaagctgaagctgctgcaaggaaggtttcttacaatgttaaagagaagatttcagctgcatcagaggaggtgaaggaaacttttgggataggaaagcaggattcttcaggatcaactgattcttcaacaaaacagggtgctgatgcaaatggaggaaatcagacatcacgtgaggaagagaaaaatcagcaatctgggtctagtaaggatgctgattcgttgtttggcaaatttaaatcaa

SEQ ID NO: 23602 - DNA, 369 bp, Glycine max
cttactcctattatttttcctcctcaacccatcccttctcgccacgtcacaccctcttaacccaatcccagtcacgctctccgtcgccgatttcggcgccgccggcgacggcctccgctacgacacggaggcaatccagtcggccatcaactcgtgcccagagggggatccctgccatgttaccttcccagcgccgggaaagtacctgacggccaccgtgttcctgaaatccggcgtggtgctgaacgtggagtccggggccaccatccttggcggcacgaggctggaggactaccccgaggagtcgtggcggtggtacgtggttgttgcggagaacgcgacggacgtgggaatccgcggcggcggacc

SEQ ID NO: 23603 - DNA, 511 bp, Glycine max
tcgtctcccacttttccgttgatttaggactgataagaaaggtcaaactgccctacacatggctgtgaaagggcaaaatgaagaaattttgctggaattggtaaaacctgacccagcagttttgagtctggaagataataaaggaaatacagcattgcatattgccacaaagaagggccgtactcagaatgttcgctgcttgttatcaatggagtgtatcaacatcaatgctacaaacaaggctggagagactcctcttgatgttgcagaaaaatttggaagtccagaactcgtctccatattgagggatgctggggctgccaattctactgaccaaaggaaacctccaaatccatcaaagcaactcaagcagactgtcagtgacataaagcatgacgtacaatcccaactccaacagacacgtcagactggcatgagggtccagaaaattgcaaagaagctgaaaaagctccacattagtggcctgaacaatgcgataaactctgctact

SEQ ID NO: 23604 - DNA, 434 bp, Glycine max
cgtgtttggacccacatgcgattctattgatacggttctgagggattaccagctcccggaactgcaagtgaacgattggcttgtgttcccgaacatgggtgcctatacgacgtcgtccgggactaacttcaatgggtttagctcctcagccaagtccatattccttgcatgttcgagcccggaacacaccatgttctaatcaatacaaatcccaaactatcccttgctcaatgtacttacttattttattatcaacttgtctctcttttggtttcggaaactcaataatggcggaatggctgctcgtggacgccgcgtggtttctctcttgattgtattactactatctttttcttttcatttatattttctaatttggagacacctacgtaccttttgatattcgaaataaaatttcgtttattgttgatact

SEQ ID NO: 23605 - DNA, 281 bp, Glycine max
tgcttctttctccagtggctggtggtgatcgcatttggaattgcacaacagcgatgggcgaggttgttagttcagctcccgggaaagtgttaatgaccggtggttacctgattttggagcgacccaatgcaggacttgtcctcagcacaaacgctcgtttttacgccatcgtcaaaccaattcatcacgagatcacacctgattcctgggcatgggcatggccagatgtcagattaacctctcctcaactctccagagaagccctctacaaactcgctctc

SEQ ID NO: 23606 - DNA, 490 bp, Glycine max
caggaaaatgttgaagccatatgtcagtatttcaatactattggcaagcagcttgatgaaagtcttaaatcgcggcgtataaatgacgtttactttagccgattgaaagaattaagctcaaacctacaacttgtaccccgacttaggttcatgattcgggatgttatagagttgcgtgctagtaactgggttcctagacgcgaagaggtcaaagccaaaaccattactgaaattcattcagaggcagaaaaaaatcttggattgcggccaggtgcaactgcaagtatgagaaatccccgtggtggtgttcaaggaaatgccagctctgggggtcctcctattgcccgacctggtgcagccggtttcatgcctggaatgccacggtccacgacgctgcctgggatacctccctttgctactggccacaacgcgctgcctaagcctagatctctgccaagacgacatttgccaggtgttcaagctgccggac

SEQ ID NO: 23607 - DNA, 480 bp, Glycine max
gagggtttgaagttttggcgctgaaagaaaaatggcggaagagtacgaggaaggtggtgaggttgaagaagagttctccgtttggaagaagaacactcctctattgtacgatttcttcatttctcaccctcttcaatggccttctctcaccgttcactggcttccctcctctccccaacctcactcccatccttccttcaatctccacaaacttcttctcgccactcacacttccgaaggcgaatcaaacttcctcatgctcgctgacgcatccctccccgtagacacctcacaacacatcgtcgcctccgatccgaactaccccgttcttcccaaggtggagatttcccaaaggattcctgttgatggggaggtgaatcgagcgcggtgcatgccgcagaaccctagtattgttgctgctaagacttgtaattctgaggtttatgtgtttgatttcaccaaggaacatgggagtgagtg

SEQ ID NO: 23608 - DNA, 393 bp, Glycine max
tggtcaaccaaagtctgatgtgcccaaaagtctcaagaaatatcacttgaatcatcattatcggctccagaactatggctttgggatcacatcaccactgtgggataaagtttttggaacggttcctcctcctcaatcaaagggggatgccaaacgtagataagttactgtcaaggttgcatttgttcattggttaagcatagttcattcaggagcttcaaacgagatatgttgataattcattattcatgtcttgattgtctaattattttgctccccaattgatgtttctgagggttaacgtgccaccatcttgtgtcaaacatcctgtaaaatttgatacatttatcaaatttattgtataaaacttgcctccctgtgcacagttctttt

SEQ ID NO: 23609 - DNA, 274 bp, Glycine max
gatgggattgcacctggacacagcagagtttttggtccctttgagaggtctagttatgacagtgtccaatacagccttcccctagagaactttaagaagctggcactggaaagccaagagcaaggcattagtgagtacagggtcccagcagcgagtatggccgacatccctctgtctcaaccacttcggaccagcaaaatacgcaggaactggaaatggggaacaagaagggtagcaaccatgattctgggatacaagttcttgattgatgatt

SEQ ID NO: 23610 - DNA, 273 bp, Glycine max
gcaaatagtccatagtgaaacttccaacctctcctcacctaacctaccattcatccaattcttcttccatattcccttattcccatgttgttttgatgtatgctcttctctctaaacatggtgctgcatcacagaaagctttgactgtttccaccaccaccaccaccactctgtagaagtgcccgccctgagaaatttaatgaccctctacccccacctaactccccagatgattatttgacccaaagtcccaccaaaaacatcaaaatctcc

SEQ ID NO: 23611 - DNA, 539 bp, Glycine max
  unsure (1)..(539): unsure at all n locations
ttccacgcgtccgtccacgcgtccgcccacgcgtccgcccatttgttccctttttaatttctctctgtattaagatggaagcaactaatggccaccaaaacggttcattttgcttgtccactgccaagggaagtagtgatcccttgaactggggagcggcggcggaggcgatgaaggggagtcacctggacgaggtgaagcgcatggtggccgagtaccgcaagccggtggtccggctcggcggagagactctcaccatcgctcaggtggccgccgtggccggacacgaccacggcgtggcggtggagctctcagagtcagcgagagaaggagtaaaggcgagcagtgagtgggtgatgaacagcatgaacaacggcactgacagttacggcgtcaccaccggcttcggtgccacgtcacaccgccgaaccaaacagggtggtgctctgcagaaggaactcatcaggttcttaaacgctggaatatttggaaatggaaccgaatcaagccacaccctgccacacactgncaccagagca

SEQ ID NO: 23612 - DNA, 313 bp, Glycine max
tcggctcgagcacagtactgattaactatctctctctctgtctctacaaaacttagctctgtttttaattattccttgcattctcttgtattaagatggaagcaactaccatcaccaatgggagccaaaacggttcgttttgcttgtccactactaagggaagtagtgatccgttaaactggggagcggcggcagaggcgatgaaggggagccacctggacgaggtgaagcgcatggtggccgagtaccgcaagccggtggtccggctcggcggcgagacgctcaccatcgcccaggtggccgccgtggctgg

SEQ ID NO: 23613 - DNA, 225 bp, Glycine max
aaactaattaactatctctctctctgtctctacagagcttagctctgttttttaattattccttgcattctcttgagttcagatggaagcaactaatggccaccataatggttcgttttgcttgtccagtactaagggaagtgatccgttaaactggggagcggcggcggaagcgatgaaggggagctccctggacgaggtgaagcgcatggtgtccgagtaccg

SEQ ID NO: 23614 - DNA, 406 bp, Glycine max
ttattttcttaccttatttttcatggctcattcatctcataaactcttcttccttctgtttgcaatcttcttctcacacacctgtgctgtaaactcttccaatgcttccacaacacttcatacctatctctcttccttaaaatctttctgcacaaccactccattctcagaagtttgttccaattcattgaagctatccatctcaataaacataagtccaaacataatcaactacctccttcagtccctccaagtagcaatatctgaaaccacaaagctctcaaatctcttccacaacgttggacactcaaacatcatagagaagcaaagaggagcagttcaagactgcagggaactccaccaatccacattagcttctttgaaaagatctctatcagggatccgt

SEQ ID NO: 23615 - DNA, 290 bp, Glycine max
agattttattcctcttgagactgtcattactcctcttgaagctgagattaagatgtataggaatgagcttgcatcactacaagaagataagaaagctttggaacgactcacaaagtcaaaagaggcagcattgcttgaagcagagaagattttaagaagtgcactagagagagttttaatagttgaggaagttcaaaatgaaaattttgacttgaagagacagattgaaatctgccaggacgagaacaaaatcttagagaaaacacatcgccaaaagattttggaagttg

SEQ ID NO: 23616 - DNA, 866 bp, Glycine max
gttcgctccatcaccgccgatatttgttttccttgtgctttacgtgttcgttcttcaatacaaaccaaactctctcgtttcgcacacattatatataaacatatctccacttcgctcttctcaatcgatctccatcacctttaacgttatcttcgcttttatatctttcaaaaaccttcaagcccttttgattgtaagtatgaggaggaactgcaacttggaacttgccctttttcttccctctgattctggcccccgccaccaccactcaatggttgaagaagctagtgaaataagcccaatccaaaatttcttccatcaccaccaccgccaggaacagcaacagcaacagccgctcaccattttctatgatggaaatatttgtgttgcggatgtcacagagcttcaggtatgtgtatatatgtagattttttttttaatttctagtttttgacccttaatcattcgtgtgggccggcctttgtttgtggttatactaagtagctattacgttggtatgtgttatttttagtaactctaactcatttggataattacctgaaaagtcctagggttaggccaccgtagttaattatatatctgtatatagtattggttcttccttcaatgtaatcagatatagagaatgtgttgtcatgtttcggtaagagactatggattactgaacccattactcatctacaattactcaaaacaatattgaaagtcgttgttattggatttggctcctaactcctaaggagacgtataatatagccatcattgattcgttataaaaactcagaattagtgataaaatttagtgatggaaattgtaatattatgtttactaatttaggggtaaa

SEQ ID NO: 23617 - DNA, 1116 bp, Glycine max
ggcagattcttcatggcttagtatatcttcacagtcacaagccgcccattattcacagagatttgaaatgtgacaacatctttgtgaatggaaaccaaggtgaagttaagataggggaccttggtttagcaattgtcatgcaacaaccaaccgcccaaagtgttattgggactcctgagtttatggctccagaactatatgaagaggcatacactgaacttgttgacatctattcttttgggatgtgcatattggagatggttactcttgaatatccctatagtgaatgccaaaatcctgctcaaatctttaagaaagttacctcaggcatcaaacctgcttcccttaataaggtgagtgatccccaacttaaggactttattgagaaatgtctggttccagcatctgagagattgtcagcagatgagcttcttaaagacccatttctacaagttgagaatccaaaagatcccatcctttatcctttacaacctcctagcagaacactgagagcatattcattcaagtctggttctctatctatggacatggattctgactacaaaccgttttctatgagcatttattctgaaagcaaccaggaaaacccacattgtcctatttttgaagtgcagaggacatataagaacaacaagtttaggttgaaagggactaaaaatgatgttaattcagtatcattgaccttgcgaattgctgatacatgtggtgagtatttggtctttcctttaccttcaccttcacctttcattatttttgtttcgaggagaggcgggggagtagataacatctgaattaggttttgacatgctttccggtgccttggaatttgatacttgatgcatagtttgttgtgttactagcaggtcgagtccggaatatacattttctcttttaccctgatacagataccgcagtctctgtggccacagagatggttgaacatttggagctggcagatcatgatgtagatttcatagccgagcttattgattacttgataatgaaacttctaccttggtggaagccctcaccagatcattgctcatgtggagaattaagtccttattgtacaaatatagatggccaaacattaat

SEQ ID NO: 23618 - DNA, 303 bp, Glycine max
tatgatgatatcaacaaagtcggcactattgaggagccaaactggagattttgatcataataggtggctctttgaaacaaagggcacctatggctatggcaatgctatatggccaaaggaaggtggttttggaaatgaaaaagaggatgatgttgttcagccaactgaattgatgagcagaccctggagaccacttactcggaaactgaagatacctgctgccgttttgagcccatatcgtcctatcatttttattctttggttgtcttggcactgttcttggcatggaggatcaaacaccaa

SEQ ID NO: 23619 - DNA, 294 bp, Glycine max
tctaaacagggcaattttgaatataatagggttaatggaatcagcaagaccggccatgtgggagttatctccccagttccaactgaagaatcttcttatggaaaaagctagaaaagaaattagcaataaactcaggcaagttcagtcaaatgctgttgtacaactgcgatgaaagagaatggaaatgcacttccaagaagtgagtgcgataggagaaaaatgttccagaaactctgcgatgtgtgctcaggataacattgagaagtcagaagatagaaaaagcggatcccgagc

SEQ ID NO: 23620 - DNA, 493 bp, Glycine max
tcgcgatctagaacctagctcactgcccccaacgaaacaaaccccaaaccctaaacagtttcagcaaaattcaccaatggctttctccaaagcattgttcctcgccgtcgtaatgtcggtgttcgtcgccgtcatctccgccgctgaagctccggctccgagccctacctctcccgctgccgccgtgtcgccgtcattcgtcgccggtgttctcgccgccggagccgctctcgcgttcggatctacactccggatctgagcgtagctcatggattttatttgtggatttttagtagaagccgagatttgagtagcattagtatataattctctctattgatattgctatgtagcgattattgctagatatgttgatttctggatctatattgcttttatggtttgactagtattcttattgttgttatcattggttctagtacataatcgatttgttttaaaaaaaaaaaaaaaaaaactcgagattttctgt

SEQ ID NO: 23621 - DNA, 590 bp, Glycine max
gctgttgctaggacaatagctccaggatttttagataacgatctgtttcgcattcaaacattgcaacatgtaatgaagatgacccgtacttgggactcaacaatgtcaatgataccaagaggaggagatactatatggggtggtcttgattggtcaccagaagaaggctatcaccctagccagagaaagcacagcaataacaatactcagttgaaagaccacgaaacaaatcaaacaaattttgtcaactatggaagaatgatatcatttggcagagatgtggctgaggcacactcccctgagattcagatgactgacttccggggtgctatcaagggtcgcagtattgcaaataccacttgtcgtgatgtgtggactgaataccatgaaatgggatttgaaggagtgagagcagttgctgaacataaagtttacacagctggctcactcgttgacctccttcaatttgttgctccaaagatgatggctcgtggtagtgctcatttctcttatggaattgctgacaatttggatgaccctaaatataatcactacaagtattggtcaaaccccttggaaacaaattacca

SEQ ID NO: 23622 - DNA, 800 bp, Glycine max
attaactttgatcaattctcatctcttgtgactcttctctgtcactcacatacctcacttagctgttagcaaacatgggtgttcctgaattgatgttcagggtatcttttatggctgtactcatcaaattggcctcggctacaaattacttgttggaggaccaagtggtgggtgggacacaaactcaaaccttcaatcatgggcatcttcccaaatattttcagtgggagacagtcttgttttccagtacccgccaaaccatgatgtggttgaagttacaaaggcagattatgactcttgccagccaactaacccagttcagtcttacaatgatggcgccacaaccatccctctcactttaccggggaaaagatacttcatctgtgggacaataggacattgcagccaaggaatgaaggttgaaatagacactcttgccagtgcaacaaattctgtcacaccagcagcatctcctgaagattctactacttcacctgcagaatctcctgaagtcattatctcctcatccccaagtccattgttccagacacatctagaaagtcctacattctctccagtcattccttccactgaatttcctgcttctacttcacctctagcacaacattcatcagacttctcagcttcatcaaccagtaaaggaaatctacaagcctatgtcgcagtagtgttaagctttctaatcatgcttatgtccttctaaggatgggaaaaatctcactcaaccgttgcttctaagtttattacatgtgaaaatttattttgctgctctctttctc

SEQ ID NO: 23623 - DNA, 1436 bp, Glycine max
agcaattcaacactagttcctactagtgctgctttaaatagtggatactcttcagacacccttgaactgaaacaaggcaaggcattgaggcctgtgaaatcttctgattcaattactatggaatcctttaacaaaagaagaattggtaaaaatattgataatcaaagggggagcaggtttcaaagcgaccaatggattgctttctcaacagattcatcctctttttccagagtggatgcatgggtgaagggtctcgaaattcagcaaacgcttcctgaggatgcttttcatgatgacaatgccacaagaagcattgtcttcccaccttctcctaatgctggtgggtcaatgatgagaaccacatctcagttgacttatccagatgccaatctttcaaaagaggctttaactgccataagtgtagtcctgtctctaaatccaacttcaactattgctcacatatctggtattggtataaaagccatcccttctatttcacacttatccagtctccgtgctgtcaacttgtcaaacaatttcatagttcacatctcaccaggagttctaccaaagggtattcaaacacttaacttgtcaaaaaacaaaatcagcacccttgagggcctcagagaattggccaagctgcggatacttgacctaagctacaaccgcatttcgagaattggacaaggtttgtcaagttgtacactaatcaaagagctgtatcttgttgggaacaagataagtgatgttgaagggctacacaggctattgaagctaacagttctagacttgagcttcaacaagatcacaacagcaaaagcattaggccagcttgtggctaacttcaactcacttaaggcccttaatctccttggaaattcaattcaaagcaacatcagcgatgaccagctaagcaaagcagtctgtggtcttcttccaaagatggtgtacctgaacaagcaacctgtcaaggctcataggacacgcggaatattaagcgatagtgttgccagagctgcactcgggagcagcacgcgtagctgcaacagaagatcaattagaagagttggccatggaggatcaaatctctccagaggtaatagaaggagtaccagtgtttcccagaaaagcacgaaccggacaaggaagtgaaattgaagctgtttgttgcatgttagaggagcaactcaatggaacactttcatttggttcttctcaatggtatatcagaggaaactgtgtgttagatgttgctgtctcttgatttgtttgtgagatatgtaaaatttcatttaatagcttaaaattttaagataattgtttcctgatataatagtatcaaagccctcataatcatgttgtcgcttcaaggccaaagggctctagcatgaggggttatgttggatatgaaagtcattatttgctttcagcct

SEQ ID NO: 23624 - DNA, 736 bp, Glycine max
caagttctctctttttctttccaccgtcaccactcaccatgcaatgcaaataacccaattaagaaacctcccaaccaacgaggcttgttctgttgtgttgtttgcttagtacgttaatggcaaaccaggtggttcctcgtgaatctcacccttatgcctttcatgtctctggccctcgcaagttcacttcccttaattggagggaccttatcatttccagttggaaggatgcaaattataagagaactgtcattgcctgctttatacaggcagtatacttgcttgaacttgatagacaggagaagagaacacaaggcaatgctcttgccccaaattggtggattcccttcaaatacaagcttaaacaaacactaattgatgaaagagatggatccatttttggcacaattcttgaatgggatagatctgctgcattggctgacttaataccaattagaccaagtggtgcccccagagctgtcttagcactcagaggtacattactcaaaagccctacaatgcgacgagatatcgaagatgacctacgttttgttgcttgggaaagcttgaagggctctgtgaggtttaaagcagctttggaggtactaaaatcgatttgttgtaaatacggaagcaacaacgtatgcattgcagggcattccttgggggctggttttgctcttcaactaggaaaagaactagcaaaagaacggacttatgtggaggcacattgttt

SEQ ID NO: 23625 - DNA, 372 bp, Glycine max
tttgagaagaatggggttatagtgaacaaggccgggaagagcacggatgaacttctgaatttgtttcacacgattacgaagggagcagaacacatggattcgagctatagcgaaatttgtgaaaggttgaatgcgttcagcgggggacaagtcacaactgcatttcaaggattgcctgtggtcacttggcacaagtgcaggcatgtttttcagatcattgcatactattggggaacctggtacaaaattttgaaacgcgatcatttccccacggtgtggaaatccataggagtgttagcggctgctgcacttcttgttctcactattatgcagacctattactcatcccgcaacaatgactgatttagtgtt

SEQ ID NO: 23626 - DNA, 293 bp, Glycine max
gaaaaagaagagagagaatcatccttccttttccgagaaagaggaagaaaacgccgagaaaacacagaaaccgatttcgccatcatccatcaaagatccacaaattcattcattcattcagcaatcccaattcattaatctgcaaaatgggttttggatgttgaagcgggggaggattgacaatttgcgatggaaagggaaaattggagagaacacatcaacagcaatagcaatgggaattattacgataggtttgtgtgtgattacgacaacggagaacgaagccctgcaaa

SEQ ID NO: 23627 - DNA, 571 bp, Glycine max
ctcgagcacgcaattgaatgctacttgaagttgccggttcggctatgttacatatatgatagccggggtggtgtaaaaagagtcagcgatggagcttctcaggaccacactttgaatgaacctagattgcaaaacttgccacgtgaacttgtgaaggacttgcgcgaggtcaatacaccaaggatgttgggcccgccttatttgggctattgcagagcacatagatatagaaggattggatccgctcctagcagacgacccagatgatcctcttaatgtcattatatcaaatattcacaaggttcttttcaatgtcgattcaactgcagaaacaacaaatagagttcaagatgtacaggcagttctaatatctgctcaacggctgggatcacgccaccctagggctggtcagttacttaccaaagagcttgaagagtttaggaacaatcctttggctgattctgtcagcaagcatcaatgtcgtttgatattgcaaagaatcaaatatgctacaagtcatcaagacaataagtgggcaggggtaacagaagctagaggggattacccattt

SEQ ID NO: 23628 - DNA, 421 bp, Glycine max
ttcacgcgtccgatgaagcactggatattttaatgccctttcaatgtcctaggaagaattattcacctcacgctgttcatcagaagatggttgttgatgtggccaagcatgattttcctgaattaaacagtgatagaagttccattttgcttcagtcaatgtcaaatatgatgaacgtggagcaacagaaattagtagggatgagacctgtaaatgagagtacgtttgaagggaacagtggctgtgaagataaaagtttggactcaggaaaaaatgtttcatcatttttacacaatttagtaatggataataatggtgtcaatgatttagcatgcccgtcagaaaatgttggagtagatccagtatccttctcttcaggctttcttgatgcagctgtttgtgtgagcgataagtttcagta

SEQ ID NO: 23629 - DNA, 463 bp, Glycine max
ttggagatcatgaaaatgaacaattctatgggtaatcttataccaggagcaggatctgtggctattacttctggctcaagttctacgaaaactagcatgattgtgggtgtgagtgttggggtggttggtgctgttgtcttggctggacttttctttgtactatgcaggaaaagaagaaggttggtgcaaaggcagtcaaagacatgggttcctctatccataaatgatggaactacttctcataccatgggaagtaaatattctaatggcacaacactgagtgctgcttcaaactttgagtaccgtgtcccttttgtggcggttcaggaggctacaaataatttcgatgagagttgggttattgggataggtggtttcggaaaagtgtacaagggagagttgagtgatggcacaaaagtggcagttaagagggggaatccacggtcccagcagggtcttgcag

SEQ ID NO: 23630 - DNA, 542 bp, Glycine max
ctcacacagtcccctccactcccgttctctctactctttctttctctacacttccaattctcaaattgcgtcacgcaaccatgacgtcactctgccggcgcatccccatcgccggaaccggccaactctgcctccgttgcgctccgaggaccgctgcgattggcgcggtccgctacggctacttgcctaagtggccgacaatcgcgctgcgactgcctccgccggctaaatgcggcggcgcgtgggagagatcaggcgagaagaaggtggtggcgcctcgcccgcgctcggtggggagattcgcggcggcgagtggccgggaaagcgggaatcggctggcggaggtcgcgctcgccgccgctgtgacggtggtgatgggcgccggaaacagagtactgtacaagctcgcgttggttccgctgaggaactatccgttcttccttgctcagcttgcgactttcggatacgtaattgtatacttctctattctgtatatacggtatcgtgcgggcattgtcactgacggagttatcagtgccaaa

SEQ ID NO: 23631 - DNA, 584 bp, Glycine max
cgaagcatctaggaaatattacttctctcacatacctgatgctcgaagcaaaccaattttctggtgatgttccaactgagcttgggaaactaatcaacttgcagaccttggttctgtcatccaatcaattgactgggagctttccaccttcacttgcaggactacaaaacttgaccgactttagaataagtaataacaattttactggaaccataccaaattttatacagaattggcaacaactcaaaagactagaaatgcatggaagtggactagagggacccattccatcaaatatctctctcttgaataacttagaacagctaagaatcagtgatatagaaagtcctagccaggactttccttttctggggaacatggcaggcttgcttactttggttttaaggatattgtaacttatctggtgtgatcccttcatatatctggacgatgatggctttggagaatttggatgtacagtttctgacctgctgttgggcaaattccagcagttataagtgcaaggcgtctatgatatatctacctaacaggtaatattcttagtggctatataccaaattcag

SEQ ID NO: 23632 - DNA, 849 bp, Glycine max
tgatgaagttgttggcaatttgggtagctctcttagaggccttaactccaagaaataccctgtcaatgtcccattaacagttgatcactcacttatcttcactgttgggttgggaattaacccttgtccatcttgcaaagctgcaaatgggagcagggtggtggctgctatcaacaatgttacatttattatgccaaccattgccttacttcaagcacattatttcaacatcaaaggggtgttcaccactgatttccctgccaatccaccccatgttttcaactactcagggcctggaccagccaatttgaacaccgatactggcacaaaggtttatcgggtaccattcaatgccacagttcaggttgtgctgcaagatactggaatcattgcacctgagaaccacccagttcatcttcatgggttcaatttctttgttgttggaagaggagtaggaaatttcaaccccaaaattgaccctaagaactttaaccttgttgatcctgttgaaaggaacactattggagtaccagctggagggtggactgcatttagatttagagcagataatccaggagtttggttcatgcactgccacttggaggtacacacaacatggggactaaagatggcctttttggtggacaatggcaaaggtcctaagcaatcagtgatacccccaccaaaagatcttcccaaatgctaatgtgtcaatcatcaattaattatgcaatacacaaaagaaaggccttccaatgccgaaacaaaagaagctttggagggatacagagaagccaggcaaaagaagagtgagtgaagaagaaagggttatttaataagcgagtatcc

SEQ ID NO: 23633 - DNA, 497 bp, Glycine max
aaacaaagaacaaacacattaatagagtatagaaagaagaaaagatgatgtccccatcccatgtgatcctatccatatttttcttggtgtgtacaacaacaccaccactgtcccttgcccagaacacccctcaagactttcttgatgtgcacaatcaggctcgtgccgaggttggtgttggtccactctcatggaaccacacccttcaagcctacgctcaaaggtatgccaatgagagaatccctgactgcaacctcgaacactccatgggacccttcggcgagaatctcgctgaagggtacggcgaaatgaagggttcggatgctgtcaaattttggctcactgagaagccttactatgaccactactccaacgcttgtgtccatgatgagtgcttgcattatactcacattgtgtggcgtgattctgttcatcttgggtgtgctagagcaaagtgtaacaatggctgggtgtttgttatttgcagctattcccca

SEQ ID NO: 23634 - DNA, 277 bp, Glycine max
caacgtcgcagcgagcgagcgagcgatggaagaagaatattttgatttcgagaagaaggtttcgataaaggagacgatgtcgatggaggttgatccagccaaagtccttcttttgcttcgcggtttcctccaaattcagcaacgcagggccgaagcatattccaagctcaaatggttaataataattacttacaaggctttgcttggattccgccaaaatatatgcaaaatcattttcttctcgttatgatcgcatccattatcttcgagtgtattt

SEQ ID NO: 23635 - DNA, 826 bp, Glycine max
acaaaggttcaaatgcaaggcgtctcagtgggtcgtgctgtcgatttgaccatgttggatggatatgatcaacttataaatgaattggaggagatgtttgacataaagggacaacttcaacaccggaataagtgggaaattgtcttcactgacgatgaaggtgacatgatgcttgttggagatgatccatggcctgaattctgtaatatggtgagaagaatcttcatttgttccagccaggatgtgaagaagatgagttgtggaagcaaactgccgatctcctcagtggaagacgggactgtaataagctcagacacaaccgaaacctgaaacttttgacattctttcctgtggttttgcgtttgtttgtcagcagcacccaaatgctgatccttcttgttgcttcaaattgtttgtgggaaggaagttggtctatttgggctggggtaagtttcatgttatcagatgtgagacactagctaattgtaacttaatttgtagagacaccaccaccaggcattaattgtgctagaaaaaaaaagacctaaacagatttctttaataaattagtaagtgggaagatggcaaatttaggcttagtatatgtgaatattcatgtcaagttggaagaagaatgttgggggttttgatgttttgaaagacttgccttttttggttaaggggcttattcattggtgctttgtatgcatataatgtgcactttgttattaccctctaaaaattctaatattggtgagtcaatgtctgttgctgtcatcagtgaatgtaaattatggcattaaattgcttcaattgtaatgttcag

SEQ ID NO: 23636 - DNA, 255 bp, Glycine max
atatattagtgtagcattgtgaagaaatagatggattcaattgtggtcttgtcatggtttttgtgcgttttggtagtagctgcccgtggaggtttaggggcagtttctagggacatatttattctggcaggacagagcaacatggcaggacgaggaggggctttcgggggaaaatgggacggtgatgtcccagaggagtgcaggcccagcccgtgggttttcaggctgagcgcgggcctggagtgggaggaggcg

SEQ ID NO: 23637 - DNA, 327 bp, Glycine max
ggtaattataataactctatgatgggtccaggtagttatggtcaacagccatatggtagttatggtcaacagccatatggcggctaccgatgagatagaacactatgcctagatagcaaggtgaagtatgactgattgttttttgctacaagttgtgaaagagaaatgccaataccagtgctactagtagtagtctacattttgggtttatagcggtgtatcattaaagctgcaattttgctgtaagtgacccagtgtgacgtacgtgtatttgttataaatagttgttaccatttttttgggtcaccctttatgtagtgcttgagc

SEQ ID NO: 23638 - DNA, 427 bp, Glycine max
cggctcgagtataatagtagaatagaaaaaccaaagctttgtgggtttgtgtggacttctttttagtgcaaaaaacaaagtgccacccctctctttttttccccactttttctaccttctggggttattgattatccatcaaaatctcttctttttaagtgtgtgggggagtttcacttggcttctttctcatggagtgtaatgaatttgtgtatggtgaaattctttgattccacactccatagtacatgagtggatgtgcgctcttctatgctgagctgtctcttatggccgatttcatagcttacacctttggggttcttcttctaaaatcactttgtggagagtttgtctgccagttgcttcataatggcacaaaaaatggaaatagtgagcacttctggtcatcattgattgtgacagcacg

SEQ ID NO: 23639 - DNA, 298 bp, Glycine max
caagtgccatctaatctactagccaagctaagtacgtcctgatatggagaaagaagaaagtgaagaggaagaagatgacaacgacttgaatgttatgctgctctccttttgaagagaggagtatcaaaaaggcaattcataaaggcttagggaaggcaaagcctttcttccaggttcaattcacgaagctgtgcctgcactggtgattcagccagctaaggttttaaaaaaacagtccatgaccatgatttcgattgtaacactcagatcttggggggcccagatcacatcatgacac

SEQ ID NO: 23640 - DNA, 961 bp, Glycine max
cgcccacgcgtccggatgacacaggttttgttcaagtgagtgttggtccttctgagctgagcagttccataaggatgaatgccatattgaatggtgcagagataatgaagatggtcaatgatgtcggtactaatgttgtgcataggaggaagaatctgtgggtgttggtgggttcaattgctggaggaattgttgtcttgtttttagttgtaactgcttttctacttggtaccaaatgcaggaacaagaaaccgaaacaaaggacagtagaaagtgttggatggacacctttgagtatgtttggagggagctcccttagtagaagctctgagcctggttctcatggacttcttggcatgaagatcccttttgctgaaatacaatcagcaacaaacaactttgatagaagtctgattatagggtctggtggatttggtatggtctacaagggagtgctgagagacaacgtgaaagttgctgtcaagagaggcatgccagggtccaggcaaggccttccagagttccagactgagataacagttctgtccaaaattcgccatcgccacctagtttcactagttggtttctgtgaagagaattcagaaatgatacttgtctatgagtatgtcgaaaagggtccactgaagaagcatttatatggttcatcactacaaacacctctctcttggaagcagcgtcttgagatatgcattggtgcggctagaggccttcactatcttcacactggttttgctcaaggaatcatccaccgtgacatcaagtcaaccaacatattacttgatgaaaactatgttgccaaggttgctgactttggtctttcaaggtcagggccatgcatcaatgaaacacatgtgagtactaatgtgaaaggtagctctggctatcttgatcccgagtattaccggaggcagcagcttacggataagtcagatgtttattc

SEQ ID NO: 23641 - DNA, 291 bp, Glycine max
aaagcggcctgaactcttgacagcaaaatcaaacatgacttaccatgaaagataactggctggcctctgccccttgaattctattgaggttacaaggctgcttaaaggtctaggtgctccaaaaaatgcaagaatttattgggctggaggacaaccactgggtggaaaggaggtcttacagccattaatcaatgaatttccacatctttacagtaaagaagatcttgctttgcatggagagctggaaccatttgcaaataaagcttctctaatggctgcccatgattacat

SEQ ID NO: 23642 - DNA, 786 bp, Glycine max
gctctatcaccttctcttttaccactgaaccatcacacaacaacaacattgacaaccccttttcataatactctttaatctcttccgttcaaatttcaattcaacaaacccaacacgtatcattcttttgagtcctcaattttcataaactatatgggggccggtgtttctacaactgcaacagaaaatgatgatgggggcactttttctttgtcatcagagactagccttgatgatatccctgagaactgcatctcttcaatgatgatgagttttgatccacaagagatttgctcattggcaagagtcaacaaggcctttcacagagcttcctctgctaactttgtgtgggaatcaaaactgccccaaaactataaatttcttctcaataaagtacttggtgaacaaaatcttggttccatgaccaagaaagagatctatgccaaactatgccaacccaatttctttgatggtgccaccaaagaagtttggctggacagaagcagtggacaagtttgtatgttcatttcatcaaaatccttcaagattacaggaatagatgatagaagatattggaattatattccaactgaggaatccaggtgagagaggttcaagagtgttgcatatcttcaacaaatgtggtgggttgaagtaataggggagctagagtttgagtttccaaaagggaactatagtgtatttttcaagcttcaattgggcaagccctcaaagagattgggccggcgagtgtgcaaccttgatcaagtgcatggatgggacatc

SEQ ID NO: 23643 - DNA, 207 bp, Glycine max
tttattttttggctaaacaaatggttgatgatgaagctaattgttacttaacatgtataatgcttttgtaattgtattacactatcacagattctggggcaatagatggcagctattggttgttgatatggaatttgattttttgagtttgttttgtgtgttgtaataataagaatttgacttgtgtatggagccatgtttttttgt

SEQ ID NO: 23644 - DNA, 267 bp, Glycine max
ttgcattctgccaatctcatggccattgtgggataaggtttttggttgttgaatctttgatgaagcatgctggctgaattataattacatgaatgtcctctgttggattattttttgtagaaacgtagttatgcagtattttagttaggattcatgatgggatacctttgtgaaatgggtgttgtattccaaggggctgcaaactttctggtgcttgttgacagattgtgggttatcgtttgaaatggcatcggtatccagtcaacc

SEQ ID NO: 23645 - DNA, 411 bp, Glycine max
ctgccacagaaaataacagttccaactattgtgtttcttctgctgcaggttctgtatcagactccaagtctgcttctatggatgaatcagagagtgtgttgtcactcacatcaccatcttctgtgcttgaattggatacatctgctttcaatttgattgggagtggtaaggtttcaagcaatgaagttgttgagactaaaggattggaggctgaagttgctgagactaaaaatttggcagctgaatttgccgagctggaaatgctggaaatgccggatttgagtatgctgaatgtgccatccccatctgctgtcgctgctactgctgctgctccatctgagtttgaattggatttgttggcatttgttgattccgagtatggatttcatgatgagcatgactttgatgatg

SEQ ID NO: 23646 - DNA, 1035 bp, Glycine max
aaaaattctaatcagccggtagaggagtttaatctttctaaaaaaatgtaatctttttccctttgtttttcatattccagggttgttgaaatgcaagagatccttgatcaacagattgcagaagaagcagctgaggctgaaggggatggcgcaatggcatcagttgcaaatcctcgtaacaccggcataaaatctacaagtgccatggcttcttcaaaaaatttaatgcagcaaaaattgaaggttcaggggaaaggctataaggataaatgctatgagcaaataaggaagactgtagaaggacggtttaacaagcttctcaatgagcttgtgtttgaggacctgaaagcagctttagaggcagcacgagcgattggggaagagcttggagatgtctatgactatgtagctccctgctttcctccaagatacgagatattccagctaatggtaaatctgtacactgagaggtttattcagatgctaagattgcttagcgacagggcgaatgaattaacaaacattgagatattaaaggtaactggatgggtggttgaataccaggataatctgattgggcttggagtcgatgagtctctagcccaagtgtgctccgagagtggtgcaatggatcctcttatgaattcttactttgagagaatgcaagctacgactaggaaatggtacctgaatattttggaggctgatagaacacagcccccaaagaaaactgaagatgggaagctatataccccagctgctgttgatctcttcaggatacttggtgagcaagtacaaattgttcgggataatagcactgatctcatgttatacagaattgccttggcaaccattcaggtaatatctgataagacatagatgtagagtaactgatgcttattataaatttatcttttcgaaaaataaactctaggtaaataaaggtaaactggacagaacttggaagttggaaagcaatttttttgagtttaacaatgtgttcaagtttcatcattattgggaggatatcacgag

SEQ ID NO: 23647 - DNA, 390 bp, Glycine max
tctcgagccccatttctctcttctcacttccttgtcttcctctctctcaccctttgaaattctctcacttctattttagattctcaattcgttattgtttttggttcacttggttcatattcaagcccaattttggtgtctcacttattggttttccaattggagtgattaaaaagttgattttgggaaatgggtatgtgaagtttggttttttgatttctgggtcttgaaattgaggtaaaaaagttgtcaaattggagagaaaattcggggttttttttattgtggttggaattttgggtactgggtctaagcgataggcattgggggaagagagagcgagtctgagtaagctgcgttgtgtgcgagaatgcctgcgacggactacca

SEQ ID NO: 23648 - DNA, 317 bp, Glycine max
cacaacataacaaaagcttccatttcatttattcattccttcccctctgttttctgcatgtgattgcaacaagaagaaggcttttccacttttcttcagtgttccgttctctctttcttagggtttacgagcttcgataaaagttgaacaaacccagcgaaacggaacagaacacccttgattctgtttcttctgggtttgaaaaaaaatgaagcggggtagtagtactagtagtaaagtagagccatttgtgctacccaacaggctcacactgcttcagattttcatggtggtgatgctccttaccttctcttcat

SEQ ID NO: 23649 - DNA, 320 bp, Glycine max
cacggaccctacgatacttgttacaacgtatgaaccacaccatgaccatggtcatcaaacagctgaaatatcacttgtctcaaaccaaactgaagcccttcctcctcttagacggtcaagtcctgtttcctcacctaatacagcgacaattcgaagtgctgtttgccccaccgtaacgcttgatttggtcaagtcaggattcgttcaatttgaaactgcccaaaactcctctatccagcaatttttggttcaacaaatggctacttctttgacaagggatcccaatttcacaacagaacttgccactgccatttcaggaa

SEQ ID NO: 23650 - DNA, 336 bp, Glycine max
  unsure (1)..(336): unsure at all n locations
gccgtggttggaggtcatttattgcatgccaaagagagcagcattcaagggtactgctcccatcatcttgtcagataggcttaaccaggtgcttcgttgggcacttggctccattgagatcttcttcagtcgtcattgccctttatggtatggctataaggaagggaagctgaagtggcttgagcgatttgcctacgcaaacacaactgtctaccccgtcacctccatacctctagtcgcctactgtgttcttcctgctgtctgtttactcactgataaattcatcatgccaccgataagcacttntgctggtttgtacttacgtgctctattctc

SEQ ID NO: 23651 - DNA, 322 bp, Glycine max
tgaaagatctctcccttcaccctagaatcccaggcacatgctgtgattctagggtgaagggagagttctttcaccaaaccacatttagcatcagtttgtctgttgcaaaaaaaatttattgaagatgtgcaaaagctagttcaattggagccgaagggattttgtggcatagagctttacaatggaattctcatgcgttatgtcaaggcttcgagtgcctatttggggaagcaagaggatgctttagacattgatatcacttactaccgtagcaaggatccaatgactcctaggctttatgaagacattcttgaagaggttg

SEQ ID NO: 23652 - DNA, 281 bp, Glycine max
ctttctgatgatacagttgaaaccactcaagatgatacacttgaaaccactcaagatgatatagttgaagctactcaagatgatacagttgaagcaacacaatatagtgatgttctactgtcatttaggtctgatgatcatgaccttccatgtagatgcagggaagtcatagtatctgatctgcgattgcttactttgttggaggctggtcttccatcttgggtcatcttccttcagtcatatccagtgttatgcaatctttatcgtccttggatgtgccc

SEQ ID NO: 23653 - DNA, 460 bp, Glycine max
aaaagttttgaagttttaaagagcagggcaaaaccagagcctgacttccttgttttgtgtgtctgtgtctcccaagattctgctgaggccttaagggagtatattacatatctccatgtgcggtgtttccaaggggaaaccttctcaaattgatttgatcatggaggagaagtatgcaaaagaagggatgcatcataaagatttctgctttgcttgagttttcagcgacggatgatctaattggtttcaaagatgcggttgaaaaggagggtcatgatattgatggggtagggttttggtatggaaggtgtgttggctcgaagaaaataggttatgaagagaggacacctctcatggttgcttccatgtttggaagccttgatgtatcaacttatattcttggaatgggttgtatcgatgttaatcgggctagtaggtcagatggggctactgctcttca

SEQ ID NO: 23654 - DNA, 319 bp, Glycine max
ttcactccacacaccaaaaagtgtagtatgatgagcaacaaattattctacgcaaaccttgtgctcgccttctacctctcatgtcactatgctcttgctcagactgaaaatttccctttgccactcaaagctgtgaatcttggaaattggctcgttattgaagggtggatgaaaccttctctctttgatggaataaccaacaaagatcttttggatggaactcaagtgcaattcatgtctaccaagttacaaaagtatctctgtgcagaacatggaggaggaagtgttgttgttgccaaccgcaccaaagctttgggtt

SEQ ID NO: 23655 - DNA, 717 bp, Glycine max
cctacaatgtatgccacaggaccatatgctcctgaaatgcagctggtgtctcctccagtcttttcaaatttcactactgaaccatctactgcacctctcactcctccacctgagttggctcacttaacgactccctcttccccagatgtaccttttcctcattttctctcatcttcagtggatctcaaaaacagtgacaagggtaactacatcactgcaaatgatcttcaagctacatattcactctaccctggatgtcctgccagtagccttatatctccaatatcaaggaactcgggtgactgtttatcatcttcttttcctgaacgagagttccgtccacagtgggattcatcactatctcccgagaatggaaagtatcagagaactgggtctgggagggtgtcagggcatgacacaaatggtgtcactatggcatcacaagatacaaatttcttttgccctgctacctatgcacaattctatttggaccaaaatcctccatttcctcataatggtgggagattaagtgtttcaaaagattcagatgttcaatctaatggcggaaatggacatcagagtaggcatgctagaagtcctaagcaagatgtggaagaaatagaagcttaccgagcatcctttggtttcagcgcagatgagattatatctaccagtcaatatgtggaaatttctgatgtaatggaggactcatttacc

SEQ ID NO: 23656 - DNA, 436 bp, Glycine max
ggttacagttgaatggttcccgtagatgtcgccggcggtgaccagaaaagtggatctgattattaactcagaaaaatggaacatcagaagagcgggagcaagctaaccagaaaccactcctcgcttctccgatcctccgttcacaacctctcttccatcatcacccaacacgaacacgaacaacaactcctcctcgatgttcacgacgatgacgacaagaacaagaagcccaagaaaccccacgtccaggctcaggcccaagcccaccatgcccaggccctggcccacaggtcttccgcctattccgccctggcggtcttcttcctcggcgcgtgctcgctcctgttctacttcttctacctggaggtgtcctcctcggagaatttcctgctggcgctgatcttcgtggccgtggcgctctacttcgtctccaaaa

SEQ ID NO: 23657 - DNA, 300 bp, Glycine max
ctcacttcgtgcaatgtggtgacagttgaatggttcccgtagatgtcgccggcgctgaccggaatacttgatctgattcactctctcgaaatggagcatcagaagagcgggagcaagctaaccagaacccactcctcccttctccgttcctccgttcacagcctctcttccatcatcacccagcacgaacacgaacacgcatcacgaacaacaactcctcctcgatgttgacgaccacgatgacaagaataagaagcccaagaaaccccacgttcaggcccaagcccaatcccaggccca

SEQ ID NO: 23658 - DNA, 516 bp, Glycine max
  unsure (1)..(516): unsure at all n locations
gccggaagagttcgagccagtggtcgttcacatcttaaacatctttgctctattttgaatagcatttagataaggagatatgaaaataaatcttcgcaagtttgcatgatttactcccttctatctattcgatgaaatgtccctgtgtttcacttttatctcgttgttatgtttttttatttctccgccatcttttttcattcctatgtttttgctcttatttgtgtgtgtgtattttgattgatcggtgggtgtgtatttttgcaggggtgatatctggagctcttttgtatataagggatgaattcctagctgtagatagaaagacttggcttcacgttacaagtctcgtatctctgttttttttctagatattgatcacatgcatgtttctgttaaatattttaattgttatgaaatcatatggatattangttcggttttattttatttgattgaatttgatgaacctgcaggttgtagcctctgtgtacgtaaataacattcacataacaa

SEQ ID NO: 23659 - DNA, 355 bp, Glycine max
cattcaaatgacaacattattttgattatcaatcggattcggaaaagtaatccaatcacactcgcagcagaaaatcgaaagataatgcaagtattctatggagtattgttgcaatattttgctgttttggcaaataaggaacctcttaatgttgagctactcaatatgctcgtgaaaccgttgatagagatgagtatggaaatcccatactttgctgcaatatgtgctcgtcgcagaatagaaactactagaaaacaattcattgagagtatcaaacaatcagaaagtagcagttggccttcttcaaaaacgttgtgcctcttgcgtttgtggtccatgatatgtccatgctctg

SEQ ID NO: 23660 - DNA, 401 bp, Glycine max
ggcctaatgaaaggtgagttgcagaatgccagagaggccattcgctggggcactgattatcttctcaaagccactgcacatccaaacaccatttatgttcaggtgggggatgctaagaaggaccatgcttgttgggagagaccagaggacatggatactccaagaagcgtgtttaaaatagatgcaaacacacctggttcagaagttgccgcagaaactgctgcagctcttgcagctgcttctctggtttttagaagaagtaccccacatactccaaaattttagtcaggagagccatcagggttatccagtttgctgataagtacaggggatcctacagcaatgccttgaaaccttatgtgtgccccttctactgctcttactctggatatcaggatgag

SEQ ID NO: 23661 - DNA, 297 bp, Glycine max
ctctttccattttccttctccacctctcttctccggcgaccctcgccggaatctcaccagaaaatcccgccggacaactatatttcccattttgcaaattcactttcctcaccattgttgttcccagtatcacaacgctcaaaacacacttttaaatagcttcttctcttcttcatatgtgttgatattcattcacttcagcaatgcgattgaaaacctgtgaatattagacccatttgagtgaatttcaattcaaattcataactttgcttctggggtgtaaactgtgtaagcgga

SEQ ID NO: 23662 - DNA, 254 bp, Glycine max
gtccggtacctcaatggcatgccctcatgtcagtggaattgctgctctcattcgctcggttcacccgagatggagccctgcagccatcaaatctgcaatcatgacaacggccgtggtgactgtccacaccggatggccaatactcgatgaagaccaaccagcgggagttttcgacatgggagccggacatgtgaatccacaaagagcattgaaccctgattggtgtatgacattatgccagatgactacatcag

SEQ ID NO: 23663 - DNA, 421 bp, Glycine max
gaaaatctcattccaccaagtaagaggagctggatacctatggagtatgcccctcaagaaagcaaacttctgacacgtcaagtgatgacccgagacatcatagaattttttgtcagaaacatggtaaatgaacatttgggtgcaactgcaatgcacatgtggtacatgctgattccagtgactatggtgccttggatgaaaaatgcatacacttggccgagctagcagccactgctgtcgattttccaaagaccgggaagcttgtcactatgcctcctcatctgaagccaaaattgtaccctgatttcatggggaaagagcggcaccagtcttacaggtcaaataaaatcctgggtagactttaccggcatatcaaagatgcttatgatgaagatattgaagctccgatttgaatttgtga

SEQ ID NO: 23664 - DNA, 300 bp, Glycine max
tgtttctctcgcacgaatacaacgattgctagcgttcccctcttctcggggacccagtagtcgccgtcgcagcctccgttggccgtcagaaaagaaagcctcactcgccccccagtttctctctcaaacgaaaagggatttaggtcagggttcctttcctttcttctcgcgccgtaccgctcccccagtggccgccgtcgcagccttcaccgttgatatagtagctctctaacgctgtcgtcgcagattctagtggttctccttctctatcgccgttgcagaatggaaagcagggaaggc

SEQ ID NO: 23665 - DNA, 644 bp, Glycine max
ggcgcactaccaaagcaattttgcgtggtggcctataggaatgcctggattttccaatccatacatttgtagtgttattccaggaagtgaaatagacgggtggttcaccactcagcatgtgagcaaggacaacttaataaccatagacccacctccccttatgcagcatgacaaatgcattggcgttgcttattgtgtagtattcgcagctcattcaacagatttggagatggttcctccagaaacagaacgaggttatcctgttatgggcatcgtttggattccggtggatgttcatgaagatgtagtcccaggcaaatcagatcacctgtgcttattctattcgcctccgtattttgggattggggactgggaatttaaagtggaaataatgggccggaaaggttttcctgtgggggtgaagaaattcgggtttcgtagggtacatgaagggggtctagatctaggaccatcactcaacacagcaggaatccggaagaggaaaaggggaactgatggataaaatgattgttttggttgtttggggataatacaatttttttaccctttttatgtaacttttacgaagccagtgaattagtatgcttttactataacattgtcgaagacggattaggcctctg

SEQ ID NO: 23666 - DNA, 119 bp, Glycine max
cgcttgtggactacaacaggatgttactgcctagctagtacaatagagagcttgtgcggaatgttaaaatgttaactgttacatcatgcattttcctcgtacagtgagaggagagctcc

SEQ ID NO: 23667 - DNA, 264 bp, Glycine max
cctcactctcgttcttctgtgtctctccctcacctacaaccaccaccaaccaagccaccatagcccatgccttcaccgtcatcgtcggagaagagagacgaatgagtgatttgagcgagatctagaagatttggagagagtgactatccagatctaaggattcgacggtcagtggagttctggtgctctgcaccgccgccggtgtgataaggaaacgcctctcgatcgttgtcacactgccatgcacggtggttgcggagtcat

SEQ ID NO: 23668 - DNA, 431 bp, Glycine max
cccacgcgtccgatttcgccattctctccgcgcaccgttttccggcgcagtcgccggcgagtcaccgtcgtttccgccggcaagtctctctcaccgttgccatcctccttcagagaagttgagaaaatggacggccatatgggaatgaggaaaatcagctctcactgctctatccctgatttggatgattctgatatcttacgtttgcttgaaaagccaaagttgaacattgagagacagagatcatttgatgagaggtcactcagtgagctctccattggtcttgcgagagcgggcttggataactatgacacttattctccaggaggaagatctggcttcaacacacctgcttcgtctacacggaactcgttcgagcctcaccccatggttgccgatgcctgggaatccctcagaaaatctctagtcta

SEQ ID NO: 23669 - DNA, 531 bp, Glycine max
gaattggactctgaaaatgaccatgtagatactaataaaattgagtctacaagggctgaggaagaagcatttgctaatggattgcagactattaacaatgatgatttggaggagatccgtgagcttggttctggaacctatggagctgtttatcatgggaaatggaaaggttctgacgttgccattaagagaataaaagccagttgttttgctggaaggccatctgaaagagcaagattgatcacagatttctggaaggaggcgttgatgttgagttcattgcatcatccaaatgttgtctccttttatggcattgttcgtgatggccccgatggttctttagcaacagtcacagagttcatgattaatggatctttgaaacagttcttgcataagaaagatagaacaatagatcgtcgtaagaggctcattatagccatggatgctgcatttgggatggagtatttgcatggaaaaaacattgttcattttgatttgaaatgtgagaatctattggtcaatatgagagat

SEQ ID NO: 23670 - DNA, 433 bp, Glycine max
cacgcactcatgagataccattaccagcgtggtctcaccgacattatttataaagaaagaaaacgtgtaattccttccttcctagctacctaataaagaacacagtcattttggaccgcgagcatgctgctttgtttgcttttgaaacggttgatttgagtccaagcaaaagaaaattcccacaaaccacgacctctgattcttgctcatgtctttcacatttagatttatgtgttgtgatgaaattattgcatggtgatatgatatacggctaaaaagggaaggataaaaagagcattatatgtttacgtgtttaattagtatatatagatagggaaatgacaatcacttgactaactacattagcattgatattgttattacagggagcagagggtctgggcgaacaccactcgactgggacagccgaatg

SEQ ID NO: 23671 - DNA, 287 bp, Glycine max
atttgaccgtataattcaaacaatagcttcagctgttgaggcccaggataatactgacgtattagcctattggttgtctaatacatctactttgttgttgctactccaacgcactcttaaagctagtggagctgctagcttaacaccacagcggcggagaacagcgtcatcttctctgtttggaagaatgtctcaagggctaagggcgtctccccaaagtgctggattgtcatttctaaatggtcgaggtcttaatagactggatgatttacgacaagtagacgcaa

SEQ ID NO: 23672 - DNA, 616 bp, Glycine max
tcgtcgagccgaatcggctcgagcacaaactcgctgcttattttgatttgaactttgaagttttgttattttgtgcaatggcagccaagagcaaaatcctagtccttggaggaacaggatacattggaaaattcatagttaaggcaagcgcagaagcaggacaccccacttttgccttagttagagagagcaccctttctcatcctgaaaaatctaaacttattgagagcttcaagacctctggagttactcttctttatggtgatctaactgatcatgaaagccttgttaaggcaatcaagcaagttgatgttgtaatctccgcattaggtgcagaacagatcgatgatcaagtgaagatcatagcagcaataaaagaagccggaaacatcaagaggctcctcccatcggaatttgggcacgacgtggatcatcacaatgcagtggaaccagtgagtagcttcttcgagaaaaaagtgaaaatccgaagggcaattgaagctgaaggaattccatacacttacatcagttcaaattcctttgctggacacttcctacctaacttgttacaacaaaatgtcacagctcctcccagggatgaggttgtcattctagg

SEQ ID NO: 23673 - DNA, 555 bp, Glycine max
atttttcaagggtcgttagctatctaagtgttgtaaaaaactagctttgtcccaatgtggattatgctgaattatatcctgttggcacccacttggattatcaagctttcataactcaagcattggaagggaataacaagctatagtacactcagaaaaaacgatgagtcccatgaccatgatcacgaccacgatgtttctttagacatgtcaaagttcgatacctgctaaggttgccttgatttctgtgaagattctcgtatatacgtgtttaccctccatattatattaacatttggacagtgattccctgtggctactagttagagtgtgtctggttggtgagatttggcttgtgtgttgagttctgcccaccgattttgatggagctgaaatcgctctcttcttgtgctgcgtccacatctgaggttgcccatgttggaagatcctactccactttgatctccagtttcagacacaaagttggagttagattttctacccacttccagtgtcgcagagggttgtttctgacgacttattgtgcctcggata

SEQ ID NO: 23674 - DNA, 285 bp, Glycine max
ggaagggaagctatagcacactcagaaaatcgatgagtcccatgaccatgatcacgaccacgaccacgatgtttctttagacatgtcaaggttcgatacctgctaaggttgcctagatttctgtgaagattctcgcatatacgtgcttacccttcatattatgttaacaattggtcagtgattccctgtggctaccagtgtgagatttgtcttgtgagttgagtttcgaccactgattttgatggagctgaaatcgttctctccttgttctgcgtccacatctga

SEQ ID NO: 23675 - DNA, 296 bp, Glycine max
ctgactgtaaccagattaaaatttgtataccctatgctacataatagtgcatattagatgaaattcatatagagataagacaatttttggcctctcttttgtgaatttctaggagtctgaaattatgtatcattgatgcaaagcttgttatgtcaatgtcatgaatggtttcccatccactgtgtcacagaataaagggagaaaaaataatatagtcatcaaaatccttagttataagcaattcatttcactgttttttgaatgtaactatgggaggagattttgctattgtgagt

SEQ ID NO: 23676 - DNA, 489 bp, Glycine max
atgctgaaaagtatcttggaatgccagttgtttttgctgagtttggtgtatcttccaaagaccctggctacaattcatcatatagagacacggttataagcactgtgtacagtaccatcctaaactccacaaagaaaggggggagtggggctggaagccttttgtggcaattttttcctgatggaaccgataacatggatgatgggtatgcaattgttctctcaaaatccccttccacctcaggcattatacaacttcaatccactaggcttgcactgtttaattccttgtgcaacactaaatgcaattggggttgtaagaagaagaaattgttggaggaaatactctatcgtgacgaactgtgacaccatatgtggaaagtttcgaattgtaatgctaaggtcatataaaaccatgcatggataaatatgtgattcaccatataattttgtttgtattaatatcaacatcaacaatgtgtttaatttg

SEQ ID NO: 23677 - DNA, 857 bp, Glycine max
cggtgacggaggcggtggacgcggctccgttgaagagtagtaagaggtttgttataaggataaaggctggggtctatagagagaacgttgaggtgcctaagaagaagaacaatatcatgttcttgggtgatgggaggaccaacactatcatcactgctagcagaaatgttgttgatggtagcaccaccttccactctgccaccgtcgctgtggtgggtgcaaatttcttggcccgggacataacattccaaaacacagcgggcccatcaaagcaccaagctgtggccctaagggttggtggggacctctcagcattcttcaattgtgacatcctagcattccaagacaccctttatgtccacaacaatcgccaattctttgtgaagtgcctaattgctggcacagtggatttcatctttggcaactctgcagtggtgttccaagactgtgacatccacgccaggcttcctagctcgggccagaagaacatggtcacggcccaaggaagagttgaccctaaccaaaacactggcattgtgatccagaagtgtaggattggtgccactaaggacttggagtctgtgaagaagaatttcaagacttatcttgggaggccttggaaggagtactctaggactgtgatcatgcaaagtagtataagtgatgtcattgacccaattgggtggcatgagtggagtgggaattttgcattgagtactttggtttatagggagtaccaaaacactgggcctggtgctggtacttctaatagggtcacttggaaagggtataaggtcatcactgatgactgccgaggccagggattatactcctggaagcttcattgggggctctag

SEQ ID NO: 23678 - DNA, 260 bp, Glycine max
aaaatgaccagctttacagtgcagaaggagatcaagatgaggcgtgtgtgaacactggttgtattgacagctttgaagaagacaaaagtgcgaaaaatcaatgatcagaaaagtgacatttcagatgagttgctcgacaatcagacccccttgggtcatagtatcaccgaggaaggaccatctgcaggaactgaacttactgttgcagcagaggtccctagaaaaacattccatgagaacatcatagagaatgttcttgg

SEQ ID NO: 23679 - DNA, 305 bp, Glycine max
gtagcccctaggtgctctgaaataccagaacttgtggcacttaagaatatctttgacaagaaatatgggaaagattttgtatctgcagctgttgatctcagacctagctgcggtgtaaatcgccagttgattgaaaagctctcagtacgaacaccaccgggtgaagtaaaattgaaagtgttgaaggaaatagctaaggaacatcaaattgattgggatactacagatagcgagacagaacttctcaagcctccagaagagctaatagtagggccaagtgcttttgtcagtgccagcagcctacc

SEQ ID NO: 23680 - DNA, 819 bp, Glycine max
gttcttatattcaattcaggtcactggtggacacggactaagctttttgacgtgggctggtattttcaggttgataactcactgaagcttggaatgacaattaactctggtttcaacacagctttactcacctgcgcatcttgggtagagagtacaattaacacaaacaggacaagagtatttttccgcaccttcgaatcatctcattggagtggacagaatcacaattcttgcaaagtgactaaaaggccttggaagagaactaatcgcaaagagagaaacccaatttcaaatatgatcaacaaagttgtcaaaagcatgagtgctccagtaacagttctgcatgttacaccaatgactgcatatagaagtgatggacacgtgggcacttggagtgacaagccatctgtgcctgattgtagccattggtgcttagccggtgttcctgatatgtggaacgaaattctcctctcatatttgctacctaaagaaggagcatattagcatgagaggtaccaacatgttagtccttgtatcatctaagccacatatatagcttggtactcaattgtactcagcatcaaccatgttagcctttaacgacacggtagggccaaatgtacatttggaaatgaataatgtttataaagagtgatgtcaaataattggcatttgcaaagaattgataccaggactaaagtgtttatgtgtcacttaccccctgcgatgtggaatggcttttgcttaacgtggatgtgtctttggttggtcatgctattgtagaattgaatttgaatcaatataaaattgattttaagt

SEQ ID NO: 23681 - DNA, 407 bp, Glycine max
ggagtgaccaaaaccgcagttcttggacttaccaaagctctggctagtgaaatgggccctaatactcgggtgaattgtgttgttcctgggattgtgccaactcactttgttgcactttatacgtcaaatgatgctacaagggaggaacttgaaagaaaggcattgcttggaaggcttggtacaactgaagacatggctgctgtgacagcatttttggcctctgatgatgcttcttacataacaggagaaaatctagtggtttctgggggaatgccttccaggttgtagcttcctgtttcttcttctggtggttgaatggtgggcctaccccccaaaacgttttgtttcctgactcatctgatgccattcaatatagagtggtgcttcatgtacctggtactattggt

SEQ ID NO: 23682 - DNA, 273 bp, Glycine max
tgcactagggttctctttttgttgtttagtcagctatgttagtataaaggtcatgggacggatttgagaaacttttgagagagagttgtgtttgtaaaggttcacttgtcagtgcatgtcaccatttgttgggtaaacagcagatgctgttgttgtgcttgtaatttaatgtacagaacaattggttatggctactgcgtcgacatgaaataggttgtttctgtatgttgtattgatattgattttgcatataataaattcttttaatctttt

SEQ ID NO: 23683 - DNA, 701 bp, Glycine max
ggagcctgatctatcctgggttcaatcccttgtcaaggaatctccgtccgagataaaagagaagttgacaggttctggccctgttgcatctgttgatggaccgagttcaaatccaaagtcaaatccgcaagttgagtctgttgatcattctgttctaggagcctggcttgagcaaatgcagctggatcagcttgtagtctaatcaaatttgacccattccatcttgtgataggtatttaatttcacaacgtattctttttgtcaatttttttgggtggagcaaggagagggaatgtaatgatactgaagcgagggatggctgcaaagtacccgaatgataatctatttttccccccccattattttgtcattcattgttttactaaagagcttcagggggagtggtaagaaaccctctctctggggttgatgatatcccagtaaaaaagaaaatattcttccaaaactctagtttcaggactcttttcttcattttattcctagccatggaaaaaccaagagcctcatatttgtattcaagttcgttttcttggtaggaatctgctagtatattgctatgctattgcatgtatagaagactagagtgtgtttattgttaaggaattagaggtgatctgcgccattaatatttattgccggcagatcgtttagacatactgaaggctactgtgtatgtatcg

SEQ ID NO: 23684 - DNA, 592 bp, Glycine max
ctcgagccgaatcggctcgagggatggcagggcaaagatagtgccggtggccaccaatcagatcttacaggaaacaaagcctgcaggagggtgatcagggggatgggatctatgtgaaagtgatcatggatggagcaccttacctcagaaagattgacttgaaagtctataggggctatcctgaactactcaaagctttagaaaccatgttcaagttgaccataggtgagtactctgaaagagagggttacaagggttctgaatatgcacctacatatgaagacaaacatggtgactggatgctagttggagatgttccatgggacatgtttatgacttcctgcaaaaggctaagagtcatgaaaggctcagaagctagagggttgggttgtggtgtgtgacaaacagttaatttactatggctatgatgaggagattaaatcattctttcatcaattcagttcttggaactaagggattttgaatcaatgcttagctatctgtctatctatcaccatgccaatctgggaggactctaaagtagggatatggaaggactctttctacaagttttgtcaatatttctggttat

SEQ ID NO: 23685 - DNA, 873 bp, Glycine max
ggccctcgaggccaagaattctggaaagttcttccagcagctctcagtcatgtctatgaaagtggtgatgaagatggaaggaaagcagtgaccagactagttgacatatgggaagagaggaaggtttttggttcacgaggtcaaggtcttaaggatgatgtaatgggcaagaatccccttccatctgctagcaatggaaagagttcaaattctatcaagatagtgaagagggatgcccactcagtgagaataaaactggctgttgggggtttgccagagaaaatactaacagcatttcagcccattcttgatcaaatcaatatgtccaatcaactggtttgatggctgggggaattccttatggatacagatcaaatagcctaccacctccacctccacctcctttgccgccacacatggcaataggtttatcaatgcctggcactcaaccagcacagcagcaacagcagtctccaccgggattttacaggccacctggcatagggttttatgggcaaagccacccatcaacaccaccaccagtacctaggcagtgagcattatttcaagatcatctgactacattgttgcaaaaccttgtagcatgttcctctgggaaattgctgtgaaagctgaagattttccacaggctgtgtaataatgtaaattgttatagaattagatgtgaccagaattcatctgtagccttgtacaaccctgccctttttttttttgcctactgcctaaagtctgagtggtaggttttgacatcataatgatacttgagatctacttcagcagtgtcaactgttaaaagaaagcacctcgttggcccttaaataattctgaaacatcacggagcctttgttatgg

SEQ ID NO: 23686 - DNA, 286 bp, Glycine max
tttgcatttcccttatttgtggaaaaagcacgtcatcaattctgtgctgaatggaattattaaatcatagtggcaggatgctatattccacggggctactagatatctgcctattttttttatacatttagttttttttttgggtgcattgatatctgtcttgttagtctgtgttgtaatggcaacttttttttttaatctgccagggtttgatttttttatttatatactatcaatacagtttggtagcagcgcaaattgtttgtaatttatctttagttctatt

SEQ ID NO: 23687 - DNA, 431 bp, Glycine max
tccacgcgtccgcccacgcgtccgcacagaacacgccgagtcgactcagttgctgttcgagtactcgctcttcttcaaggtcgcacgcatggtcgccaacatcgcaatactcgaatccgcattaaccgagagcgggaagctctgcgtgctggatttcgatatcggcgacgggaaccaatacgtgagccttctccacgagctttcggcccggcggaagggcgctccggccgccgtgaagatcgtcgcggtggcggagaacggcgccgacgacgagaggcggaacagcgtgggcgtgttgctggggagacacgcggagaagcttgggattggcttcgaattcaaagtgctgactcggagaatcgccgagttgactcgcgagtcgctgggttgcgacgccgacgagccgctggcggtgaactttgcgtacaagc

SEQ ID NO: 23688 - DNA, 374 bp, Glycine max
agtaacttcaactggtcttgctcctgaaattgcttactttcatactgaggaattttctgaagaaggtcatgatggaggaaataagagctcggaatttgttaatgacatcataataaaacctgctgaccgtcataatcttttgagacctgagaccgtggagtcattgtttgttttgtaccgtatcacagaagatccaaaatatcgggaatggggttggcaaatctttgaagcttttgaaaatcacacaaaggttgatactggtggatattgttctctggacgatgtaactagtgttcctcctcatagaagagacaaaatggagactttctttctaggagaaacacttaagtatttctacttgctttttgcggaca

SEQ ID NO: 23689 - DNA, 301 bp, Glycine max
gtttgttgggggttcaccaaaatgcaaaagttagaccgactatttcccccgttgttttaatgctaggaagtgccccaatttcccttccaaaacccacccatccggcattttttgttggaccaatgaacccaaataatgaagaatttagttttagaagttccaagaatatttccattaccaatgtaccaatatctcccattttgccaagggaatagggattatttttagttcttgaggagaagggattcattaaattaaaatcctaacccttgtctggtatggtaaaaaaaatttccttctt

SEQ ID NO: 23690 - DNA, 449 bp, Glycine max
ttctatgcattcttgacaatggggttgacttcagctttaacaagctggtgcagaagagaaaggtacaatactccgaaagagtagatggcatctttatattttctatgattgattcaataagattaacaaagaagctaaagtggctatgactgtactgagtaaagagaaaactagtttagaacttgcatttggaagccaggggtaggcatctggaggaggcataacacagttatccccattgaaataaattcttctagggaaggcccatcccttatcaaatgtgaaggttgatttgtcttttctaagtaagatttctgactgaacattaccaagagatccagctgaagaaagaaaaagtgccacagatgcatgaatgcatgccacaagaattctgtccttattcaccttggggatagaattttaccccccatatatgtaacacatctttt

SEQ ID NO: 23691 - DNA, 745 bp, Glycine max
catccatcttccgtcacatctggtggttggctcgaagatacttcgctggtcgaaaaatacactatttctgaagaagcctataataagcgaccagacactttcagaaaatataaggagaaatttacatcccagaatactgcaactgcggaggcaaagataccagatgactgtatgggagatctctctgctgatatcaaggtaggatccagatgtgaggttgaacctggggcaaaaaggggtgttgtaaaatttgttggccgggcagaatcactgggtcctggtttctgggttggtgtccaatatgacgaacccttgggcaaacatgatggcatggtcaaaggagtacgctacttcgaatgccctccatctcatggtggaatggttagaccagagaaagtgaaggtcggtgactaccctgaacgagacccctttgaagaagatgaaatatgagtcttcgtgaggaagttgctttcaacgtggagggtttccctttatgtaaatcaaacatctgtttggaaaacttacatttgttgacatttcaaggcagtggatttgtcgaagggtttgattgtggcttttgaattgtttgtgttgtctttagaaaagaaaagcttgtgcaatgtgataaacataaattggaagctcattacaatggtaaaacgagaactaactgggtgggattctactttggagaacattaagatttgtttttagtagagacaccaaaaggaattatatcattttc

SEQ ID NO: 23692 - DNA, 249 bp, Glycine max
gagagaggctggtggtgttcaggttgtattggatctgataggttcaagtgatccagaaacatcaattcaggcggcaatgtttgttaaacttctcttctcaaataatactattcaagagtatgcttctagtgaaacagtcagagcaattactgctgctattgagaaagatttatgggcttctggaactgtgaatgacgagtatctgaaagccttaaattctctatttaccaacttcccaagacttagagc

SEQ ID NO: 23693 - DNA, 1377 bp, Glycine max
cactactctccaatcatgtatttccctcttctcacctaattctttcagcctaacactttccttgagaactctaaccgactgactattttttacccgtttatgtagttattagaggagagaaaagcagaaaggaatatgcagctttgcttcagagacatagggctgctgttattatacaaaagcggatgaaaacagtacttgcaaggaacagaatgaaaagtattaatggtgctgcagttgtcatacaatcatttattcgtggttggttagtcagaagatgctcaggagatataggactatcaaaacctcggggcattaagactaatgagtcagatgaggttctggtgaagtcatctttcctggctgaattacagcgccgggtacttaaggcagaagcttccctgagagagaaagaagaggaaaatgacattcttcaccaacgccttcaacagtatgagaacagatggtctgaatatgaattaaagatgaaatccatggaagaagtatggcagaaacaaatgaggtctctacagtctagcctctctattgcaaagaagagccttgctatggatgattctgaaagaaattcagatgcttctgttaatgcaagtgatgacagggatttcagctgggatgtaggaaccaatcaccggcgccaagaaagcaatggggcaaaatcaatgagtgctggtttgagtgttataagtcggttggctgaagaatttgagcaaaggagtcaagtgtttggtgatgattctaaattcttggtagaggtaaaatctggtcaagttgaagcaagtttgaacccagatagagagcttagaaggttaaaacaaatgtttgaagcttggaaaaaggattatggtgcaagactacgtgaaacaaaggtcattttacataaacttgggagtgaagatggatcgattgagaaagtgaagaaaagttggtggggaagaaggaatagtacaagaataagttgatttatttattttatcttattggggtttggctttggtctatgcactgttttaagggcattgccaactatatatcggaaaatgaggaaaatacaataggaaagatccgataggagtagggcgaataaattactgtttactgtaattaggttagctgttgctagccactcttatgtatgagaaacttctgcacgagttgtggagttagatactcaatacgaaccgtgtgagtcatgtaaatcatcaccccacgccttggtatgtgaattgcatgtaaaaaaaatagcgagtttttcagcattacacgggttgtggatatttctacatttaagtgagatttataaatgtaactgtaaataataataataataataataataaaattattatttttatcatt

SEQ ID NO: 23694 - DNA, 736 bp, Glycine max
cggctcgaggatgatactatcaaacaatgaagactatggggaagagttagttgctgactcctatctcctccctgcagcagctttgggccagaaatcaagcaatgagttaaagaagtatgttttctcatctcccaatcccacagctaagcttggatttggtggcacccaattaggggttcaaccatccccagtggtggcagctttcagctcaagagggccaaatgtgctcacaccaaaaatactcaaaccagacctgattgctccaggagtcaacatcctagctgggtggactggtgcagttggaccaactggcttgactgaagacaccagacatgtggaattcaacatcatttcaggcacttccatgtcctgcccccatgtcactggcttagctgcccttcttaagggcactcacccagaatggagccctgcagctataaggtctgccctcatgaccacagcttacagaacctacaaaaatggccaaaccataaaagatgtcgccaccgggctaccggctacgccatttgattatggggccggacacgttgatccagtggctgcgtttgatcctggccttgtgtatgatacttccgtggatgactacttgagcttcttctgtgccttaaactacagttcctatcaaataaagcttgttgcaagaagagacttcacctgcagcaaaaggaacaattacagagtggaagatctcaattacccatcttttgctgttcct

SEQ ID NO: 23695 - DNA, 287 bp, Glycine max
ctttgattccctgagatttctgcaatctacaaaattcactatgggagtcacaacctttacacaggaatactcctcctctgttgccccatcacgcatgttcaaggccttgattgtagactccagaaatttgcttccaaagctcttacctcagtttgtaaaagatgtgaatgtgatccaaggtgatggtgaagctggaagcattgaacaagttaacttcaatgaagctagccccttcaaatatctgaaacacaggattgatgtgcttgacaaggacaacttggtttcaa

SEQ ID NO: 23696 - DNA, 501 bp, Glycine max
gtgggatttggtgcactggggatccggtttgctaaacgtgccaacgatcccgctagccaaaaaccgatgcagcatcctaagcatcaacgattggcacaaaacatcaacgatttcttctccccagaggttgtgattgagttgttcaaggtttgtagctgtagctgatatgatccatcgataatctagactgcggcttacacaaattcttagatctctttttcctgataacaattcttctcaaatattggctatctctatttccctctcaatccaacaaaataaactgcctctggaaacactcaacgatggtcttttttctgtgaagtttggataccatgttgagctcaaaagatcctctacaggagtcccttctcccagctccattcatggtgatttatggcacaagttgtgaaagattacagtcgtcctgaattttgtgtggagggctcgcaaagacatcctctcggtgatgtccaatctaaaactccaagtttatcatat

SEQ ID NO: 23697 - DNA, 279 bp, Glycine max
attaaatttctctacctaagcgacaactccgtcactggaacatagccggcttctctccctgtttccttggttcagatttcactcaggaacaacaacttaagcggtgtcttagttggtgaaagtttcaagagcttgacgaggttgcaggtggtggatttcagctccaaccaattgagcagtgctgttccctctgtgttcttccagcttccgtcgttgcagcagttgacactgtccttcaacgatttcacgaatctcgaagcgccttataagggaacggaa

SEQ ID NO: 23698 - DNA, 385 bp, Glycine max
aggacattgtctagtccaaatgttccacatggttctccataccttcatcataccaagtctccaaaacctattgggtaaggttaacttttcactgtctttaatttgattgtctattcgttcagttcccacaaattaggccaccagctctacatacagcaactgttgtgtgtctgggagagtttatctgaaacctgatggaattattaaagtcttagtttcactatataatctcaaataaggtaagtgcatgagacagtttaatgttacatagtaatagtagggacatgtcatatacagttttcaagtatgaaactgttattcactgaaattgtttaactcttccaccttgtcttgggtttcgttccttctagaatgtattttttgt

SEQ ID NO: 23699 - DNA, 380 bp, Glycine max
cgagaaccagttgaacggaattttcattttagccgaactttaagtgtcggaaggcttcgtgacagagttctccgtcgatcaacattatctgacctcacctttttccctttgcaacaagagacagagctgagagatgctagcctgcctagccaggatatggacaggcaagcagtggagggaaattcaagagtgtcaccatctgatcatagtaccattaattcttcaacaaatagatatcctccatctagtatgtctaactccatgtttagcatccaagattatgagggtgagacttcaggattgagagaaggtaggtatcaggatctactggagcataggtccaatttccttgaacggagaagaagaatacggtcccaggt

SEQ ID NO: 23700 - DNA, 390 bp, Glycine max
aggacataaaatattattgtcctttgacttgtttcatcaattatagcaaaaatgagaacccattttcactctctcccattgatttttttgttcaccctttcccttctattgggtaaaacccgacccgaccctgatccacttcaagattattgtgtagcagatagcaaaagtgaatttttcattaatggggtgccttgcattgacccagataaagtttcctcctcccattttgtcacatctgctttatcaaaaactggcaacactagcaaccaatttggcttcagtgtcacagccaccaccactgctaatcttcctgggcttaacaccttgggcctggtactggtccgggtcgatatagcgggcaacgggatagtgccacctcactcgcat

SEQ ID NO: 23701 - DNA, 443 bp, Glycine max
tgctagtcaagaaaaaacagaagcaataatcactgagcttcttgtgggtttgaattatgtgtggagatatgctaaggagctcaataaaaaagctctgctagactgtggcagtgatggagtagataatggatactctcaactgaatggataatcaattttcatgaagctcatgtgaggttcatttttcaacaaaagtgcagtccctgacaattgattgggatgaatcttttcagggacaccaaacttctggcttcttaaatctcaacgaatgtgaaacaagtgcagatggagcatgaaagaattacctacatacacttttatttagtgtcagaaatacattcttggtgagaaatgttctttttaaatatttagtattatttttctttgagaagatcctagctgatttaacttggatctctagtctcatctttgaaaagttgttt

SEQ ID NO: 23702 - DNA, 738 bp, Glycine max
caacaaacccctgaggtgattttcacctttgaaacagagcttaaagtcaaaacagaggaattggaaaccaaggaggatatcttcccatggttttcctttccttctccatcaattggatcagaaaacgaggacaacatgttacccgagactatgtttgaaaaccatttcatggaaagcttctctccagtattcttatcaccagcgacttcagaatcaaaccctttctgtttgtcagcgtaccacttggacagcactggactattatgccaaaacatacaaacctcagaatctgatatcactgagatagtttcagccccaacttcagtcaccaagtccccaatcctggatttggatatcttgcttgataaaggggattttgacacggatttccctttcaacattcctgaatttttctcttcataagaacttccctgcagttccacgtagatagttaaagagagagtaagaactaagaacagcatagccatagtctgttccggattaactggtgagtcgtagatcctgactatggaagggtaatcataagtcatgttgataaatcaagacaatgaaacatccctgtcatgcaagtttggagagttttcctgtatgtaatgtaccttcacctaggatgtaatgcgtaaataatttgttgctgtagtctaccgttttcttacttttgtaattggttcattagtcttcttttggttcaagcagggttggaatttctgaaataaa

SEQ ID NO: 23703 - DNA, 288 bp, Glycine max
gtggttccgtgtctgtcagatatttctcaagtgcgaaaatgatgcacatgacattttactggggcaagaaggtgacgatcttgatcgattcatggaagacagattcctggacgagttactttctgagtctactcgcctgcctcgtcgctgccgcgttataccagtacctcgagaatcgtcggattcgcctgaagctcctcgccggcggccggaggccttcgccggggcccggaagatccgcgctcctcttctccggtggggcttcccgggcgaaaggaaatttggggt

SEQ ID NO: 23704 - DNA, 355 bp, Glycine max
ggcaggggaaggttagtcaaaacattggaatttccacacttgaacattgatcgatgacacaactcaacaccctcaaagacaaggtcacaaaaaactcatgaaacgatgtgcttgcccactagcctctttacttctcctagcaatagtaatcgtagttttaatcttcacaatatttcgtgtcaagggccccatgatcacaatgaacagcatcaagatcacaaagctccaactggtcaacaccaccatggtgtcttggtgggggaggacatgtccttagttgcatcgtttaggtatgccaacaccaccacgagtttgtactatcatggtgtcttggtggaggaggctagaggaccac

SEQ ID NO: 23705 - DNA, 316 bp, Glycine max
tctccttccattcttcagtgtttaccggggtttgcggagagaaagagagagcaatgagagagatacagttacccttaagccaaacacagaaggttcgtcttcagaaggctctggaacagttagagtctctgtcaacgaaggtgaattccgatgcttcggtaatcatcgccgattccatccacgtcaaccacgaagatggcgtcctcaagggacacggaaccgccgacctcaacggcgaagtcgtcgccaccctctgcggcgtcgtcgagcgcgtcaacaaacttgtctacgttcgcgcgttacgctccagggcgtg

SEQ ID NO: 23706 - DNA, 541 bp, Glycine max
tctgactcttgggcggacgcgtgggcggacgcgtgggtgctgatgtattggaaaccttccatgtcattgcggaacttccttcagacagctttggtgcctatatcatctcaatggcaacagctccatctgatgtgctttctgtagaacttttacaacgtgaatgtcatgtgaagcagccattaagggttgttccattgtttgaaaaacttgctgatcttgaggctgctcctgctgcggtagcccgcctattctctatagattggtacagagaccgtatcaatgggaaacaagaagttatgatagggtactcggactcgggaaaagatgctggtcgtttctctgcagcatgggcactatacaaggctcaagaagagctcataaaggttgcaaaagagtttggtgttaagctcactatgttccatggcagaggaggaactgtgggaagaggaggaggtcccactcatcttgctatattatctcagccaccggatactattcatggctcacttcaggtaacagtgcaaggtgaagttattgaaca

SEQ ID NO: 23707 - DNA, 571 bp, Glycine max
ctgagttctcgctttttgacacgtgctatgatctttcggggttgtcggaggttaaggttccgaccgtggttctgcattttcggggcgctgacgtgtcgttgccggcggcgaattatctcgttccggtggataatagcgggagcttttgctttgcgttcgccggaacgatgagtgggttgtctattatcgggaacattcagcagcaagggtttcgggtcgtgtttgacttggcgggttctcgggtcgggtttgccccaagaggatgcgcgtgattgaaaaaatgtttaacacatcttttttcctttccccttattttaattattcctttttttttttttttaatttatgtatcttactcttgatgtttttatcgtattatctagtgaaatgctacttacaagttactagtggtacaataagaaatagttagctcgttaaaatgctacaaatttctatgtactgatgttatttttatatatgtactctaaaattgctatttaaaatggagggattaatgagaaaacattgttgtttgagtaaatatcaatccatgaattataaattaagcttt

SEQ ID NO: 23708 - DNA, 447 bp, Glycine max
cctggttatgtggcgttaagagacgcgtttcgggtcggggcttcacatttgaagcgcgcgtctgagttttcgctttttgacacgtgctatgatctttcggggctgtcggaggttaaggttccgaccgtggtactgcattttcggggtgctgacgtgtcactgccggcgtcgaattatctcattccggtggataatgacgggactttttgttttgcgttcgccggaacgatgagtgggttgtctattgttgggaacattcagcagcaagggtttcgggttgtgttcgatttggcgggttctcgggtcggggtttgccccgagagggtgcgcgtgatgggaaccaaacaagtctttcacctttttctttttttaatcacgcgaaattatgtaagattagagaagaagattaatattttaatgggtgatgttttatcatattacctaatg

SEQ ID NO: 23709 - DNA, 429 bp, Glycine max
taggaagtcgtagaagtcggcggtgactctcttcttccggcgcgtttgaggccctccctccgctcacgaccatgatggaggcggaaacaggcgcgtggggcgagatctcgaaggagaaaggtctgaagcctctggatcgggtagcgaggagaggaatatgagatcggaatttggaggttgtagagagagaaatagagggaacgatggtttcagattagggtttggatggtgagatttgatggtcgtcgttggattaatctgggatcagtattgtttgtatcgatttatacacacaacacattaaatcattcttacagtctttggaaagaggaaacggggggaaaagaaatattcgttctgggcaatcgcgagaaaacagactctgttttggaaaattggaagagagagagaatttcagggatcggaaat

SEQ ID NO: 23710 - DNA, 656 bp, Glycine max
agggaacgaagagaaacctgaaaaaagcgataaaaccaaagcgattcatggaaaaaaagaaccggctgaagtactggcgagtcaactcaccgaaaactcggcactgatcacagtaaacagatctggctctggcgacgtcctcctcgacgacgtcgaggcacactaccggcgcgtcggggccctcggtgagctcgccgacgcggaagacgatccgccacgtcagcaggtgcgggatcagcgtcggacggcggcggaagaagcgcgtgcttcgtcagaaaggcgcgcacgttggagcggaacggtccaccggcgaagttctcagcttcggcgagcgacggcgtggggaacgtgaggaagtcgtagaaatcggcggtgactctcttcttcgcggcgcgtttgaggcccttccctccgctcacgaccatgatggaggcggaaacaggcgcgtggtccagcgttggaggcgcgtgaagcaagatctcgacggggaaaggattgaagcctctggatcgggtagcgaggagagaaatacgggatcggagtttggaggttgatagagagagaaagaatgtaaagagagagaaagaaagagagggaacgatggtttcagattagggtttggttatgtgtttttctgtgtggatggtgagatttga

SEQ ID NO: 23711 - DNA, 264 bp, Glycine max
ccttcagaaagaaagaacttgctctgctctctctttgctttgctgcttctccctataatctctctgcaaacttgttcagcaagaaaccactttagaatcagcctaaagttgggttatttcaagcttctgattccaggacgacgacaacaacaacaacaacaaaaagtggttccttttatttttcctcaataaaataccaaatatcttactgtatcaaatataatcacctcctgtgatttatacttttggttcttaatttctccc

SEQ ID NO: 23712 - DNA, 283 bp, Glycine max
agagagaacttgctctgctctctctttgctttgctgcttctccctataatctctctgcaaacttgttcagcaagaaaccactttagactcagcataaagttgggttatttcaagcttctgattccaggacgacaacaacaacaacaacaacaaaaagaagtcattgatttgtgatggaagataaatatagtctaggcaggcagcatagtgggatatggaagtccttgagagatggagactttgatgaagaagaagtttgggacgttttcaagaacagaagtag

SEQ ID NO: 23713 - DNA, 790 bp, Glycine max
  unsure (1)..(790): unsure at all n locations
acgagcttgattgctaaaggcaagccagcaggggttttaatgggacaccttgagggcattacatttattgatactcgaggagatggacgctatttcatttcaaatggtaaagatcaaaccattaaactttgggacatacgcaaaatgtcatccaatgttaccagcaatcctgggtataggagttacgaatgggattacaggtggatggattatccaccccaagcanaagacttgactcacccttgtgatcagtcagtggctacttatagaggccattcggtcttacgcactctcatccgctgctatttctccccagcgtttagcacgggccagaagtacatctatactggatcacacaacgcatgtgtttatatatatgatttggtaagtggcgctcacgtcgcaacgctgaagcaccataaatcacctgcaagagattgtagctggcaccccttccacactacacttgttagctcttcttgggatggagatgttgcgaaatgggaatctgctgggagtggggatacaccaggctcttcaactaagaagagggtatggacaagacatttttatgaacattacctatgatatgtcagtcaaaaaatcagttatgaaaatgatcttgggagatccataccctgttgttaatgaagttgtataggatgttttgacataataaggcatgacatgttcggcctcaaaatcttggtacataaatagccttgtaaattgagattggaattgattcattagtacgctgggcctataataaattattttatattgagcc

SEQ ID NO: 23714 - DNA, 520 bp, Glycine max
ctcgcagcgggtcagccgctccaacccgggggcctggctcattatccgccccgacggagacggcacctggaagccatggggccgccttgaagcctggcgcgagcccaacaactctaacgccgtcggctaccgctttgaagtccttcccggcaccgccgaccccgttaccctagccgcctccaccatcagttcccagcacggtggaaaatttgccatcgatgctacatccggcgttactccggtgaacactccccgcgggagctgggacctcgggtccggttccgggtccggttccaattcggatttcgggttggaaccgaatttcttttataataaggggtttgtgatgtcggcgatggtgagcggagaggggaagtgtagcaagcccgaagtggaggttggggtgcagcacgtgacttgcacggaggatgctgccgctttcgttgctcttgccgcggccttggatttgagtatcgacgcttgcaagttgttctctcagaaactccgaaaggagttgagg

SEQ ID NO: 23715 - DNA, 297 bp, Glycine max
gacactttccagaattccattattctcgaaatcttccattaagcacctttgacttgatacaggttagcaaatatgagtgaagagtctcattctaatgtagaggctatggatctcttacgtcagtttgaggatattcttgaatttgatgctctaattgacgagctgggcttcattcatccatcccaatttgccttgctaaaggaagaatcctacatttcgtctaatttatctgatgaagctatccatcaatcagcagacggggtagtgatctctgaggaatcttccaaacaagacaac

SEQ ID NO: 23716 - DNA, 276 bp, Glycine max
tggaaactcaatcatttaagacatttgtatgcatttggacctatcatgctacgaggccactgttcaggttcaaatgaggttatgttgaatcttcaaaccatctctgccattgtactcgatcgacaaacaatatctctgataaagaaaggaaggtttcccaatcttaaaaaattagggttgcaagtgtcttcaaggtgcaaagacccagttcctgagttgttgcagagcctacaccaattatgtcctttggaagaattacgcatttactcgaaggta

SEQ ID NO: 23717 - DNA, 611 bp, Glycine max
gctgcatatcccatcattgagttacgcagttgcgtctatatgagtcgtaatatgcaatactagaccagcagtgtacgctcacaaaacatctctaaacgcttgtaaagatctccatctcccattgatcctcctgaagtttttgtattcaaccatggctacctatagttggtcaactgagatattttcatttttggttctaacgttgttgtcgacaagcagtcacacaatggttgctggagcacgcaatcttctcgaatcaaccttgtcaaaaccagaagtgccaacacttcccaaacctcatgagttgccaccattgccggaaatccctgaattgcccaagtttgagtcgcctaagatccctgcactcccgaaacctgagcttcctaaggtccctgaactgcctaagcctgacatgcctaaagttcccgagttgcctaaagtcccagaaaggcctaaagttcctaaattgcctaaagcaccagagatgtttaaagtctctgaattgccaaaactagagttgcctaaagtagctgagatatctaagattcttgaattgtctaagcctgagttgcctaagattcctaaattgcctaagattcatgaattgtcta

SEQ ID NO: 23718 - DNA, 296 bp, Glycine max
ttgttcttcaatgagtgaaatcctgagttcgtcgtgagtcagagctagctaccttcacttcactcactctttcactttgtgttagagattcagcagcaactctgcccgcatgcgtgcgtgaggtaaggtaagatgaaaactacttcaaatcaaggttgttgtacacacatatgtaaaatatcttgaattcgaagtgtgaaggatttgctgagtttcccaaagacatgtggtcagcctgttttcggcagaaatgaagaactcccagagcacacaagaattacagtcccgggttaagg

SEQ ID NO: 23719 - DNA, 288 bp, Glycine max
ggaagggaaaaaagaaaagaaaagaaagcagtgaaggagagaaagatgggtaagaaggaagtggcgttgttgttgtttgagatgcgagcctattccggtagaaagggaaccttctctgtacttcttctctttctcctcttgattctaattcttcccatcatttaaagtttcttccttcgttcacactttctcttctcttctcttcttcttctttattcaaagacttcacctttttgttctaaacagagagagcaactcgtttccgattaagggtcttgtttcttttgt

SEQ ID NO: 23720 - DNA, 427 bp, Glycine max
aaccaatcctttttgatctatatcaaaccactatttgtatttgctagaaattatagctgcccattttggaccacttccaacattaacaattttagggatgaagggtaatcaacgaaaaaagaaaaacccctttttgagttatgatacattttttttagaatactaaaaaattatggtctaactgggaggactttaggcaaaccctccaaagcagaaacagagagagtctgtagcttgcaatcagatgaaatgaactgagaattttcctccattgaaattttggcgattaagtgcaacaaaacttggtccaacttttttccattactccagccatgaatttcagccttaacaagcaaaggggctttgcatatcaaatcccacgctggaaagttcttccttggcatcatatagactctctcttttagcc

SEQ ID NO: 23721 - DNA, 435 bp, Glycine max
tgtgaatatgcgtttgcgcacacgtcaatctccccgtcttaattgacctttcctcaatctttcactcttttgtgtcaggtcaaatatgcaacctcaatttagccagattaacatctctgttacatggaggggaaagaaatttgttgtcgagatgaatataggagccaatgtgaaggatctagggcaggaattgcaaaagttaacaaatatcaaagaagataccatgcggttcattgttccacagatttctgccagaacgtcaaaacttctggcccccttttccaaggaacatgcacttttaagtctgcaggaaacttcaattaccgaggccaggtcaattataatgatgggtgtaccaacaaatgaggttgaagaggttttacaaaatgcaaaaacagatttaagaatagctggatttgaggacgaggagaagag

SEQ ID NO: 23722 - DNA, 371 bp, Glycine max
ccgaactgagagaggaaattttgggattgcatggaacaattactgcactggagaaaacattagttgagaaagagtcagagttatccactttacaggaaaagcttcacgaaaaagagagtgaggcttcaggccaaataactgccttcacggcccaaattgataatctcaaacatgatttggtgtccctgcagaatgagaaacatgaattagaacagcagtgtgaaaagctgaagatggagctggattctacaaacaaccggaacgatgagattgaagagcagctgatagctaaagaccgtgagaacaccaaattgagaggggaaattttgggactgcagggaacaataactgcatggaggatgacattagct

SEQ ID NO: 23723 - DNA, 342 bp, Glycine max
ggctcgagcggctcgaggttggtgtaaaatactgttcaagttagtaacattctatgttgtttccacttaccaggagcggagggtgattgcaagacaatattatgaggcacttctatagataattacttcgtaacagtatggcctctagaattattgctatctctggcaggtcttccacgtgtaagcattaagtttctaactttctactgttaatatattgttagtatttaatttcctcatttatgggttatgccctctctgattttaccccaattcaaataattaagcaatatactttgtaatactggttaaaatctattaaaaactataaagttacaagtt

SEQ ID NO: 23724 - DNA, 664 bp, Glycine max
tgggaatgccccaacatgaagattttctcccaaggagacatagaagcggaatcatttatgggaattcaagtctcgttggatccaaatgaagatttgttcttccaccaagatcttaacaacactgtgaagcggaggttccaacaaaatgagttgtttgaagccttggacaacgagagtatttctgataatcttgagctaaaagtggactggcatggtaaagttggtctggaaaacaaatggttggacaatttgatgactttgaagccggacaattgtactctaccaaatgcaattccatctgctactcttcctcattcagagacaacagaagaatttgaagtgcagaatagcatcaaagttcaggaagaaggcacagcagcaatgctaacacaaaagtttgtgtttcctcgtttagagaattggaatagccatgacttgccacagcagttatttccaagtgcacatctcatgaataaggataaaggtaccagtacttcaattaatagtcatcctcttatcttaagtctaaaggttatttctaacccgaaagaattgagactagattggaaacacaatccagcgttattattcgagaagctccatgagttagatgatttcaattttcctcatttgacaaacttagtatattcaacttctagattgt

SEQ ID NO: 23725 - DNA, 437 bp, Glycine max
  unsure (1)..(437): unsure at all n locations
agctcgagcgctctctctaacccatatataattaatgactctagcaagtttcacagaacagatgtatctttgtcttgcatcttctatactggtgattttgtatgtcctcctactagccttggattccccatggaccaacaaaggagtctctttgatgctgcaagattgcaacttccctattcttacagaaagtatatatgtctacaactcagaacaagaagaggaatgaatccctgaaggaaatagatttgagattcagctacctttgtttacttcctttttgttatctgcaatgagtctcaatatttcaatttgcttcttctactcgggactatttatttcattgtatatatatccaattgacttttaattatcatgactntcatgcangcgacgagagnttacgagcacactangcagcattttttatgcttgct

SEQ ID NO: 23726 - DNA, 697 bp, Glycine max
cgtccggatagtttctctctcattttacagtgtctgagaagagaaggcaaaattgagaaccgaccattcctgattggactctaatgaatggctcatcgaaatcttaatcacaagttgacatggcaccatcagaaccgtttgtcaatgtccctgaaaatgaaattccaaaaacagatgagtgtgccatgaaaaaaccacttccacttgcttctcttctctctctgtgttcttttcctcattcatttgttctcactgtagtgctcacgaagcacttcaagatcgaatgcccaccaaagcaaaaccaaatatttctccaaaggccgaatcttttcgccctttataaccaaatcaagaaaccccagatctcgggtatagctggtgatcttgaattttttgttttttgtttttttttaatttcttctcttttctttgaacattacattcccggaaaacggttttccggggaaagaagtgaaggaagggcacaattggggtttggaaaatgcggcgaagagcgacggattttcgcaggccagtgcgtaggagggttcctgatgcgttgtggtgggcattgtgctgtgcagtaattcttctctttgtttatattctgagcaaagggaacaaaattgagtccagaccagctttgtccaagagaacttacaagcatgataagattatggaaggccttaatattact

SEQ ID NO: 23727 - DNA, 253 bp, Glycine max
gccagaagaactatggataggtatcaattcatgaacagcaaggtcctgttcaagacagtgaggaacgatgctagcctcagcaaattgaacccagtaattattcacgtgaattaccaccctgataagcttccccgaatgaaagcaattgtcgaatactacgttaatgggaagcaagaggctctcaaacctttccctgatggctcagattagtaaccttgtatctgcagctgagggtatattttcttggtgtcaa

SEQ ID NO: 23728 - DNA, 471 bp, Glycine max
gtttttcacgtgtcaggcgacatgtttctaagtgttcctaaagctgatgctgcttttcttatgtgggttttgcacgattggtcagacgaagagtgcatccaaatcttaaagaagtgtagggaagccatatcaaattcaaaggaaaacggaagggttattattgtggaggcggtgattgaaggagaaggagaaggagaaggagggaagcatgacggattgaaggatgtgggattgatgctggacatggtaatgatggcgcacactaacttcggcaaagagcgcacactcaaagagtgggaatatgtcatcaaaatggcaggatttagctcatacactgtcaaacccattcatgctgtgcagtccgtcattatggctttctactaaaatatatccaccaaaaattacccttgcaagtttgccactaaaatgcattaaataatttaataaaaaataaaacatattgtgtgatcc

SEQ ID NO: 23729 - DNA, 297 bp, Glycine max
agcttatcaacttttctctctctctctggcgaatatgctttcttggaaagttctcctcgtctccgccgccgtcttgttcgcggcgttaggcctcagagtctctcttccagtcgccgccaccaacctccctcttctttggagtttcttcctcttgtgtttcaagcctccttacctcttcgttgttctcaacgccatcatcatctccatcgtcgcttcttcacggtttcatcactcatcaaaccctcaatctccggagccaactcctccacgtgttgaatccatgcccgctcccaccgt

SEQ ID NO: 23730 - DNA, 514 bp, Glycine max
cggctcgagcacatactaactacccttaatataagttcaaagaaccttatactgaaagggaaagaggtgattgtccactaccttggacctgaaggcgagttggattggatgccagcattcgcagaagtaggacacttgcttaatgggttaggcaatgtacaaatagtgatggtgggaccagaagttccaacaaatttgtcgggtacaacctcaggaattggtagcagagttagagtgaatcttgtgaggggtgtttatcaggtggaagcctcctacctacctactccacatgtcgtcattgctctgaattctagactagcaatctattctagttggggtggagctcttgatgtaatcaaatcaattggggtgcctgccttcttcactgatcaatccgaagtttcgtgtgtaaatgctaaacaagttcttcggaatgctggactgcacatcacacatccagtaactccaaatcctttccggtcacctgtgaaaaatctcacagcttctagcaatc

SEQ ID NO: 23731 - DNA, 270 bp, Glycine max
gctttggcaagactacaaggctaagtatggcactagttaagaggctatgagagctttgtacgatatttttaaaaataagcgagaatgtcgcaatctatttgtagattaatttgtattaagtctatgtgtattcagcagaatggatgttgtacctaactctgatctgtaagccgtgtgtgtgtgccaataattgaaaatgatgattattctactgatggacaagttaaataaagagacgtttagaggatataaaaaaaaaaaaaggggggc

SEQ ID NO: 23732 - DNA, 914 bp, Glycine max
gttggggtcaaaggcaccgcactgaagcgaatctggtaaagcagaaaagcgtagttggtgaaattcctgggatcccccactggacggagtttttgttgctttttctttcattcatctcttacactctacgactactcttccattcccaaacgaaactcagcgtttcttctgatcatggcaagcacgttgcggttatacttgacctgcattcggaacacgctcgaggccgcaatgtgcctccagaactttccctgccaagaagtcgaaaggcataacaagcccgaggttgaactcaaaaccagccctgaactcctgctcaatccggttttgatatgccgaaatgaggccgaaaaatgcttaatagaaacatctatcaattcattgcggataagtctcaaggtgaagcaggctgatgaacttgaaaacatactgaccaaaaaatttctaagatttctgtccatgagagccgaggctttccaagtcctgaggagaaagcctgttcagggatatgacattagcttccttataacaaattaccactgtgaggagatgcagaagcacaaacttattgactttattgtgcaatttatggaggacattgataaagagataagcgagctcaaaatgtcggtgaacacaagggggaggcttgtagctacagaatttctgaagcagtttatctgatgctttagactagttagaacttccatatccgtgtaaattgtactattgcaggtctagttttcacttcacttatgaagtgcttggtcctttgagccaatggtttgtgtttttattatatttaacagaagtgcagaataaattttgtagtttagtacagtatgtaaagaaagatatgacaaacctgcatgtgacgcggagaaaatgaagctacagaagctagcagttagcac

SEQ ID NO: 23733 - DNA, 406 bp, Glycine max
ggcacaccgcaccgaagcgaatctagcgtagttggtgaaattcctgtgccccactggacggagtttttgttgcttttttctctcattcatggccttaatcctctcttacactctacgactactcttccattctatcgtcactcattcccaaacgaaacgaaacgcagcgtttcttcagattcagacccaaactcatggcaaatacgttgcggttatacttgacctgcattcggaacacgctcgaggccgcaatgtgcctccagaactttccgtgtcaagaagtcgaaaggcataacaagcccgaggttgaactcaagaccagccccgaactcctgctcaatcccgttttgatatgccgaaatgaggctgaaaaatgcttaatagaaacatctatcaattcattgcg

SEQ ID NO: 23734 - DNA, 451 bp, Glycine max
gaaggtgaaggttaggttgggttgttagagacaagggtggaacgcattcaattgaatttgggatagtcttaagaagaaatgattgtgttatgctttgaggagttatagcaactattcaatggcccttttctttgttgctgtgtaaatggaagcagctgttattgcacgattttttcaagtatatcagatatttgctggggattaagtgaaaaagactcaatggtaaaaccaaaagtgtctactcaaccaaaaatatgctacaggcctattcgaccttctgacctggacatttttgagcatatccatggcagattatttcccatcaggtacgaatctacttttttccatgatgtggtaaatggacgtgacattgtgtcatggggagctgttgacagcagtcggccggatggtcaaagtgatgaactcattggatttgtaacagcaaggattg

SEQ ID NO: 23735 - DNA, 138 bp, Glycine max
atgttattcaattcaatttatttttactgtatagtttaatcaatttgttggggaagccatgtactatacccgagagatcaatttgtgtttccctgtaactcgaaatttgaaatagtaatattcttcttattgctgatt

SEQ ID NO: 23736 - DNA, 661 bp, Glycine max
aaacaatatagacttcctttcattatcatacaaaaggtacgctgaagatgttcgacatgctcgtgagtttctctctagactaggtaacctcaaacagacccagatatttgcaaagattgaaaacatagaggggttgacacattttgatgagatattgcgagaagcggatggtatcatcctctcacgtggaaatttggggatagatcttccacccgagaaggtgtttttatttcaaaaagcagctatttacaaatgtaacatggctgggaaacctgctgttgtcacacgtgttgtggatactatgaccgataacctaagacctactcgtgctgaagcaactgatgttgccaatgcagtgttggatggcagtgatgcaattgttcttggggcagaaactttgcgggggttataccctgtagagactatttccactgttggaaaaatttgtgctgaggcagatacagcctataatcaagatttgtagttcaagaaggctgtcaaatttgctggagagccgatgactcatttggaatcaatagcttgctctgcagtacgggcagccatcaacgttaaggcatctgttatcattcgcttcacatcatctggcagtgctgcaaggtcgactgctaagtaccgtgcaatcatgcctgtcgaatccgtt

SEQ ID NO: 23737 - DNA, 477 bp, Glycine max
gccgtcagtgccaccaacaccgctgccatccaccgggatccagtgaactcgcaaatctcaaccacaataccacaactgcagaccgccgcgctcgacccagatccagatcttccgctgtggggacactgatttagaaagcttcgctgcatcttccgcatcacaacccaccgattgggttcctgattcattgtcgccgcccgccttcgtgaatacgatttccgaccttcgtgattgatcaggcattggagtttggattttaaaaacgtgctatctttctacttctttggcattggttctgtttctggatgttgcgactctagttctggttcaagcgttctgtttctgcttttgatgacaattcttgattgcaatctgtgtggttctcctagttggtttgggattggcgattattgatttcaagagattttgctatagttcttctgttcaggatgtgttggtatcccttgcaggtgtttg

SEQ ID NO: 23738 - DNA, 639 bp, Glycine max
agatcgaatacagaataacaaaaacgttccttttgcccagttgacatgccccagcaacactcgtatatctgctgtgaagtttgctagctttggaaccccctctgggtcatgtggatcttacctcaagggagattgccatgatcccaattctagcacaattgttgagaaggcatgcctaaacaaaaacgactgtgtcataaaattaactgaagagaatttcaaaaccaacttgtgtcctggtttatcaaggaaacttgcagtggaagcagtctgtagttgattaataaactaacgtactccggtgccagagactcgtcactttgtgactgctgttgattaattttactgtcgattccggaggaacattgcatctcaccatttattttaccagcttggctacattcaaaaaagcagaagaaaattttgcatatattaatattaatattatcagcaaggtctctaatgtacaaatataatttatggcagagaaatctgctgtaaatacgatatctattaatcaatttggctttcacatgggtgtgttagccactgagaatcaatgcattttattcacacgacgctctgaaacaacctttgtggtaacgttttgattcattattcatatgaggagttaacttt

SEQ ID NO: 23739 - DNA, 218 bp, Glycine max
ctctaatgtataatttatggcagataccttgctgacaatattcatattaattaatacatgcaaaattttcatatgcttttttgatgtagccaagctggtaaaataaatggtgagatgcaaattttgcatgtattaattaatatgaatattgtcagcaaggtctctaatgtataatttatggcagagaattctgctgcaaatgcgttatctattacaac

SEQ ID NO: 23740 - DNA, 590 bp, Glycine max
tacttacttacttacttacttactctcatttaccaattaaaaatgccttcactagttgcggaggcattcgaagccaagggcgcagaacccttgagcctgaagcccattttcagtgcctcaggcgtcaagggcaagcgagtaactgcactatcagcagaagcaaatgccctcactgatttcattcaagcaatcatagctgacaaaccagacatcgactctccattcagcgtcctcgatttgggcgtcgtaatgggcctcatggacaaatgggcctgcaagctccccacggtccagcccttctacgccgtcaagtgcaacccaaacctctccctcatcggcgcgctcgctgcactcggctccagcttcgactgcgccagcaaagccgagatcgaatctgtcttgtccctcggagtctcaccggacagaatcatctacgcaaacccatgcaaatccgagtcccacatcagatacgccgccctccgtagtgtcaacgtcacaacctacgactccctcgacgaggtcgagaagattgcaattgccaccccatatgcgagttgctcctccgcattaaacgcccgcaagacagtgga

SEQ ID NO: 23741 - DNA, 590 bp, Glycine max
gtaagtgccgagtttccctcaagtgtaacagctaacactatcaaagtgcagatgccactaccaaaatgtacctccagagttagttttgagctggaacctggagctgtaggacaaacaactgattttaaggaagcaaataagaggctagaatggagtgtgctccgatcccccgacgatctttcttaggaatctcacgttaatataccaaaagaatcaggacctgtgagcatgacatttactataccaatgcataacgtttcacggcttcaggtaaagtatttgcagatagcaaagaaatctgcaacgcatgaaccataccggtgggttagatatgttacacaggcgaattcctacgtcgctcgtatatgatgccgttaagaacactgtcccctcccccgctctttgttgttctattttgttttcctgctcttattgctctttacacacatgctttgtttatttactttattcttcatttgtaaattacactctaagtttacattctaagtcgaatatagatgacgttttcagtttgcctgatttatcattcattacacaatagcaagctggtcataaaacctcgatgaatt

SEQ ID NO: 23742 - DNA, 300 bp, Glycine max
ctgcaatacaaaaatttcagtgttgtttcaatctccgtgatcatcattttgtcatcaacttctcggtacaggccacagacaaaccatggtttcagagaatgatgagatgcctattggatggccattcggtcttggcttcttgaatatgagatttagagatgcagagtccctcccagctgccccagtagagccacactcaatgcacattccatccaccagtttttcctcattctcatcctccaaccttgacactgagtccacagcatctttctttcaagacaacagtgtatcccttggcca

SEQ ID NO: 23743 - DNA, 368 bp, Glycine max
gacctcggcacaaactaacagagcattagcatttctccttcgtatcgctgccgcgacccttctgggtctggattccgacggtgccattgacaaccaccacctttactggtaagatgggagagctggccactgagaaacatgttcgatatatattatcagttgaaaagaggaaagataactttgaatctgtcgtaatggagcatctgagaatgaatggggcatactggggattgaccactctggatcttctaggaaagcttcattccgtcgatgttgatgaggttgtttcgtggttgatgagttgtcagcatgactcagggggatttggtggaaatgttgaacatgatccgcacatcctctatacacta

SEQ ID NO: 23744 - DNA, 489 bp, Glycine max
ctcgagccggtaacccttccatccatgtttatgtttatccactgatgaaagggaaagggtagttgggtgtgtctttgttgcaatcacagctcctttgcttcctttttttcgcattcacgcaatcaaattcaaattcgctgaaacccttcaacacaaccaatggcttcttctctcagtctctccactccccctctctgtcaccctagggtatgtaaacatttcaaaccgtacaatgggttgcataagttctcattcaatggacatgggtcggattttgccgttgtccgacacaactctaaagtccccaatgctggtggtagaattagagctacattgacctctggaggaggaggagacctaggatcttatctgaagagctctggttttgtgaccaatcatttcagaactggggcacagcttgatgtcatagcatttggaacactgagagcagacacagcagtgccagcaggcagtggtttttctgatgat

SEQ ID NO: 23745 - DNA, 499 bp, Glycine max
cacagccgggattccagaagttttaacgaggttggatgcagcaccatcttccattgggagattcaacgccagagtatgaaagctaggaaatgggaagtgaattttgccccaccttaatcatggtgatgagtcaaatttctgttcctctcagccgtggacagcttctcgttctttctcactgaagactccttttggtttttccagagggtagaaatgtgaatatgggttgaagcctgacaaattcttacaaaaccttgtatttcatttttagtttcacaacagagtggttctttgatgtaaaaattgcataatgctactcatgcaccccccaatagtgaaataaaatgcaaattgtctcggcctgtgatccatatagatattctataaaaattctcgggcctttattttttattgtttttcattttcccgggctgacaactgattgggtcagtgccaatggttccagaaaaataaaatgatacaattctttgcccccagt

SEQ ID NO: 23746 - DNA, 430 bp, Glycine max
cgcgtttcccagtagcgcagctgggttgaccacaaaataattgtgtggtaagaagaggtagaagtagaagaaagaagcaccactttctctttctcttcctatatattcctctcttcacaacacacattgtggcatgaacattgaccagtgttgacaatatggaaagctccagagagttggcagcaccactgctagtgctgagaaagagtggcgagcaagagaataataatggggtggagagtacattttgccaagagttcaagagggtaagctccatggcggctccaatggtggctgtcacggtgtcgcagtaccttctacaagttgtgtctttgatgatggtgggacatcttgggatactggtctccttctctggagttgctattgctacctcttttgctgaagtcaccggatttagtgtccttttggg

SEQ ID NO: 23747 - DNA, 488 bp, Glycine max
taagtgtagggcttgatgaaatggattcaattttctcatctatattcatggaagagctgttgggttgattaattcttgccatgaaaagttgtaggctgattgccgttccagtactacctggcgcctgcattctctagtgtcagagtattggatgcttttattgctaatgttgttgtaaaaagtgtatgatggaaaacattgggaagggtatgacatagatcggcatggagtcttggaggtaggcagatacctgagacccttattaaacacattcctattgattgcacagatagaatggtttacatgaacttcttaaagttgcaattacatggggtaattgaccccgtttagctcttacataaaattttgtaggcaacaaattattaaatagtatttgtatgttatttgatttatatgacacgaaaacagttgcatctatatttgcatgcaacgtgagaatactatgttaaatcaattgtggtaactat

SEQ ID NO: 23748 - DNA, 463 bp, Glycine max
tcgaagacataaagtatcgtgtatatttggccatggttacgcacttagcttatgtcaatgacctgagtatttcaaccacggtgggagaaatttgcgtcgactgtcggacgtgattgatgaaaccctgcagattcaaagcaaagttgtcataatatcaccttcaacgagtagaggtttggatcaccagaaaaaggctttatgaccttgtcagcgcgattccttttaccagataattttgctgttttaatctgcggcttatatcttttgatgtcaagatgatatcatttgaattttgaagagcgagtttttcggtatacgattactgatgtgggtagatcagaaaaaggtcattacttttttatgttataatgtgtaacattagaaatttcacataagtttaatatattatacaactttttctcataattatttaccctgtcggcgagtaaaattttccccatgt

SEQ ID NO: 23749 - DNA, 368 bp, Glycine max
tgcatgttcatggcacccatgagagacattggctctgataatggagctccacaaaagaagattgtgtagtccctcaaaaggaaggattgcatcaaacactttgccagcgtcagagagaaagtcaaagtgggtgtaaacggctatgagcttggtggccaagaagagcaaactatgcgcagtggtgaaaaccaactgagagtgaagttagagagcttgttggagagtgaggcaatattgaaaaaaagtgttgaaggagtcattaagttcatcactatgggtgactaagaatggttgcatgtggatgtgggtggttgaacgagagatgataaaaatgggttggaatcgttaaaagagtttgcagaagcgct

SEQ ID NO: 23750 - DNA, 329 bp, Glycine max
gtgagtcttgtgaggtctaaggatgaagcagttcaggtgagttctgttgagttgattcagaacattgcctctggtgatgagttggttaggcagatggtgattaaagaaggagggattcgtgttcttttgcgtgttttggatcctaagtggtcttgttcgtcaaaaacaagagaggttgtgatgaggggtattgataatctgtgtttttcttcgcgtagttgtgttagtgttttgctgagttatggctttgtggatcaattgatgtattatgtgagaaatggggaggctttgattcaggagttggcactgaaggtggcgtttagattctg

SEQ ID NO: 23751 - DNA, 713 bp, Glycine max
gttttgagacgccgtttccacgaccttgcgattcagcgcagcattgaaggcgattttttactagcatggcagcaataatgttgacgactatgaatattcctctgcacacttcggtttgggttaattcccggcggaagagttggtgctgctacgcctcactttcgcagccagacaggaaggagatccgtctcggtttgcccagcaaaggtcgcatgtccgctgacaccctcgaacttctcaagaattgtcaattgtcagtgaagcaggtcaatcctcgtcagtatgttgctgaaattcctcagctatccaacctcgaagtttggtttcagaggcccaaagacatcacaagaaaattgttatctggagatcttgaccttggtattgttggactcgatactttcagtgaacatggccagggtagtgaagatcttatcattgtccacgaggctctggagtatggtgattgccgtttatcccttgcgattccccaatatggaatatttgaaaatgtaaattcactggacgagcttgcaaaaatgcctcaatggacagaagaaaagcctctacgagttgctactggtttcacctacctggggcctaaatttatgacagcgaatggacttaagcatgtcacattttcaactgctgatggagcactggaggcagctcctgcgatggggatagctgatgctatcttggaccttgtaagtagt

SEQ ID NO: 23752 - DNA, 453 bp, Glycine max
aaaaaaactagtaaaggttgttttagtattggagagaggacatagttgtcgacaaacacaaacagtgtagcttagcaaatctgtgtttgttgtgagcgacgactcttgtgcgagtgaaagcagcagcaataatgttgacgacgatgaatcttcctctgcacacttcggtttgggtaaagtcccggcggagttggtgttgctacgcctcactttcgcagcccgataggaaagagatccgtctcggtttgcccagcaaaggtcgcatgtccgctgacaccctccaacttctccagaattgtcaattgtcagtgaagcaggtcaatcctcgacagtatgttgctgaaattcctcagctatccaacctcgacgtttggtttcagaggcccaaagacatagtaagaaaattgttatctggagatcttgaccttggtattgtgggactcgatactttca

SEQ ID NO: 23753 - DNA, 341 bp, Glycine max
gggtttaaaatatagcctatttgatatcacacaagcatcattgttgagaccagatggtcacccaagtaaatatgggcattggcctaatgaaaatgtgacactgtacaatgattgtgtgcattggtgcttacctgggcctatagacacatggagcgatttcttactaggaatgttgaaaatggagggtgtgagatcagctgaagagaggcttcatttgcattcaaattgaccaatgaaattgattgcatacatttatcaattttttacgtaatcctgcctgtaattgtaaacttccttgcgtgcattgtaaatctttttttaattgagatcaaattcgtttc

SEQ ID NO: 23754 - DNA, 375 bp, Glycine max
gtagtaactcggaatcggtcgacggacaaaagaagagtttcaagacaaacaagctttaacactcttgatctgaacatgaaagctgatgaaggggataaagcaggagatagtagccccatttcaagtgatcagaccggagaaactatagctgatccactgaaccaaaacggatttcttgactcaattgtgaaccggtttgagttcaacacaaatccagttaaggacagagagatggcagagttgtttttgtgtaagttcaaagagtcttttgaagaggtttatgggaagaaatgtttggagaatctaagtgtagatgagagggtgattgaggatgtgggtgttgggtgtggttattttaccaacagctttgttgag

SEQ ID NO: 23755 - DNA, 525 bp, Glycine max
gcttgcatcaatttggcgctctcaactcgctgctgctcctcccaaaaacccttgctgttgctggggaaccatgagcaagtctccgcgcagagatctgcaagtcttcgatttcaacgaagaggatgaggtcgcctccgataaacaccacgatttcctcgctcgcgatgcccaggtcaacaaggttggcatcaagagtgttgccagtatttctcatgttgatgttgatgtagctggtgctatgtttaatttggaaaagggtggttctgacacctctcctgactcagtggaagatatatatgatagtaaagagaatagttctgtgttggaagctgacaaacaatcaaatttgattagtcatgaaagtcgtcatcattttaaaatagatattcataaccataacaaactagagaaaatggatacaagtggcgaagtatcttcacctgaaacaagccaggttgacccttcagggtcctcatttttttgtacagccccttcagggtcttcatacagtaatgaatcaattga

SEQ ID NO: 23756 - DNA, 337 bp, Glycine max
cgcgtggggaaccttgacgccctgatcgggcgactcagggcggcttacgaggataacggaggccgccctgagtctaacccgttcggcgccagggccgtcagaatttacctcagggaggtaagagaaggtcaggctaaagcaagagggatcccttatcagaagaagaagcggaagaggaccaccgtggtgatggtgagtagtggtggtggtggtagtagcggtgcagttgcctctccgagtggcggtggtgataccgctattggtggtggagctggttctagtgctagtttaacttcttcagcaactgccacagctaatgatactacaaccacagtat

SEQ ID NO: 23757 - DNA, 665 bp, Glycine max
ctaccaatggcatgcggcatgcggcatgcgactgtcgtaaaccacacttctgttgttgtgctatcaaatttgatccttttcgttggcatcattaacgttttccctcctcactctctctcctcctctaaaatcactatacggttgtaccattcaaattaaagattgttcgaactgcagagtaaactgcagtatagagctaataatcctcagatcaacgaaaaaaagagttcttgtaggtttcattgtcatggagctgaattcacagaagagaccattttcaatcaaattatggcctcctagtcagaacactaggcagacccttgtggagaggatgaccaacaatctgactactaaatctcttttcacacagaagtatggatctttggacaaggaagaggctgaagagaatgcaaagaggattgaggatgtggcttttgctactgcgaatctacactatgagaaagagccagatggtgatggaggttctgcagtccagctttatgccaaagaatgtagtaagctcctcctagatgttcttaaaagaggacctagtaaaaaggatgatgaagaagtggtggcatctgttaatactactgcacctcatgaatctgtttttgatatatcgaaaggccaaagggccttcattgaagcagatgaggcgcaca

SEQ ID NO: 23758 - DNA, 273 bp, Glycine max
gaatcggctcgagcaagatggctgttgggagggctgtggatttaacacgatttgatggatatgaggatcttctcaggaacgtggaagatatgtttaacatcaagactgagctctgtgggtccctaaaaaaatggcaagttgtctacactgataatgaagatgatatgatgatggttggagacgatccgtgggatgagttctgtagtgttgtgaggaaaattttcatctacacagcagaggaggtgaagaagctttcaccgaaaataagacttc

SEQ ID NO: 23759 - DNA, 258 bp, Glycine max
ctcgagcgaaaatttcccgttgtttggtttggtaaaggcaaagggcactgcgttgacggtcgaaattctgggcgcgcattagagagaaaaaagggtttgtatttgagaactgagaagtggggaagatggatttggacggtgatgataatgataatgacatcttcagagacgacgaagatgatcctcaagctcaactctctctcctcgaaaacgagtcgagcaaagaatatgtggtttaccttgtcgatgcttcaccta

SEQ ID NO: 23760 - DNA, 446 bp, Glycine max
aggagcgctgacccctcaattgtgcctgcagtgtttgatggtgattacacttcatcagtgaacggtcattcccaatatgagaaaagaagtgaacgaattctcattgacgattccttcatgatacagggtcaattagtagataatgatcgttctgactcacaatggaagacggacttaagtatggttgcagatctatctgctgccaagaagcttgaaagtgatgcagcagctgcttcaaatgagaagaaccaggagccaagtgacctctttgtagttctaaaacgggattctggattggactctgttgaggcctcacggacaatggactatgaaatcgacttttccttctcggagactaatagaagatcctccattgatgattctcatgaaaaggtgaatgacagccttcctgttagtcctgcgaaaaccaaagtttctggaacaag

SEQ ID NO: 23761 - DNA, 360 bp, Glycine max
tgagagagagagaagagggtgtgagatatgcaacgtttcagcaacacggtgataggattcttgaactttttcacgctcttggcatcaatacccatcataggtgcgggtctatggatggcaaggagcaccacaacatgtgaaaatttcttccaaaccccacttttggtgataggctttgttgtgcttgtgatttcgctagcgggtttcataggggcatgttttcatgtggcatgggcattgtgggtgtacttggtgatcatggtgttcattatagctgccctcttagggtttgccgtttttggctttgttgtgacggaacagggtgggggagtggaagtgcctggtaaggcttacaaagag

SEQ ID NO: 23762 - DNA, 465 bp, Glycine max
cgacagaagggggaccatatacaatcttagtcttcttcttcttcgtgcgtcaacccgccatggatcatgtcatcaattggatttcccttgcgtcttctctgtcagagttccaacccactatcgatcggatcgtcaatgggattgtgtcccagacaagttgtttagcgacaaagattaatctaatagttgaaaaattcactgggcataaatttagcggtatgagtaacactagtgttgaaaattacgcccttctcattgattgcttattcttcttctttaggggttcaagctttcttcacagtcttcaacacaccaaggatcttgttatcaacaggggttcaagctttcttcacaatcttcaacacaccatgaatcctgtcgtcaatgagttggtgtccctgataagaagtttagtgacaaagattaatggagatttgttgttgcgtgttgctggtgctgttggtg

SEQ ID NO: 23763 - DNA, 316 bp, Glycine max
gagttcccttgcgtcttctctgtcagagttccaacccactatcgatcgggtcgtcaatgggatcgtgtcccactctagttcgttagcgacaaagattaatctaatagttgaaaaattcactgggcataaatttagcggtatgagtaacactagtgttgaaaattacgcccttctcattgattggggttcaagctttcttcacagtcttcaacacaccaaggatctggttatcaacaggggttcaagatttcttcacaatcttcaacacacgatgaatcctgtcgtcaatgaattggtgtcctgataagaatttagt

SEQ ID NO: 23764 - DNA, 1257 bp, Glycine max
agtctcaacgaagggagaagggacttcttctggcagaaatggtcttataaggttggtcttaaggtgacatcttgagtcttcactctcttggtggaagttcctcagtggagtggattcagggatctttagtttctcaaaggcagccattgacttggtacaaaacaacatttgacgcgccagctgggactgcaccattggctttagacatgaacagcatgggcaaaggtcaagtgtggttaaatggacagaatcttggccgctactggcctgcttataaagcatctggtacttgtgattactgtgactatgctggaacttataacgagaataaatgcagaagtaactgtggcgaggcttctcaaagatggtatcacgttcctcaatcatggctaaagccaacaggaaatttattggttgtgtttgaagagctaggtggagacctcaatggaatctctttggttagaagggatatagatagtgtatgtgcagatatttatgagtggcagccaaatcttataagctatcagatgcaaacttctggcaaagcacctgttagaccaaaagttcatttatcttgtagccctggacagaaaatctcatcaatcaaatttgctagctttggtactccagtaggttcttgtggaaacttccatgaaggaagctgtcatgctcacatgtcttatgatgcctttgaaaggaattgtgttggacagaactggtgcacagtaacagtgtcacctgaaaattttggaggagatccatgtccaaatgtcttgaagaaactctcagtggaagctatttgttcctgatcattttaacctcagaaaataaatagattaaactctccagattgatttttcccaccactattcatttcaatacagttcttttgggtcaaccaaagtctacacttctgaatctgatcaacacgagcattattattttggctttaccaaggtgaagttgcagaaaacacaacacaccatatggttgaaagcctgtaaagattgctgagatgattgtggatatgtgtatatacttgtgttctgcatgttatacagaggtgaaaggtgatgatttgcttggtgcactatgagacgatactgaattgagtccatgtgctagtgttttagacttaggtgtggaagcctcttgcttcctgtaatattagttttcccttgtaagctgcattcatagtgatttagtttctttcttcctgtaagaaacttctcaagatgataaagatcagattcagtc

SEQ ID NO: 23765 - DNA, 185 bp, Glycine max
agaatttgttgttttcaaagaaacacattttaacgtaatttctctctcagtttctttgaaaacaacaaattctatttaggttgttatgaaagaaactgagagagaaattacgttaaaatgtgtttctgaatttgatttacttcttgcttctagtatatcattattttttcttgctggaaggctat

SEQ ID NO: 23766 - DNA, 430 bp, Glycine max
cgcaagggcttgttcgatttcattgtcttgtttgtctcgctgatcggaggaacataaacaataaacaatcctaaacgcacagcacaatcgcaattcgccgaatcctaaacgcagcgtttcgcgctaaatgcttctcaacagtgtgcgctagctagtttgctaagactcactggcgccatggctctttcactcggcaagctcgtcattctcgtcagcgcaggaattgctggttcagtaattgcagaagaagggcgtctgccagatgtctctggtctcgcctctggtgcttttaagggtgttttgaggcaacttaaaagcgatgatcctgctccaactgttaaaaagcagccgcataatgatgctttgttggctcaggtaaacagtcttcggcaggaactgcaacttcttgctagagatagatcgatcacta

SEQ ID NO: 23767 - DNA, 293 bp, Glycine max
gggagcaccgcaatcgcaagggtttgttcgatttcattgtcttctttgtctcgctggtcaattctcaccagtgcccaaacataaacaatctcaacgcacaatcgcacatagcctaatcctaaacgcatcgtttcgcgctaaatgcttcgcaacagagtgcgctagcttgtttgctcagactcactggcgccatggctctttcactcggcaagctcttcattctcgtcggcgcaggtatagctggttcagtaattgcaaaagaagggcgtctgccagatgtctctggtctcgcc

SEQ ID NO: 23768 - DNA, 489 bp, Glycine max
tttatttcacttgctcaaaacgtctgagctcgtctcaccctctcacgcagcatttccctgcttaaaccctccagcagcctccaaacaaaaaccctaattcactaaccccatttcaaatcccaatcacgtttccgatcaatcatcaccttctccataatctctccgttcgcgtcgcaaatcgagcgagatagtgtcgagtcgaaccaacgatcgagaagatatagaagatggagttttgccccagttgtggtaacatgctacagtatgaattgccttatatgggtcgcccttcaagatttttttgttctgcttgcccatatgtttgccacattgagaatagggttgagatcaaaagaaagcaaaggttggtgagaaaagagatagagcctatattctccgaggatgacatgacaaatgcaccatcaactgaagcgacgtgcccattttgcggtcatggtaaagctgctttcaaagaatttcagactcgat

SEQ ID NO: 23769 - DNA, 325 bp, Glycine max
aagaggttatgcctggctactttgcctttattggaatacagaatccctcacatgaaaaactggagcaagtacactcaccctatttcaagatcaatgaagatgtgcttccttatggggctgcacttcatgcctcattagctgttagttatcttctaaaacatccgcaggatgtaccgtctgcagaggggaaacatcatgatgaattgtaataggactgttatttttttaatagaaaaacagggctgttaatttttttattaattttttttatgaaacagggctgttataattgttaaaataaaaggcaatatatattggttcttgt

SEQ ID NO: 23770 - DNA, 261 bp, Glycine max
gtgactgtgaaaaggaaagaaaatcaaagtaataataaattgtctgaaaaaagctacaaaccttatcatcggatttcaaggcatgaattagtacatagctttcttcatccctgtacccaatagaaaaattacagcatgtaaccattcgagtatacgctattgtagtataaatagagaacttgtgaccatagctttcttcatcacaacatcatagtcagcactatagtaaaaaaaggacattcattcatctatggctaccct

SEQ ID NO: 23771 - DNA, 344 bp, Glycine max
cggatcggtcgacaaaatctgaagaacttggaagatagccactctagacgcacgcgattttcctactgcgctgaaggtagcacatgaataatctttagctgctttgaaatccggtagtcacctgtttggaaggtcacaagattgactttgtaaaacttcttcctgggtggcaacttaagaataagattacgaacttggagaaagatattggtgatgccaataaaaaaattgaagagaagtcaatgctcaagagctcagtggatagcaacaattcttctaacaagatgaagattccagaggctttacgaacaaggttcactgggaaagatgcatctgtgctatca

SEQ ID NO: 23772 - DNA, 466 bp, Glycine max
gattaacatagtgtgttgattttgggattgatgcttgcggtgtcacctttgaggagcaatatcaaagatgaaaagaagcaaggagagatggagggtaatttctcactggcaacaacatcaaccgatgatgttgtctttggtgacctttctgaagggaacttgttggagagcatcaacttcgacgaactcttcgtcggcatcgacatccacggcgatgtcttgccggacttggagatgttcggcgagttctccgtggatgtcagcaccggcgaggaatcgtcggagatgaactcgtcggctaaaagcagcaaacttgagaacgatcagaatgtcatcgccactacttcaaagaaagaagaggaagaagataaaacttcttgcaatgcttctggtcaagacttggggtcaaaccgtggagaggagattgtgagcgagagagatgaatccgtggtggtgaatccagcac

SEQ ID NO: 23773 - DNA, 323 bp, Glycine max
attcaaagcttgaagtgccagaaggccctcaattgccagaaagatgccgctttggagattcaacgctttataagggggcatttaactcggaatcagctattaggttccaagtcacacacagttactcctattagttgcatttcaagaccatttggctttcgtagttttcaactggaactattcttgttttcggttgtgaaattgcaacggtggtggaagggtctcttgttgcttaaactaaagaataaatcagccatcattattcagtcatgtacacgtgggtggatagctaggcgaaaggctactgttttcagacaccatgt

SEQ ID NO: 23774 - DNA, 675 bp, Glycine max
  unsure (1)..(675): unsure at all n locations
ctcggagatcggctcgacataataaattcagtgatcctattcctgcccacaatcatgattctgttttgagtgttttccttgtagcatcaaattgttcattcttcagatttgactcttgaaactcaacaaaaaagaagagctagaaaccatggtaaaggatagaaaggttggtgttgcattggacttctccaatagcagcaagattgctctcaaatgggccatcgaaaacttggctgataaatgccacaccttttacatcatccacgtcaatcccaattcttctgatgatcgtaaccagttgtgggcaaaatctggttctcctcttattcctttgacagagttcagagaggaagagattatgaagcactatggcgtacaaaatgatgcagaggttcttcgatttgcttgacactgcctgcaggcaaaagagtcaccgtnngtggtgaaaatgacttgggggggaatgtaagaaaagaaacttctagattcattggggaagaatctgagctaactttttttggctgggaagcccgnaggggctgggacaattaaaggatattttggggnnnanagggttgcaaccttttccggaagaactaatgcctcttgccccagggccttttttaaggagttgcccnaaannnngggnnnnnnngtgttctttttgtgggggaa

SEQ ID NO: 23775 - DNA, 448 bp, Glycine max
aaaacttggctgataaaggccagaccttgtacatcatccacgtcaaccctaattcttctgatgatcgtaaccagttgtgggtcaaatctggttctcctcttgttcctttgacagagttcagagatgcagaggttacgaagcactatggcgtgcaaactgatgcagaggttcttgatttgcttgacactgctgccaggcaaaaagaggtcaacgttgtggtgaaattgtaccggggtgatgtaagagagaaacttctagattccattgaagatctgaagctaaactctttggtcttgggaagcagaggtcttggaacaattcaaaggatgatattgggagtgttagcaacttcgtgatgactcatgctccatgcccagtgaccattgtcaaggagtagcagtaagtagagtagatgatcaatttgcgagaacattcacgtctatgatac

SEQ ID NO: 23776 - DNA, 335 bp, Glycine max
aattttcctcggactgtttatggacaagagaagttgaccttgtcattgaaggaagctggattgcatcctcaggccagcctgtttgtggagctcagttcatgaaaatcaagcttgcctaatgttcttatgaatacaagatgtggccggcaaataattctgatgtttcattcttctgtgtaaaagaatcgacttgctgaacgattatgtccgttagataaataggctgtcgtggtttatgtagttttgattgctcttattttcaattgaatcaatcaagcagatagcgttacatggagatgatttagaataatgatatatataatatacatatttgg

SEQ ID NO: 23777 - DNA, 626 bp, Glycine max
ggcaccatgccatgccgtcattgcaacaccattgcttattgcatttgaattgctcctttgtatataccttgagagcttatatgatcttggctatgctgcagttgatctaaagatagtgtttcttcccttactaacatttgaaatcattattctcattgacaatttcaggatgtgtaaggctctaatgccaggggatgaagaaatatgagtgatgaggctatatgggaaactctccctcatttttgggttgctatctctatggtgttcttcattgctgctacagtcttcacactcctaaaacttagtggtgatgtaggtgctctgggctggtgggacttgtttattaattttgctattgccgagtgctttgctttccttgtatgtacaaagtggtccaatccagtcattcatagaaattcaagagaagccagtagttcatcttcaactacgattacatatcttgactggaacagtggtttagtggtttctacagacgaaaatcaatcccaagggaaaatctggaagcttcatggaattgccaattattgtaatccaaggtcctccttggatgcatctagagggaacacctgcttgtgctggatatataccggttccagttattttct

SEQ ID NO: 23778 - DNA, 427 bp, Glycine max
cccacgcgtccggatttggtttctgtgtgctgtgttaaaatagtatcaatcaatcaaaaaggaaaagaaagagagagttagggaaggaagatgagctggcgcagggtattgaattcagcacaggccttggctgcacacactttccttttgtgcttcactctcttcctcgttctcaagctcgatcacaatctctcttcttcttggtgatcgtggctatgctgcagttggtccaaagatagtgtttcttcccttactaacatttgaaatcattattctcattgacaatttcaggatgtgtaaggctctaatgccaggggatggagaaaacatgagtgatgaggctatatgggaaactcttcctcatttttgggttgctatctctatggtgttcttcgttgctgctacagtcttcacactcctaaagctt

SEQ ID NO: 23779 - DNA, 348 bp, Glycine max
  unsure (1)..(348): unsure at all n locations
cgcgagaacgcaatcgttctccagctacagcgcagacggcaacgccggcggccagaccttccaatcctacggaaagaactccgccggcgcggcgaacgacttcgccgcctacggcacagactccaacgtcgcctcttcagatttcacgacctacggaaagggaggtgcgggccccaacgacacgttcacgcattacggcgttaacatgaacaaccctactgatcgacgtttcagagctacgcagacggaaccgttggtggaacgcagagtttttccaactacagagaccaagctaacgtaggtgctgactcgttnccaatcctacgctaagaacacgttagggtccga

SEQ ID NO: 23780 - DNA, 485 bp, Glycine max
gtcggtatttgttcgcatgaatgccagggatgatctggatgagtgtgctcctaaagagctactagaagagatctatgattccattgtcaaagaggagattaaaatgaaagatgacacatctttaattggaaaaagcagcagacagaagccagagggtgaagaaggacgccttgtcagtattcttaacctggcactcccaaaaaggaagtcatccggagatgccaagtctgaaagtgaggccatcattaagaaaacacaagctatattcaggaataaaggggtgaaaagaggagttttctacactgcccagcagattgaacttgtaaggcccatggttgaagccgttggatggcctttgcttgctactttttctgtaactatggaggaaggtgataataagcctcgtgttgttttgttgatggacggattaaaactggcatacatattacgtatgtgcttggcatggataccatgcgatatgcatt

SEQ ID NO: 23781 - DNA, 310 bp, Glycine max
ctcaaataaacctctttagtactcctctctccacctcccataattctaaaccccaaaaaaacctcttttggccataggctagccctcactatggcaccaccatttcccttcctaatgacccttctacttgctccctttctattctcctccattgcttcctcttactcattcatagatatccaatcatggtgcaaccatacccctgaccctcagccatgtgagtactacttgaccaaccatgccttcaacaaacccatcataagcagatccgatttccctcaaagttccgtcagctagcctagagagagca

SEQ ID NO: 23782 - DNA, 316 bp, Glycine max
cggaatcggtcgaatggtttgacctttgaagtttttgccatctgggttcttggagaggaccaaggggcagggcttggttgtgcctttgtgggcaccccaggttcaggtgcttggtcacaggtcagttggggggttcttgagtcactgtcggtggaattcgacgctcgagagtgtgctgcagggtgtgcctctgatcgcgtggcccctgtttgcagagcagaggatgaacgcaattctgctttgtgaggggctcaaagtgggactgtggcctagagtgaatgaaaatggcttggtggaaagaggggagatcgctaag

SEQ ID NO: 23783 - DNA, 309 bp, Glycine max
cgatcatatttcttttgtttggatactgtccggagcctatttttgggtgcaggcttcaccgagctcgagcttgattattgttgtgttaagtctgtaaatcgccagaaaggaaagtccatgcaaagagtgtgggttcacgggaagttccagaagcctgcactgagttgtcaataatctcccttggtgtgctgtgtgaagtcggatgaaaaagtacacttattcaagtttatcattgattgctttcagcaacacagaaaagtataaaagagaagcaggtagaaaagactagaactctgatgtctgtgttgt

SEQ ID NO: 23784 - DNA, 651 bp, Glycine max
acagaatcaagagactagctatctgtggagacttctgtgtcagtcccaatgttcgaaggtgccataggcagtgccttcgcagcagcattaaggcttacagatagtgtcagctctttatagttggagcattacaatctgtagttctccaaaccttgcatgcctttatttcagttttttctcctgggaaaacgtgttcaaaatttcttttaagacatttctgtattactaaacgcgaacaaatttcccttctacgacgaagccttgcacactacaaagtatgagaaagaggtacagggtggttgcactttgccgtgccaactttgcaggaaaatggtgatgaaaccacctttgaaatcaaacagtgttgagtttagtcttaacaacaaaaaataagctaaacatatgttaagtgcactagatgatggcctaatgtactgtaattctgaatttgtgatcatgttatttccttttagttataactaaaatacatttcagaaagcaccatggcttgacccaacaaatatcaaaatatcatcatcccacatgtaatggttattttcaaatacagatatgtgcgtgtgtgctaggtttatttatttcattggaataatgttatttgatttaattttatctaaaaacagcttaattttt

SEQ ID NO: 23785 - DNA, 259 bp, Glycine max
cactcttctccttcttctcttagggttccgcgactgtcagtgatgcttcttgcgaaatggataacagcctgaacaatccgagcgacaacggggaagacccgccaccgccgccgccggttcccatgcaagtcgacggcttccaaccgttccattacgccaattgttccgatgaaggggaagaagccgttccggtcaccaatgcttcttctgctatgcacgccagagccagcgaactcaccatttccttcgaaggcgaagt

SEQ ID NO: 23786 - DNA, 367 bp, Glycine max
  unsure (1)..(367): unsure at all n locations
aaccaatgtgacttccaacgctgttgtagagtgctatctcagttttgtcatcattgttgtccattgcacctgaggattatgattgcctaggaaatcttgggatagcttatcttcaaattgggaatttggaattatctgcaatatgttttcaagaattgattttagaagatcagaaccatcctgcagctttggtcaattatgctgctcttcctttgtgtatatatgcttcgggtgtagcaggtctggtgcaattgctgctgaaggtgccttgactgatcagatcatggctgctaatgttgctaaggaatgtctgtggctgcagtanagcagatagcaatcggccatgtcatggcaatcttgctatgca

SEQ ID NO: 23787 - DNA, 331 bp, Glycine max
tctcaactcaaaaccagtggaaaaaaaaagtattaattgctccttccttctttcgaatctcatactcacccaactaccctcgtgccagttctatctctttctcctccaaaataattggagttatgtaaagttatcatcttttctctaaattggtttctgggtaatccttgttcatagcttttggattttcccatcaagcctccttttttgttgctagggcttcaaccacacattggtggcagtgctgatttatcactatttgtattaagctatgaactctccaattcatgccccttcttcatcggcatcttcttgctcctatatgcttcgt

SEQ ID NO: 23788 - DNA, 249 bp, Glycine max
cggctcgagcggctcgaaatttcacagtgcggagatcctcctccatggatcgccggaaaagcaacgagacaacgcagtcgtcgacaacctcaaccgtggaattgccaccaccaatctcagcctcagaagcccttatagccatcgcattatgcgcgcttggcttggccttcgccttctggattgcgaacactgtctactccctcgaactcgttactcatcctgctctcacactcttcttcatctggatta

SEQ ID NO: 23789 - DNA, 316 bp, Glycine max
  unsure (1)..(316): unsure at all n locations
ctaaaaaactcttagttcggtctaaaaccctgaactgctgaagaacacaaggcaaaaagaggcacaaaatttacatattatgaagtgagaaaatcctaagagatgtttgttacatcccttgcttgctcttacttcacttatcccacccttttgcattctttttgttccacatttacttcgtctcatcaccaatgcacgttgctgcagctcaatagacacagacagaaatattgcatttcgtcgaccatcaatggtaacatttcctacgatgtgnggaggtggatatccggtattggagcagaatcagaatggaaag

SEQ ID NO: 23790 - DNA, 558 bp, Glycine max
tctcgagccgattcggcttaagatcataatcagtcatgtccaacaatccaaggtctctgaattactcttccctaacccgttccaacatggcaacaacaggctcagaaccttggtccttttttctcatcttcgtcttcctgtgactttttctttctttcaaacataaataaacaaacttttgagtcctccttttttcttgtttccttttgtctttctttctttcttggtgccagaaaaaaatgggtattggagagaagagtccaagcaagagtttcaatctgcaccatcaccatcatcgtgaagggaagaataagcaacaagagttcagaggggtcccaaaagggtgcatggcaattaaggttggtcaaggagaagagcaacaaaggttcgtagtgcctgtgatttacatcaaccaccctctcttcatgcagcttctcaaagaggcagaggaagagtatggctttgatcaaaagggcaccatcaccatcccttgccatgttgaggaattcagaaacgttcgtggcttgattgatagggacaagtcccttcatcatcatc

SEQ ID NO: 23791 - DNA, 508 bp, Glycine max
cagaaatagaaaatgggtactaacagatctttaatggccacgatcctcatcgtgttcttcacggtgttggcagtgtcatcggcgttggacatgtcgataatctcgtatgacagaagccacgcggacaagtcagggtggaagagtgacgaggaggtaatgagtatatacgaggagtggcttgtgaagcatgggaaggtgtataacgccgtcgaagagaaggagaagaggtttcagatcttcaaagacaacctcaactttatcgaagaacacaatgctgtgaaccggacatacaaggttggactgaaccggttcagtgatcttagcaacgaggagtaccggtcaaaatacctgggaaccaagattgatcccagcagaatgatggccagaccaagtagacgttactctccgcgcgtggctgacaatttgctcgaatctgttgattggaggaaagaaggtgctgttgtcagagtcaaaaaccaatcagaatgcgagggctgctgggcattct

SEQ ID NO: 23792 - DNA, 378 bp, Glycine max
tgatgaatactctctatccgtgggtgatcacagccgcgtggatagttttgtagatggagatccaggtgattcgcagcagtctgttccaaagcttggtcggcgcaaacctgggaggaaaagcaaatctggaattgctagaacacgctcagtgaaggctggtgttgaagaggccaaggagttcctaggaaaagccccaaagaaaatagaaaatgcaagcttgcagtctctcaatactgatcatatcagacgagacagtcgagaagactccagtcacactgagaaagccattggtaacactagcagggaacggcaacggggcacaaacttctaggattgacagaaagtgagcaggatgctggtgatagtgaaggacaatca

SEQ ID NO: 23793 - DNA, 672 bp, Glycine max
aactgaggtctatttgaggaacttcattgcatgggagcaaagtagaattggcatcaacaggcaattcacttcttatgctttgtttcttagaggcttgatgtgttctgtgcaagatattgagctgcttgtggaaaatggtgttttggtgaaaggtactaagatcagcaacagagatttgctcactttgtttggcacaatcacaaagggagtggaccaaatggacaatagttacagcaaactttgtgaggacttgaatgcttactcagcagtgaaccccttgaggaagttccctatactgatgttgcattgttgcaacctttgtgtagaatgcatcagatactctcgcaaacacagctataaaatcttgattagagatcatatcccaaatgtgtggaaattgatagggattgtggtagctgctgctctgcttgctcttaccattatgcaaacctactattcagcccgtggctaagtaaattttgtaagtgtaactgtatccatgaaatccatgattcatgatagaccagaaatattgtactaatgcaaataaagtgaaaggacgcaataaatattttcttttattgatatagtagtacattaaattgtgttctaattcaggtccaggtgatatgtattatattaacttctatagtttatgactattttattcct

SEQ ID NO: 23794 - DNA, 236 bp, Glycine max
tgtgtttgtataagtagtctttctttgcttaataaagctttttaagcttctttttccctatgtgccatataattcttagactttccttttttgcctgctgccattgtaatttatatgtattaatgggtcttttagtattggatgctggtgtagctaaacgttgccttgtgttttgatcagttgtataatccgaatcgacatggatgttctcaataaaagagcatttattttttatc

SEQ ID NO: 23795 - DNA, 305 bp, Glycine max
tcgagtcgagccggacaaaatagatagcttcctgaagcaatgtcccgctttcccaactgcttacttaattggcggtccagcagatatatttgttaccgaactcactgatcaggtacatttgaattacctcttcataattaagagccgtatcctctttttctatgaagagttgaagatgtaaacccttaatgtatggttttgaatgttttgttgtcacgtatcagcttcaatagctataggttgaactcagtgctgcttcattacctttcagaaattaagatcttcagggtattatatcaaccata

SEQ ID NO: 23796 - DNA, 718 bp, Glycine max
cacgatttagatgccgcttgtttatcaacaaataaacttaggcgcaaaccaataactaaataaaacaacaaactcaactatcttcgaatcccatctacacctaggttaagaagaaagatctcaaacctctgaaaaccctgaaccctctctttctcttcacatcattctaaacccattctgaaacccctcacattatttcctccaaccatgcttcgcatagcatcaaagctatcatctaggttttcttcctcttctactgccctcactgcaaacccactattccccacaagactctctccaattccctcttcatcgttccgaccattcaccaatggcttggaattggaggccaacatggtcgtccccgacgccatcaagatgatcaactacgccttgaggcactggaggaccgataggtcacttggggcgtacaggatgggcttgtctgtgttgaagtttgcattaccaatgagttgactgagggcaaggagccaaagcgcgagacttcgaagggaatggccatgcttgctatgtccactttgttgtttgaaagaggagagtacgcagaagcgattgagaagctagagggtgttcaagagttaacaaattcttacttgggtgttagagttgctgctcttgaaactcaggctgggcttcatctattgatgaggcaggatgatttggcagcagtggttgctgataagtgcatgaagatggt

SEQ ID NO: 23797 - DNA, 371 bp, Glycine max
atatcttatgtctctgctagtggtgcattggcttcttccattttactcctttctatattttggaatggaaccattgatggcactggatttcatgcaaagggaacaattttcagattgagtggaatacctgctgctgtcagcttatatgccttctgctatagtgctcatcctatccttcccactctctacaattctatgagagacaaaagtcagttctccagggtgctgtctgcatgcttttccgtatgcacccttggttatgcagcagcaggtgttttgggctacttaatgtttggacaagaggtttgaatcacagtgacttttgaacctcccgacaggcaagttcagtcacatgtagcaatatcactacc

SEQ ID NO: 23798 - DNA, 1135 bp, Glycine max
tgatactagcagtaaaaaggatgaacagaatatctgagcagggggacgatgagttctgcagagaaattgaacttcttgctcgactgcaccatcggcatcttgttgctttaaaaggcttttgcattaaaaaacgtgagaggtttctgttgtatgagtacatgggaaatggaagcttgaaagatcatcttcattcccctggtaaaacacctttaagttggcgaactagaatccaaattgccattgatgtcgccaatgcactggagtacctccatttctattgcgatcctcctctgtgtcacagagatattaaatctagcaacactttactggatgagaactttgtcgctaagatagccgattttggccttgcacaagcttcaaaagatggctcagtatgctttgaacctgtaaacactgaaatccggggaactccaggttatatggatcctgaatatgttgttactcaagagctcaccgagaaaagtgatatatacagttttggggtgttactacttgaaattgtgacaggaaggcgagccattcaaggtaataagaatttggtagaatgggctcaaccatacatggaatcagacacaagattactggagctagtagatcccaatgtgagggagtcttttgacttggatcagctccaaacagtaatctctatagtagcatggtgcacacagagagaaggaagggcaaggccttcgataaaacaggtacttaggcttctgtatgagacatcagaaccaatgcacagtgagtttctacaagcagttgaagatgaagaatgtcagggaagtcagcacagaggcagaagaagcaaggggaaaatgctcagaaatgaggcattgtctcacagcggagatggaagatatcttgcttcatcttcaagtacgtctaggtcgtattgcagtagaacctttttacttgagagtggctctccacagtctccgccaaatattttctctctctgaaagtctttagatccttcaagttgacttcaattttgcatttctcatttactcactgacttgtggattttttagaagtaggagaaactcttttaaggtgtccatatattaaaatctttggataaatgagaaatatagtgctttctttgcttttatcc

SEQ ID NO: 23799 - DNA, 874 bp, Glycine max
cctgggtagactttaccggcgtatcaaagatgcttatgatgaagatattgatgctccctatttgaactttgtgactggcgatataccgtatgataaagatcttgaagttccaggatctgctgattttattgctgatgcgtgggagcaaaaatgctcatatgatggccaattgagtgggctacttggacaatacaaagtgaaaagagaagaggaagttgttactggacagatttggtctatgccaaaatacaacagtaggaagcaaggggagcttaaagagaggctgaagcactcttacagtgccctgaaaaaagaatttaggcacacttttgagaaattgaattcagatgttggagaattaagcgaggaagaaaaaaatttgttctatgagcagaaagcttcggcctggtatcaggtgacatatcatcctgagtgggtgaaaaaatcccttgatctgcaagataaatcctcagagaaccaagaggctgatagtttgggaagtacggtgatgttgagttttccttggattgcagttgattacctagctcgcacaaagataaggcaacgacatcagagatgtggaaattttgactcaactaagccagttgattctctggcaaagtatctatctgaaaggttataataattctattgagcttgctcttggctactaggccactctgccatcctataatattacgtataatgtgtcttcactttagctgcttcgattgtaactaggtttgttcccaagccaggaaatgcctctggttttgaggcttaagactgtatctagtctagttacatttgatactgtttgaccgttttgttatagtagtcttgtgcatgcggttatatgtatgtgattgtgatt

SEQ ID NO: 23800 - DNA, 319 bp, Glycine max
gcgtttcagaagaagaaaaagattaaaatttgacaatgtattttagtaccctctttcgtgattaagcagaagaacccaaatgggggttggtggtaatttctgggacctgctaaagccctatgcgcgcaaagagggttttgatttcttgaggaacaagcgagttgcagtggacctttcgttctggattgttcagcacgagaatgccatcaaggccacgcatgtcagaaacccccatctaaggcttaccttcttccgcaccatcaatctttctccaagtttggagcactccggtgttcattgtgatgggactccatcaccg

SEQ ID NO: 23801 - DNA, 913 bp, Glycine max
ggttgatccactagcttctagcagctgggaacaggtttcatcctctaaaacattgattacacctgtccagtgcaagtctttgtggaggcaattcaagacagagacagagtacagtgtctctcaggccatttctgcacaggaggccaacacagcgcaacaacaactggttacctcccccatgggcaatagttgctttggttatcctgggatttaatgaacttatgacacttctaagaaatcccttgtatttgggtgtcatctttgttggttttcttctcattaaagccctatgggtgcagcttgatgtttcgggtgaatttcgcaatggagctcttccaggaatcatatccttgtctagcaagtttattccaactatcatgaaccttatgaaaaaactagcagaggggggacagaaccctgcagctaacaatcctcagagaaccccatcaaaaagcagttacaatgagggtcatgccgtgtcatctagcgcctcatctaacttgactagattggacaacggaaccgagtatgcgagtccattaaaagatgattaggtgaagacactcatcttactgaaaaccaatttattctgttgggagatggtggtttgtctggtggctgcatgcttgtccacaaaattcatgacttgtgagcattcaagacattcaaaggcattggttttttttgtgcaagtgccatatacagggggcaatgatttgttgatgtagtccccccttgagataggtctcttttccaatttaggcgcttcagttagttggaaaagttatagcttattttacatggtctttgatggttatgctggttttgcaatcaattttgtttgtaaattcggtgtactgagtttttttttttttttgtggaaaatttattaattggattgtgtgtttatgtt

SEQ ID NO: 23802 - DNA, 377 bp, Glycine max
cggaatcggtcgcctcgagcgaatcggcccactcaacttggcatggtatcagacatcttacttcagatactctatggccttattggatgctggactgcttatctagtcagtgtcctctacatagagtaccgcaccaggaaggaaaaggaaaacgtcagcttcaagaaccacgtcattcagtggttcgaagtccttgatgggttacttggtccatattggaaagccctggggctagccttcaactgtactttcctcctctttggatctgtgatacagcttatagcatgtgcaagtaacatctactacataaacgacaaattggataaacggacttggacttatatttttggagcttgctgtgccaccactgtgttcat

SEQ ID NO: 23803 - DNA, 392 bp, Glycine max
tcgagaagaagaggaagctatagtcacatacgagacagaacatggagttagcagcacaagggtagaggagaaggagcaagaccaatcaatgttcagccttaagagcatcctttggcatggtggttctgtttgggatgcatggttcagctgtgcctcaaatcaagtggctcaagtgcttttgacactgccatactcattctctcaacttggcatgctatcaggaatcatttttcaggtgttctatggaattgttggaagctggactgcttatctaatcagtgtcctctacatagagtaccgcaccagaaaggaaaaggaaaacgtcagcttcaaaaaccatgtcattcagtggttccaagtccttgatgggttacttggtccatattggaaag

SEQ ID NO: 23804 - DNA, 491 bp, Glycine max
tcaaaacaaaaccaaaacacagaaaaaaaaaaaaaaaagagtgtgggggaaacaaaagagacgagattgtcgaacttggggtccttttttgcaacctgcgaggctgcgactgcgagcgagcgaaagagagagagaatcgaaggcgacacacagcttgcatccgattccgagaagaagacgaggcttctctttcgaatacaatctttctgctacatgatgttgaacaaatgatacagaatttattctgtgcacagaaattctggtacatatgacaggacttatgcctggagagttgccacatcatggaacacctgatggcaactctggtaaaagttctcaagacaagcaagaggaatcattaggtcgctggtatatgtctagaaaagaaatagaggaacattccccatcaagaaaagatggaattgacttgaagaaagagacatatctgcgcaagtcatactgcacattcttgcaggatttaggcatgagac

SEQ ID NO: 23805 - DNA, 529 bp, Glycine max
  unsure (1)..(529): unsure at all n locations
tgaagcttttgcgtcaaattagatgaattgtgcaaccatggacttgtaacacaagctgcctccctcatatctaacagcagttctgggggtggtcaggcttctctcagcatgctgacatatactggaggaaattcaatcggaaatcagtccttccatggagaaaggaagaaaagcagcacgtggttctaagagaaagcgccgaagtttcaaggataaggatcactatataagttcaattccaaaaaatcaacatatggaggctggcctttcagtaaaagctaatgaagactttgcttctaatagattggaagcagctgtcctcgatctagtggcagatgatggtgctggcattcagaagcaaagatctatgtatcactgggataagaggggtaaaaagtgcatcaagttaaacaatggtgatcgtgttgctgcaaatggaaagataaagacgagagtggtgcaaaaacaaaggcaaacaagactggtatatataagaagtggaaagagcgctcacatggtangatatcac

SEQ ID NO: 23806 - DNA, 583 bp, Glycine max
tttccttccatccacttccctcattggttctcttggtccattatagtttgcagtgttcctccaaggttttgatctcaatccattacaaactagacaacctaatatccgttgctttcagtggaatgaagatgtaactcatcagggaacggaaatgccttcatgatgggctttgggcccaaacacagccgacttaataaagatcaacaaagcaccaagtatctcaatgatgagattgaggaccctgcccctcacaaagaacatactaagcaacagttgaagatgcatgttgctcatgctcaaaactatgaagttgcatgtaatgcaattatcaaccactgcttcacttcttatgcattttggcattgcttctttcaggctgcggcagtatcttatgctaaacaagttgtaaagctgatggatagtttgctcatggcagggaaggccacagttgaaatgaataaggagctgaacactcagaaaatgagagcacccttgttgcacaaaactgttattattttcacagatatgttactttgccagcacacagacctcattgatggcttttatatattaaagctcctaa

SEQ ID NO: 23807 - DNA, 373 bp, Glycine max
attcggctcgagatttaagcaacaataaggttgacaaagaatcagtttcagcactgcttgaactcaagcaacaataagtgcagcagccaatactcgagcttgctcatccttggcccgagtgggtccaactcatgaagtgcttgctcgaccagggatacttctgtcgtgacagagggaaaaatggtatgcaatgctggtatgggcctgaaggattcaatgtcattagaaccgtgtgcctcaattatggtagagaccactttcatcttttaagggttggccgtgattttagactctgacagactgtgatactcaattggacaagaaccctaggcttgattatacgattttatattcatattgatttgtacctaag

SEQ ID NO: 23808 - DNA, 703 bp, Glycine max
  unsure (1)..(703): unsure at all n locations
agatattgccatacaacagtatgctcagtttctggacgccaatatgtatcccatgcttagttattcttccattatcctcttgcgcattccagatgaaaatctgtagcttggaaaatcttgcttctttgtttttatcggctatatatataatcctgttcctagtatgctggaaaagaaatcgtagtaagatgggtctgcaggaagtaagcaccaaaggcccaagaggaaggaacgtatagcatggctggcatcatgcatcatgcatacatgcaccgtacgtaggaaaagcgcaaacccgtgtgatagcatcgtgtcttctagaagatgcgtaggtagtggaataaaggcatatttgctcttaggatatttcggattgcttttatcttttccgtttttgcttgtcgggacttgtcccctctataacagctatatatatatgtaaagaaatggtgttggaaggatatgagaaaatagcagaaaaacgttcctccgtagttctctctctcccactctcttcttctctcttaggaggctacttggtcctcgaactccaagctcgtaacatttgatcagtaaataaaaataatagatgcattgaatattttcttttgcctttacctaggaaagaataagctgtattagtgatgtacatgatacgatgatgganacgtggctaagtgtatntgagcaatttagatgtgag

SEQ ID NO: 23809 - DNA, 303 bp, Glycine max
tctcgagccgaatcggctcgaggttaatcctcagatggcagtggaaaatatcaaagtccacgaagagtccaacgttgcccctccaccatcatcaacacaatcactatccctccctttcactttgtatgacactttgttcctcaggttcccttccattgactggatcttcttctattccctcaatgctcaacaatcagaaccttctttcttctatgccaatgtgattccaaagctcaaagcctctctctctcacaccctccaacactaccctcctctcgctggcaacattctttggcctgtctg

SEQ ID NO: 23810 - DNA, 567 bp, Glycine max
ccaccataccctgctaatttcttcccatatggccactattaccctccaatttatgtgtctccaatccaccaatttttaaaccacaatggtttccctcaacaaccatcagctggcagcatgtatctaccagcagctgctgggatcaaattccctctccctcaattcaaggctggagccaacacaggaaacgcagctcatattggaattccttctggatcatttatcactccacctgtaggatatgcgccaggtcaaacagttaatactggaagctccactggaaatgaagatctggtagtgtctcagttaaaggaaaaccagatctatacaacaggacagctgagtgaaggctctgcagtgtggatacctgctccaggccaagacatgtccagtttgcaagttaattctctgtataaccttacccctcagggacaacatctcacctttcccccaacacaggctgctcatggggcatttgctggtatctttcaagcagggcagacagtagcttcaccttcaacccttttgcacagtctcaggctgtggctgggcctgtcaaatatgtag

SEQ ID NO: 23811 - DNA, 479 bp, Glycine max
attcattcaagaattattattgatggccttcattctcataattgcttctcttgtttttctgtggatcgtttctctttgcaaagttcttcttctcccccgcatccctttcggcaaccattttacgcataacaacggcagagcatttcggaagagaaatgccttgttggttattgctcatcctgatgacgaatccatgttctttactccaactataaattttctgacttcaaaggggcataatgttcaaatactttgcttatctattggtgatgcagatggcaaaggaaatatcagaaaacaagagctttttcacgcttgtgtagccctcaaggttccgatgcaacaagtgaagattgatcaatcatccagatctgcaggtgttgatccaataggatggtgttggtaaagtttggagccataacttattggcaaagattattgaggaagacataaccagatgttgcattgatatgattatt

SEQ ID NO: 23812 - DNA, 330 bp, Glycine max
caaaactttcatatccccgaaattctctctttttccactgttccctaggaaatatttattctcatcttcatcctctacacaacacctaagagggacaagagggaactcataatttataaaaagaacattgagaaagagagaagggaagaagaatggaccaccaagctgacactaacagaactgatttgatgactatcacacgctttgttctgaatgaacagtcaaagtatcccgaatcacgtggcgatttcaccatccttctcagtcacattgttcttggctgcaaattcgtttgttctgctgttaacaaggcgggattggcgaaactca

SEQ ID NO: 23813 - DNA, 277 bp, Glycine max
ctcactggagagcactgcagggtgaataagtgcgaaataaaacccagaagaacgggacattaggcacttattctcactggagagcactgcagggaagtgagaaattgctccaactagtctcagatggcaacaaaacttcaaacacttacacacaaactgagcgtaataactctaaaagtcaaagccatagttcgaatgaaccctgttgggtggtgttgaagccctccaaagaactagataatcttgtccgtctagaagatggtccagacggtcttag

SEQ ID NO: 23814 - DNA, 291 bp, Glycine max
  unsure (1)..(291): unsure at all n locations
gtttttactaagaagacgaaatcgaagtcgaagacggagagtatctcgagtgtgactgcgtgaaagggttcgtgcgttttttcttcctccgaagcctttcatggagttcactgcactctctaacgctacccaacttgggagcttcaaccctcttagaaccaaccttcaaagttcaacacaacactttcttcggctntcgtatgcttctttcccttcttcctctcgcagaggttgctcctgcaaagccgtccttagcacccacacacccacctctacccacaaaaacatgtt

SEQ ID NO: 23815 - DNA, 452 bp, Glycine max
cccggaatcacgagagagtctcatagggtggtgtgtagctgatggaagttggaatcatattatccttgccatttgccgagaagagaaactagctgatctccctctactaactctattctttacaatagagtcttgggaggaggggctgggtttgacttcttactaggctaagctaagctaagctaagctgcattggagccgaagatgctgctgggatgggacagtggaaattgttgtcaaacggaaggagaagtgaggtgtgaggcgcacagtggctttttgggtactcagtgctataaggctacaagtgaagttgtgctggctaaaagacagtggagcccacaaattataacatctaaatggtctttctttctgcattagaaaatagaaatgaaggagaaggacggactttcaggtatataacccctgtaactgcaactgcaagtcatgat

SEQ ID NO: 23816 - DNA, 372 bp, Glycine max
  unsure (1)..(372): unsure at all n locations
ttcggctcgatgaagacatcgtgtgtcaatagtccaattcttgtacttattggcctcagctcaagacatgcaagtgctttcatctgagaattgagaatgagtaaataatttcctcaagattgagtgatattcagctaagaaagttaatgccatgttgccacctaaataataccatctcaacagtaaactttggtagcattaaccaagcatccttgccaaaccagctactatactgtatgcaccagattcaaagcataagactaaagtcagattatcaattcccaaaactgcaacccatcttcagagtctgctttctcctatgtgtctttttgcatgaacagnagctcattgctgaagagaaaaacaatgtca

SEQ ID NO: 23817 - DNA, 411 bp, Glycine max
ccttctttgttcggaggtgcattacagctaggaggaccctcatggacagttcctctaggaagaagagatgcaagaacagcaagccagagtgcagccaacaaccaaatcccaggaccctcctctgacctctcaaccctaatctctatgtttgcatccaaaggcctaacagcaagtgacctaaccgttctttcaggtgcccacacaataggccaagcacagtgccagttctttagaactcgcatatacaacgaaaccaacatcgacaccaacttcgccgccaccagaaaagcaacttgccccgccaccggagggaacaccaacctggcccctctggaaaccctaaccccgacacgattcgacaacaattactacgccgacctcgtcaaccgccgtggccttctccactccgac

SEQ ID NO: 23818 - DNA, 437 bp, Glycine max
aatctgcatgttgtccttgttaccgatttgggaagaacatgaagctagctggttttggttcttgctacattcaggctatagtttattttcttcttgctattggtgcctttgttacttccattgcctatactatcacgaggactcactacttcctatacctagctgttgcattcatcattgctgttggagcatatttaggattctaccgaactcgtatgcgaaagaaattcaacatcaagggtagtgatcgttcgttggatgatttcgtgtaccattttgtctgtccttgttgtacgttatgtcaggagtcaagaacacttgagatgaacaatgttcaaaacggaacatggcatggtcggggtgacacaatatgtataggtggatttagagatgaaagtaaagctctctgtgagttacgtcctccttctgttgtgtcc

SEQ ID NO: 23819 - DNA, 541 bp, Glycine max
  unsure (1)..(541): unsure at all n locations
cagaagctgggggcatatggctatatggtaagcttggtacagaatcagagtggatctgcgcagtcagaaaaaacttgatatataagacaccagcagcttcctattgcatttgcatcctcaatctcaatccatttattttgtataaagtgaagcgaattggtggatctgaatcagcagcagagggagatggcgatggcgagagcaacttctggtctgcaatacccagagcggttctacgctgcggcgtcttatgtggggtttgatggatcctctccaaccaaaaccctcacctccaaattcgccaagtccaccgctcttcttctctacagcttataccaacaggctagtgtaggaccttgtaacatcccagaacccagtacatggaaacttgtggagcatagcaaatgggccagttggaaccagcttggaaacatgtcctccactgaagctatgcgtctttntgtaaaaatattggaggaagaagatcctggttggtattcaagagcatctaactctgttgtagaacctgtcatagatgtgc

SEQ ID NO: 23820 - DNA, 272 bp, Glycine max
gataaacctatgtttggatgaaatgcgtatgatcattattttgcttgaggtagaggccttaattgacaaaagctagagataagagaactcacggtttaaacttgaaggaattatgaaatgatgatggtttacttgtgtttcctgccattctagcttcttcagccaatggctagtgtaggaccttgtaacatcccagaacccagtacatggaaacttgtggagcatagcaaatgggccagttggaaccagcttggaaacatgtcctccactga

SEQ ID NO: 23821 - DNA, 380 bp, Glycine max
cggatctgcgaagtttgcaataacgtctagttaatatgaatcacaccttgctcacgtcactccctgaaggagcaacgccaaaagaacgaggcatcatattcatattgatataagtgtagtaggatctgagaattggagtgagtttgatggcgagagcaagctctggtctgcaatacccagagcggttctacgccgcggcctcttacgttggattcgacggatccaccaaatctctcacttccaagttctccaactccaccgctcttcttctctacagcctctatcagcaggctagtataggaccttgtaatgtcccagaacccagttcatggaaacttgtggagcatagcaaatggggaatgaagaaccagcttggaaac

SEQ ID NO: 23822 - DNA, 411 bp, Glycine max
gcagattcagagtggatctgagcagaaagaaaaaacttgatatataagacaccagcagcttcctatggagtattgaatctcaatgtaattgtcttcaatcaagtggtggatctgaatcagcagaggcagatggcgagagcaagttctggtctgcaatacccagagcggttctacgctgcggcgtcttatgtggggtttgatggatcctctccaaccaaatccctcacctccaaattcccccagtccaccgctcttcttctctacagcttgtaccaacaggctagtgtaggaccttgtaacatcacagaacccagtacatggaaaattgtggagcatggcaaatgggccagttggaaccagcttggaaacatgtcctcaactgaagccatgcgtctttttgtaaaaatattg

SEQ ID NO: 23823 - DNA, 395 bp, Glycine max
cttcttctctgcactctagacagaaacatgatgaacttcgacggcttccagaaggcaatcgaggagcgcttagagggaattcccgttgcttccgaggagtttctcttggtctcgggctcttcctcttctgcttcagcaaggacgacgccgaggctctcctcagccaggttacgcttattgacccccacgcgcgccagggctctaaagttgtccccgttgctttgaacaaggtccttcctctctctctctctgtttccgttctttatttctctctcgcgtttggtttgctttgctttctcctccaggtgtttcagctcaaggtgaacagcgttgcttttagattgatacctgagttctctcaagtcaaaaatgccctcaaagagagggaaaaatct

SEQ ID NO: 23824 - DNA, 348 bp, Glycine max
cggcactctacaaagaaaagaaacatgatgaactttgacggcttccagaaggctctggcggagtttcagggccgctgctccacgctgctgggcagcctgacccgtctccagcccaaccgcgcgaggccaccatgggctcggatagcccagccctggggaggcaggcccatggccatgacggtggaggcaatcgaggagcgcttagagggaattcccgtttacgccctcagcaacgcttccgaggagtttctcttggtctcgggctcttcctccgggaaaaaccttggcctcttctgcttcaacaaggacgacgccgaggctctcctcaaccaaggtacgcttatcgac

SEQ ID NO: 23825 - DNA, 549 bp, Glycine max
aagtctccaccaccaccagtttacatttatgcttcccctccaccacccatctacaagtaagcttggaattaagaagcagcaacaataataagtcatgtaagttagtaatcttaaaatagataaatgtctattttatatgcatttataaactctgagaagtattgaaaacttttattttatttcaggttctagtattcattgtggaataaatttccgttccatttggagcagagttaagcatataatttgttatacaagttctttgaataagagtctgagtgtatcacctctaagctacgatcttcatcgctcctttgaggttgcttctatttatttggtggccatttttcaagtgttgttcttactaagttcaaggaagcgacaaatcaaaaagattcaagacaaggaagcaagattagaaatgttgatatcaattcaggctgcttttagagctttcttatttgtttctttgtagattaatatggttgattgtgtatgatttcattcaaattattgtgaaatcttttaatatatcttttgtgttgttgc

SEQ ID NO: 23826 - DNA, 335 bp, Glycine max
caacgtcgtctcccccacctccttatcactacgtgagccctccaccaccaaccaagtctccaccaccaccagtttacatttatgcttcccctccaccacccatctacaagtaagcttggaattaagaagcagcaacaataataagtcatgttctagtattcattgtggaataaatttccgttccatttggagcagagttaagcatataatttgttatacaagttctttgaataagagtctgagtgtatcacctctaagctacgatcttcatgactcatatgagggtgcttctatttatttggtggccatttttcaagtgttgttcttactaagtt

SEQ ID NO: 23827 - DNA, 364 bp, Glycine max
cggctcgagctttacgcatcaaacgatccaaatagtcaagttaggaaggtcattgataatgagtttccagcaggtgataaaccttttgtgtgggccttcaaccttcatctcccaaccatggataactatagtgccatcgcatattttacaaccacagagacagtccttgaggatttgctaatggacaagttcttgaagggtggcacgcattcagaaactcgagacttaagctgattgccaacattgtagaaggtccttggattgtcagaaaagctgttggagagcaggctatttgcacattgggcgtgccctttcctgtaaatattgcacaggggagactttcatagaagtagatattgatata

SEQ ID NO: 23828 - DNA, 361 bp, Glycine max
gcctattctcagttgtacctctacgagagattatggtcattgacttcaaattgacatatccaagtggtactgcaactgcacatctcatcaacagcttccacacacctcaaggagataaactagcaaagaagcaagtgaaaatgttgggaaaattcttcagtttgagttttttttggggcttctttcaatggttctacactgctactgaccagtgtggatttcaagccttcccttcattggggcttaaagcatatgaaaacaagttcttttttgattttgctgcaatctatgttggagttggaatgatatgcccatatatcataaatatatcagtgcttcttggaggacttctttcttgggg

SEQ ID NO: 23829 - DNA, 354 bp, Glycine max
tgtgaatatgtgagctgctggaactgctgagtataattttcaaatggtttgattttgaattagctgctcatgtatcattctaaatcaaaccatgtgaatatgtgagctgctggaactgctgagtataattttcacatgaaaaaggcatgaggtttatagatttatgatttttcattttcctatattcgtgcttacataatgagcttattgtagaagaaggatgactagatgttcattatgaggactctttgctgtagttaactgaatattttttcctcaaagtctcaagtcagttcctgtgcttgtagaatagattgtgggttagaatttcttattattgaatgttacacatac

SEQ ID NO: 23830 - DNA, 1146 bp, Glycine max
  unsure (1)..(1146): unsure at all n locations
attaattactagagtgatgaacatgagaatctaaagcaccaaacccgaaggatcgatttacatccatttgttaagcctaacatgttggaaatctctaggctgatatatatggtcagccatggtgtgatttttcgtaacgttcctctaactgtggttgtctttttgttcagtgatatcgtcaagcgatatgatgaagccatgaaaaagctagtgggaaagctgatgtggctgatgttggattctctgggtattacaaaggaagacctgaaatgggccgggtccaaaggccaattcaaaaagacatgcgcagccttgcaattgaactcttacccgacttgtccggatccggatcgggccatgggtctggccgcccacaccgactccacccttctcacaatcctttaccaaaacaacataagcgggttgcaggttcaccgaaaaggcggcgggtgggtgacggtggcaccagtccccgaagggcttgtgatcaatgtaggcgacctcctccacatattgtcgaacgggttgtacccgagtgtgctccaccgggtcttagtgaaccggatccagcaaaggctttcagttgcgtatttatgtgggccccctccgaatgtggagatatgtccacatgcgaagctagtgggcccaaataagcctcccctttataaggcagtgacttggaatgagtaccttggcactaaagcaaagcatttcaacaaggcactctcaaccgttcggctttgtgcacctagctagctattagcggttcgtttgatgtaaaccagcctcacacaattgcttcgatccttccctcttgcatggtctattttctaccaaacatgaatgaaacacctcttctttttcttttttttgcttaatatgaatggaaacttggtggggatcgatgccaacaataaataagttcaagagggtgtatatgtatgtagatatatttgtttggctctaaactggagagagaatactggggataagatagtctcatccgtgtttcatttgtctttgtctttgtctggaaagggacatcactaaattgtcgaagctgattattcaattcgaccacaggactcgccaaaaaacattttctttcccnnnnnnnnnnnnnnnnnnnnnnnnnnnnnnnnnnnn

SEQ ID NO: 23831 - DNA, 251 bp, Glycine max
aaacaccgacatggcgatggcgggcactcacgctcggcaatctgcttggattcttcgcctgctctgtttgtgggcttctgcagttctcgtattcgctgatgaacactccttatgtcttactcaaaatgccacactgcagctatcccgtggcttgcccgtgggaaattctcctggttccaagcctggtgctactgtgattgtcgaaagagttcatatacatggactgtcaaggtttagaaacttggggaaat

SEQ ID NO: 23832 - DNA, 652 bp, Glycine max
cttttacctagattttctctttgtattctgcaccagtttgtccactggttttccctgacacaaagcaagttgccaagggttgtgtggatgagatacgtaacaaaacagcatgctgtaatgctatggaaagctatgtgtctcacttgcaaaaacagagcttcatcacgaacttgcaagcgttggattgtgctgagactttggcaatgaaaatgaaaagatcgaatattactgcagatgtttatggtctctgtcacataagccttaaagacttttccctccaagttggaaatcaagaggctggttgtctattacctagtttgccttcagatgctacatttgacagtgtttctgggatcagcttcctctgtgatctaaatgataatattccagctccttggccttctacatctcaactgacttcttcatcatgcaataaatctatcaacatccctgctcttcctgcagcagcatcaagtcaaagtcgcctttacagccatgacattctgatctctgtgctagctgctttgttgtttctcttgatgacgaccatgtaatcatatgagggtttccttgataaatgaagctttcctagttcttcaacaaggatagtttttgcacgtgtagtatggcaaaggttaattaattgcgaccg

SEQ ID NO: 23833 - DNA, 456 bp, Glycine max
tctctcataccgtcatccgtggatcaagttggatgtgatgagttatcaatcacaccctaaaatagagggtgggatctgaggtctgaacacaacttctctcacatttaagatcactaagtcatttgaaaagacggttactagtggaactggaattaaaaataataaattccaaagctgctgaatttgcaggcagtgtcaagaaagaactcatagattatatccccataagtaacgcacttatccaatgttcacgaaaggagagaaatcaaagatgggaaagaaacggaaatggcattaacttttacagatgaatttgatagttttgaagataactaccatggaaagatcgtgaacacttcaaatcctggatatagttatcatgttcccatcagttttctttgtagaaagctatgccaataaaattcatcaaagtttttgcaccctatcacagtaaag

SEQ ID NO: 23834 - DNA, 344 bp, Glycine max
ctctcctacgggtctgcaattccacttgtgtatcggcctaggcttatgctttgtggtggtgaaggtacagggctggatcatcttggccctgcggttttacatgagctggaaaaatttcccgtacattcattgggacttccatctcttctgtcagatcctagtgcaaagacaccagaggaggcattggtacatatagctggtgaagctagaagaacaacaccatcaattctctacttaccacaatttgatgtttggtgggagactgctcatgaacagctccgggctgttctcctgactttgctagaagaattaccatctgacttgcctatcttactgcttggtac

SEQ ID NO: 23835 - DNA, 735 bp, Glycine max
gtcagtctgtgctccagtgtgacactactgttgcatacaaaatcattgccacaggatccctcgccattattgactgtttaacacttgaaagggatcctgtggcaatgcttttgtatgcaacagtagtgtcagtctgtgctccagtgtgggaggagatagttttccgtggctttctactcccatccctcaccaaatacatgccagtgtggtgtgcaactactggtaagttcaattgcctttgcacttgcacatttcaacatacagagtatgctgccccttatatttcttgggatggtgatgggtgtgatatatacacggtcaaggaatttactgccatcaatgctgttgcatagtctttggaatggcttcgtcttcttagatttgatgaaatagcttctcgaacgttgtggttctcttgtaagcagagagtccaatgtgtaggtagaattgcaggcactagcatgcgggtttgtgctttggatcagcaattttcagaagtaaaatgcatatgcatatagaacagtacgtacatcgttaaggtacgctgatcaagtgtatttgcaaggaaggagtaacatgagctgatgcaatcttataattgtacattatgaaaaacagtgcccctcatttgtccatatatgctatgaatacgtagtataatttgagttactccccccttcctttttactgtaaacattcattttgggtaacatgatgctgaaggacttttgtatt

SEQ ID NO: 23836 - DNA, 429 bp, Glycine max
ctagagagggcaaaagatcatctatctttctgcttcaaatcttcacgctcatcatttacaataaatatgtgggaaattgatagcacagtaaaaaaaggaaggcgcaagacaccaggtactgctgggaacaaaaaatcccttgaggttaacttacctgaaagttctcgaaaatttattacttgcattcgaaagtatttgctgttttatctcaaactattggaagagactggagatagatgtattctcgtacgttcatatgttgctcttcgtgcagataaacggttttcattatgtattgaagatcttataccagtggctatcggaaggtatctaaaggccctgatttcaactatgtgccattctcagactactgcctctggttcagtgagcagttctaacaatgtgctggagagaatgtttgcattgttc

SEQ ID NO: 23837 - DNA, 281 bp, Glycine max
cggctcgagtgcaaaagttgacatgtcaagtggtttgcagatttattacctttctagttccaacagcaatggaacagatgaaaattgtgaacagcttgggtggaagaaacttcaagagtatgacccttctcaaatgcattggaaatatcttagtgatttagctcgaaggaaatgtaactgtggaagatattacttcggtagaagatgagctagaagaagacaattattatgctagcttgccttttgctgcacttatatcttttctcaaggtaaaggtttga

SEQ ID NO: 23838 - DNA, 350 bp, Glycine max
tgttgagcggtatgtcactgaagactctctaataggtcctcgtgaatatccctttttatatgctcgcatctttacgtcagttgctaaattgtcttctttgataagcaatggtttactagaacactttctttatttagcaatgaaagcaattacaatggatgtgcccccacctgtaaaagtaggtgcctgcagagcacttactaaccttcttcctgaagcaaaaaaagaaattgtccaatcgcaattgttgggtttaatgtcatccctcacagatcttcttaatcatgcatcagatgacaccttgctcatggtacttgatacattgcttgctgcagtataagcaggtcatg

SEQ ID NO: 23839 - DNA, 453 bp, Glycine max
tttgagcccttgagttgtgagatagacacacgtcctctatttttggtttgtgaaaggataatattattgatcttctatgggataaatacagcaaagattccatagttgaatattggagaataaagtggatgctggagataaaaaagtcaggtttgtttcatcaatctagttggtgttgagaacacaagtgctagaacagttaatttgtgaggttcccccctctagagcagcgttttacccttcattagtttcttattttttgttagtaccaatttttaccttcatccactttgatttgatatcataatggtgtattctaggagtagttcattagatttgctttgttacgggtccattgaattggggaactgtttgtaggatatatatatttattgttattcattatgtacgattcccagacattggaaatgtgcagaaaattcatttttctct

SEQ ID NO: 23840 - DNA, 535 bp, Glycine max
tggaaaatctgcccttgtgagccacttccaaaattcaagtttgatgaatgaagataaacgatgtcgccctattctcttccactcagagggttctgtagttggtgatctgattgtacaagagcacctttcttccaactccaacaatctaaacattcaggcacctaggccaagtgagttctattcaagtgattttgctgggagtcctccaaaggcgggcccttctgcaagcttggatgcaaattaacatttatattagatgctgagttgcttagccggaatccatcgccgttaatgttaacattttgcaaatatgtctctctctctttggggctgcttgcatatatttaggaaggataacagaaggatgtagattttgtaccatagccattttcccaagtattttgccagcaagctttagaattagaagcttggagcatattttgattgatttgctgcacaggtaactgatctgattatgtacacaaggtggttgtggtggtgatggtgggagcaaaggctgaagagttgattgagc

SEQ ID NO: 23841 - DNA, 612 bp, Glycine max
ggatgtcactccgccctctaatttgatggagcatccacctcttgctgtttttattaatggtgtatctgcagcaatgaatgagctacgtccatgtgccccaataagtctaaaacatgtccttgcccaagaattgattaagggattacaggctgtttctgattcattgttgctgtacaatacaactcgagttctaaggtctaatgagtcaggacttttcctctcactctgttgggcatttatagaggctgcctatcctcattgtgcaacttggtctgggcgttgctatctgggtggagcaactctcattatggatgcaaagaatgtatactatgggatcagccgcttagtagagacttcctctgcaagagaactcccaaaaccagtgaacaatgtagaatccaagagcgtacgtagagaatggcgaatcgccaaaaatggaaaatggagaaacacctgatgccaaagaatctgaagccgtcaatagtgaagaggtgaatgaagaaggcaccgaagaaggccctactttgcagacagatcggggaagacactaatcttgaaaagccacttgaataatgacattagagatgacagttttaattttcttgtttatga

SEQ ID NO: 23842 - DNA, 185 bp, Glycine max
gtaccaaagaaaaatgagacttccatattagattccctttaggatggtatctataattatgaatttcagtcttcatggcaataagaactgtcttatcttgtactcatgtgtgcatgctccatgttctgtgtgctgcaagttccacagaatcaagtattattttctacaatggacatccacagggg

SEQ ID NO: 23843 - DNA, 312 bp, Glycine max
gtaaggaagaaggcaagaactggttattacaaccttcaacggaaccggcgttggatttggtttcggcgtaggttgcggtttcggtataggatggggtttcggaggtctgtgccttactttcgaatcgtttttgacatttctctaccttttgcaatttaattttagtacgcaattttgatactccactcgttgatcttagaattatgagtctttttcccctgctgtttactagcaatctttttaagctgttgcattcatttattatccaatttagttgttacttccaatttcttttttactttttgttctaat

SEQ ID NO: 23844 - DNA, 257 bp, Glycine max
gaaagaaatggttattacaaccttcaacggaaccggcgttggatttggtttcggcgtaggttgcggtttcggtataggatggggtttcggaggtatgccattgaacttattgggtctcggtgctcgtggaggttgtggcgttggagtagggcttggttgggggtttggtactgcctttggtagcaagtatcgttcctcacgggtcacatttcaaggagtggattttcatagcaaggagaaagttaacagcacggagt

SEQ ID NO: 23845 - DNA, 259 bp, Glycine max
tgttgattccatgcatgtatttaccatgagtgtgcttcagatatgggaacaagataagctagaaatgcataggcaggtgatgcagaataaggatctagagagacaggtgagacatatggatagagatgaccagtagctgcagaagcatattcaagcgttagagcgacaggtgattctagtatctggagcaggtacaggtctctcagtttctgcgaatatcagatatcagagtgactagagcagcagtctaccagctagc

SEQ ID NO: 23846 - DNA, 383 bp, Glycine max
gcccttattccctcttggctatggactaactccaactggttgatcaagctgttcaactcttctgaaccaagtcattggtagttgacctttgaagtcatgatctccaaatatgacatctgtgattccctgtgcttcagtacctggcaaccatgcagcaacaagagcatctatcttttatcctaccatgtaccattcatgcatgtatgatactgtcagttaccctatttgaaatttgtataactaatgaactttgaggatggccataattgattgtatgtattgaatattctcaagcttcttgactgacctagcagatcttataatgttgctgagaggacatgtcctttaccgtttcacaaaaaaaaaaaacaagggcggccgcc

SEQ ID NO: 23847 - DNA, 533 bp, Glycine max
gagaattatcaatgattattgcagctggcccctttactacaacagacaatttgttgtttgagcctcttatagcactgctgacacatgcaaaactaagaccaccacagttgcttgtattgctgggaccatttgttgattctgagcacccagacattaagaaaggaactgtagacaggagttttgatgaaatatttgaggaaatcctgaagaagttggaagaatatgtagattcagctacgcgtgttgttcttgttccgtctatacgtgatgctaaccatgattttgtttttcctcagcctgcattggacatgaaatctcagatagtcagtctcagtaatcctggaatctttgaggcaaataaggttaaggttggttgctgcaccgtggatattctgaagcaaatcagtggggaggagatatcacgaactgcagcagatggaaaacccattgatcgcttgagtagactagcaaaccatatgcttaaccaacaaagcttctatccactttacccaccagcagaaggtgctcccttg

SEQ ID NO: 23848 - DNA, 402 bp, Glycine max
agacagctcagtttgtacatgagagccagtgtcagatttgggatacagctaagttttttttttttgaagtgttgaggagttgtaggatcatatcctacggtgggtatcaccgcaggctaacaattctccaacggaacatgtctcatcggcatcaccgatccctgcagaatattgtgtaatcagactagtcactaatctctttggttgacaataattgtcataataccagtgattgttgcatagaaaatttgcccatgtatttatacctcagcacaccatgaaattagaaggtaataaagtggctttttggcattcaaatattggtcttgagcctgaatctcaagcgtttgtgttcattgacgatgatcaagtttccgatggatacaaattacaaaaccagaa

SEQ ID NO: 23849 - DNA, 293 bp, Glycine max
cgtttaccgacataaggaaactctttctcttcttcgccagttttggactttgatccctgcagaatattgtgtaatcagactagtcactaatctctttggttgacaataattgtcataataccagtgattgttgcatagaaaatttgcccatgtatttatacctcagcacaccatgaaattagaaggtaataaagtggctttttggcattcagatattggtcttgagcctgaatctcaagcgtttgtgttcattgacgatgatcaagtttccgatggatacaaattacaaaacc

SEQ ID NO: 23850 - DNA, 788 bp, Glycine max
aagaatgatggacctcaaatccaagaaagccatctctgtgtgtaaacaagctccagcttcttgtcatatacagtttgtctgcaaagggcgcctaatacacacaagggatcgcagttccaatgaaggtaatgcagatgtcacatctcctttggtgcagcaagtgccaaactctgtgagatctttgagatctcagtctgtaacacttggtcaagatcgccgagcaaatctgaccaatcctgctctagagttatttcgcagagtaaggactgccaatgatgggcatggagcaagctttatggctgtttcttctccagaagacactgaagggctttcaactccacgtgacaggatgggcaccgaagtaagttctgatgaatcagataggctgtcaaggatgagtccttcgggattgtcaacatgctctgacagtgcagttgaactagcattcaccccaagtttgattaatgaaagcagtgagaatgcattggagttgactttgagtcgccggattatagaggatcttcattattcatctcctcctagtacactggatggtggaatggatgatactatctacgaacaacttgagcaggctagagctgaggctgagaatgctacgctaaatgcataccaagaaactgtaaggcgtatgaaagctgaaaaagatgcatttgaagctatacgcaagattaaagcttctgaaagcttatatgcagaggagttgaaccagaggaaaatggcagaggaaaaacttaggatagaaaaagaagaacttgagaatatgaaga

SEQ ID NO: 23851 - DNA, 516 bp, Glycine max
gacacatggagaactcatcatcatcatcttcatgttcaaactatctctaccgagagtgcctccgcaaccatgcagccagcctcggtagctacgctaccgacggctgtggggagttcaccctggacgtggacagcgtctcgtccccctccctccagtgcgcacctgcggctgccatcgcaacttccaccgcaaggtcacgtgccccgcggtggaaggagggttgcaggccgtgactggagggagtggggacatgatggagtactccgggggcggagacgtgggaagaataacggagatgggagagaggagtggcggcagcaagaagaggttcaggacgaagttcagtgctgagcagaaggagaagatgctggggttcgcggaaaagctggggtggaagctgcagagaaaagaggtggatgatgagattgagaggttctgtaaaagtgtgggtgtcactagacaggttttcaaggtgtggatgcataaccataagaacaactccaaccttctactaat

SEQ ID NO: 23852 - DNA, 323 bp, Glycine max
agaatagatcaggactaggtttgtcggggtaactgccaagaggaggagggagaagggagaaggcttcctatttgaagctcattgttccctgaaatgaattttgcatgactaactacctacctgcgagttgcatggaaatttcacaattattttttctgctgcctctactgttttgcaggccaacatctggttgcatacttgaggcgttgcatgttgatcctgcttctggtgtgtcaattgataaggataagggcactaaagtcttgaaaccgtcagtaaggggtgccttcatccaacagtgtatatgtgaatggacatttttg

SEQ ID NO: 23853 - DNA, 338 bp, Glycine max
cctatatcttcggtttcactccagtccactccactgtccttctcccctcatcattccgttccgatctcatcatcgccaaggaagatgaacggtgcagggagacaggggctgagatctggtgcggcgggggtgcaccaccagcgccagtactccgataacttcctcgacggctcttccaacggcaacaggtggctccagtcggccggccttcaacaccttcaatcctcctccaaccaacttcctccgcttcaggactataacttgtacggaggtgcacagggaggaagaatgtaccggaatgcgccgaggagctttaacggaggaaatgagttttatat

SEQ ID NO: 23854 - DNA, 352 bp, Glycine max
aagaagcaacaagaagaattagaaagagttgctaaaactcttcctggaagtgtaccatcttcagtgaaacaatttactaatcgtgctgttatttctcttcagagcaacccaggctggggatttgacaagaaatgtcatttcatggataagctggtttgggaagtgtctcagcattacaagtgacctactggcctgcttgcattttatttttattttactttgagttttgatgaaacaaactgctactactcttgtaataatgagttgttgtagcgttattgctagcaattgttacaactctcgtatactttgtaataaatgaattatcattttaattagactttcaaaaaaa

SEQ ID NO: 23855 - DNA, 742 bp, Glycine max
ttcttgttctcgtcgtccttcgtctttccactcacaattcccaacttaccaacccatttcacttcacttcccctagtcaattaatcgattccattccacaatgcagtttcctccgctttccctgcaaccaaacagcacctaattccttccaaactcgagccttcttctctgtcatgaaccgcttgtcgcagctctcatcgtacaccgccgccatagtcggaagcaccgttcgcctcatcgcgaaccgctccctgcgccaccggtgctgctcgttcccggcgaaaccagagtaccgcggaattaggtctttccgttcagaattcgcgttgaccgccgctcgctgctactccgccaagaaagggcgcaagagcaaggcggagcctgaagtgccggcggtggtgatggagcaggagaaagacgctttctacgtcgttcggaaggggacgttgttggaatctataacagtctcgctgattctcaagctcaagttggatcttccgtatgcaatcctcctgttagtgtgtacaagggatactcgttgtcaaaggacaccgaggaatatcttgtctcacatggactgaagaatgctttatacacaattagagctactgatttgaaagaggatttgtttggcatgcttgttccttgccctttccaggaaccttctaccaaagagggcacatcaaataaggacgtatctaaacagagatctttgggagtgcttgcacaagatgagaaagta

SEQ ID NO: 23856 - DNA, 342 bp, Glycine max
ggtgcagcgacagtgagtggaacgcaatggttggtggtggcgtctctcgcatttcccaccattttcgagactgcgacttccatttccatttccacttcacttttacttactctgcttttcaaactttccacctttcgtctcccccactccctctcaaacctcgctggggaggcatttctcaaaccacagttccctcaaattaccgctgttttggcaccccacctaagtcccccggcgaaattcctctccttttcgattgtttcagccaacaagaagaggatcgtgaaattctctctgatggaagatctgccgtggcatgtggaattgtagcattgggaaagt

SEQ ID NO: 23857 - DNA, 454 bp, Glycine max
gtagaaagagatgataccttgaggatccaaaggctcaggaagaaattttacttccactttcaagattatgttgatttgattatctggaaggtgcaattcttggaccgacaccatttactaatcaagtttggtagtgtagatggaggggtgtcccgaaatgctgatcaccacccagcttttgttgctgtatataacatggatacaactgaaattgtatcattttatcagaattcaccagacgagctttatctgttgtttgagcagttctgtgaccacttccatgcaacatcaaggaattcaatgtatatgaatttcatatcttctcattcaaataatatccacgcactggaacagctccggagcattaaagataaggcaagcagctctgcacagttcgtgaagaagatgcttgcctctttgcccttcagctgtcagtcacagagtccttctcctt

SEQ ID NO: 23858 - DNA, 458 bp, Glycine max
cacattcattagtccattacacaccaccttatccattaaccctcttccttgtcaacactcccctacaacaaaaatacaaattccaattaaatcacacataagcaagcaacaaaatgtgcagttccatgaccaaggtgactgtaggcatagaagcagccacagctacctctctggtagccagaatcaacggccggccggtccttcaaccgacttgtaaccgatttcctaaccttgagaggagaaattcaatcaagaaactgtcaccaaaatcaccatgtcctccatcaccaccacttccaagcaaaacctcattggcacctctagtttctccaaagtctaagtccccaaggcctccacctataaagagaggcaatgagagtactggacttaactcaagttctgaaaagattgtgacaccaagaaacaccataaaaactccaactctagagaggaaaaag

SEQ ID NO: 23859 - DNA, 354 bp, Glycine max
gtgattggtggcaggagccggctgggaatctcgaagggaaagatgcctccactataacttgcaaattccaagattgaacgcaccacaccttgttcatcttaatagtatacagattcgagatgcatgctatggagttcctcaccctttcagttactgtggccgcagctgctttttctatcctcttcttcttcctgcgacatgcgggagccggagcaggatcactccccccagtaccagctgttccaggattaccagtgattgggaatctgctccaattgaaggagaagaaaccttacaagaccttcacccagatggctcacaaacatgggcccatctattccatccgaaccggtg

SEQ ID NO: 23860 - DNA, 288 bp, Glycine max
attgttcgtgatatgactgcagctggtctgggattaaatgagttctgctatgctgggcttatagttgcacacaagaataaaacacctcttcctgatgattttgctgcaaaagttattgagtttgtggagagatcgaagatgtggtcttctgttgaaaccaacagtgccaatgctgagaatgtgatgatgggtgtttctgatgaggagttatacagcttaccaacagcagaatatgctcataggcgtggaggatttttggttagacaatttacagcatatcacactgca

SEQ ID NO: 23861 - DNA, 456 bp, Glycine max
ctttatatccactttggccctcactggaaaagtagtagtagtggtacttaaacgccattaaaagttatgtgatctttggaagtatgatacaggacttaggagtttggacaaagtacaaaaagcagataaaatgatgcccttactgtggaaaggtgagtgaggtgggaactgaagttaaaaagagaatctgaaagacatgcctctgtctttgggggttatatagggtttttggctgagtagcaatttgttgttgttgcaaccaatttttgaagaaaagatgggggagacagcagcttccaatcctgctttgcaagtgtctgtttcatttggtagatttgagaatgattccttgtcttgggagaaatggtctgctttctcaccaaacaagtacttggaagaagttgagaagtgcgccactcctggatcagttgctcaaaaaaaagcttactttgaagc

SEQ ID NO: 23862 - DNA, 296 bp, Glycine max
cactgccgtcttggctctctctctctgaacccttcagtgagacacaacacaagtcatagtccattgggcatgcctgtgtatctttggcggttatatagggtttctggctgagcagcaatttgttgttgttgtaatcaatttttgaagaaaagatggggaagacagcagcttccaatcctgctttgcaagtgtctgtttcatttggtagatttgagaatgattccttgtcttgggagaaatggtctgctttctccccaaataagtacttggaagaagttgagaagtgtgccactcct

SEQ ID NO: 23863 - DNA, 698 bp, Glycine max
tgacgatggtgtgtgcacaggtcatgggaaaccatgttgcagtcacagtgggtggatcaaatggtcattttgagctctgtgtgttcaagccaatgattgccagttgtctcctgcattcgctgagactgcttggagattcgtctgcttcctttgaaaagaattgtttgagaggtattcaagctaatagggaaagaatttcaaaattactgcatgagtcacttatgcttgtcacatccttaaacccaaaaatcggttatcgacaaggcagcaacagttgccaagacagctcacaaagacgggactactcttaaggaagctgcattgaaactcggagtgctctgctctgaagattttgacaagcttgtggtacctgagaaaatgcttggaccatctgattgattggctcgaatgttttgttcttataattccttgtttcatcatcggctccattgaagtattaagtattatttatacgaaagcaaaaagcttatatacatatatcctagaacaatgcaccaaagaccttagggtcaaggtttataaaattgtggttatgattgcagatgcgattatcgcgattgtggttattgcagcagctacagcgggaaataatcttatgtttgtacctgatactaaaaacatgtaattctttatgtaccttttatttagaatgttatataaacttcttcttttttttt

SEQ ID NO: 23864 - DNA, 526 bp, Glycine max
agaactgggtcctttgtatagcatggtcaccagatggaaagtatcttgtaagtgggagcaagactggagaacttattggcagggactccccaaactggaaagtcattaggcaatccactaattggccacaagaacggattactggtatctcttgggaacctgtccacctgaatgctccatgccgtcgctttgtaagtgccagcaaagatggggatgctcgtatatgggatgtctctctaaagaaatgtgttatgtgtctcagtggccacacacttgcaataacatgtgtagaatggggtggagacggcgtgatttatactggctcgcaggattgtacaattagagtctgggaaaccacacaagggaagctaatccgtgaattgaggggacatggccattgggttaattcgttggcattgagcactgagtatgttcttcgcactggagcttatgatcatactggaaaacagtattcatctccagaggaaatgaagtacggtgctcttaaaaggtatcaagcatgaga

SEQ ID NO: 23865 - DNA, 570 bp, Glycine max
gtttttactctaaatttcttatcttgaaattttgcgcagtttcagatttagaattgttgatcagaaaaggttgagggtgaagaaagagactagtgaaaagcaagtatggggatggactactatgggattttggaggttgacaggaatgcctcagatgaagagttgaagagagcctacagaaagcttgcaatgaaatggcaccctgacaagaacccaaccaataagaaagaggctgagattcaattcaaacagatatctgaatcctacgaggttcttagtgatccccagaagagagcaatttttgatcggtatggagaaggtggccttaaaggtggaatgccaacaccggatgaaggtgtggcttcattcttccgaactggggatggtccaacagcatttaggttcaatcccagaaacgcaaacaacatttttgcagaagtgtttgggtgttcaagcccatttggaggaatgggaatggggtttggctgcggtggcagaggcagaggcatgggcatggggggtgggtcgtgggtgtcaaggtcctttggtggaatgtttggcaatgacatg

SEQ ID NO: 23866 - DNA, 460 bp, Glycine max
gtgtctctctctgctgctgcatcaaaagcttctgcagcaccatcttcagccggaataacgcctccagctgtgacaattaatgaacctgacaagatgtggcattaccaggatccatctggaaaagttcagggaccattttccatcgtgcaactacgcacatggagtaacacaggatactttcctgctgatttgaggatttggagaaccactgagaagcacgatgattctatactcttaacagatgccttgacagggaatttttctaaggaaccatcaatggtggataaagctcaatcggtgcatgatttacattacccatcatcatactctaggaagtctccacaacaaggtatagtaggtcactagctggagactgactgtcattcagatcagaatggtggatcttggaattcacatagtactctgggttctccgggacaaacaacaggaggaagttgga

SEQ ID NO: 23867 - DNA, 376 bp, Glycine max
atggagaacaaccctagttcatccagagttgacagaaaattcattgataggaatagaagaaatcaaatgaaagctctcttccgcgaactcaactcacttgtgcctcatcaaagttcaaaggaggccattccactgccggatcagctagaagatgccacaaactacataaagatactacagattaatctggagaaaatgaaggacaagaagaacatgctactaggaattgaaaggccaaatgtgagaatgaataatggtggaaggaccgtgcggttaaattctccacggattgagatccaacaaatgggttcagccttagaggttgttctaataactgggttcgattgtcagtttatgttcagtgaaaccattcgtg

SEQ ID NO: 23868 - DNA, 483 bp, Glycine max
tgatgacagttgtttagagaaattgtagattacaaggtcgtggaacatcatcaacgattaaaactagcagctgaaggtggccagccttgccaaatataaatttgagcattttatttgcatccccattttgacctgctatgttagtgtttttgtcatgttatttgggccatgtggcccgatgaggcagattcgctgaaaaagctacacctagatgcattttgtgagccaaatttgcaggatacttcggctttattaattattactttgttaggaatataggaggaggggctttagcctttaattacttggaagcagcatatcagaaccttttcacctcatcctatagagcaagaagccaggtttttgagagcatagaagacaaattacatttattaataaatttatagaatatgctcaaagtttcaattttttttatttttttttgcgaattttatttcttctaaattccaatgaagattctac

SEQ ID NO: 23869 - DNA, 367 bp, Glycine max
gttcggaattcggctcgagatttcggtagacggtagctattaacattacaacacctttttattatttcacctctctctctctctctctcattgccatagatctgaaacacagatcacagggttaacgctttttgacccttctctccattggtcattcccccgaatacgccgcacctataatctagcaccgaccggaccctccatacccgttttcgcgcggatctaggagctcagtgtgtgagtgaataaggttgttgttggggggtttgcgatggctccgaccacgatccggaaggcgattggggtggtgaaggaccagacaagcatcgggatagcgaaggtttcgagcaacatggcgccggagatg

SEQ ID NO: 23870 - DNA, 856 bp, Glycine max
ttgcatttgggggatccaaaaaagagccatcaaatcaggtttgacagaaagtatgaagttaatatttgagttcattctttaacctttttcttcttgacctcaaatcaggtataggtgttgataatggaaaagaatgaatcagcactagggagacaatcagctcccagtaaatgttcagcatctgtactacttgaaaaacattcatcatccactagattggccccccaacttaatgattgttctcaacgtttagttgactcagttgctagacaaaatctagcttctgcaattgaacatggttccggcaggagatctctatcagaatccctggttgttgatcccaattttcccccaaccaacacctcccttcgtaagcaatttgatcacgatgaagaatacaatactgatctcaagatggacaagaactcagatgaaatattctttccctcgggcagtagatcacagaacaaacgaaaatgaccatggtaaacagatgaatagtagtggagccaagaacattacggaggaacaacaggcactgttatctggaattccaatccaacaaaaccttgtcatttgaaaatgacatgctagaaagtgataacgtgtcatttactgaaaacattaaatcaggatcactgactacttcaaatgtctatcattgctatgaaagtaaattggcttccctgataaggaaaaatggaattctggagggacaattagcagcttccttagcaagcaaagaagccgcagagaaaagtttggcatctgttctcaaaagtagacaggaaatggagaggaaattggcggaatcacataaggagatggaattgatgagagagaagctgaccagtct

SEQ ID NO: 23871 - DNA, 341 bp, Glycine max
aacacgttgcatatggaagcctgcttttatgaatggaactgattggcctagccctgctgcaaatttatctattgttgagcaacaaatcaagaaaattctagcggccacaggtgttgatgttcctagcctcgctatagatgggaatgctccagctacacttcctttgccattggcggctcttttgagtctcacaataacatataaactggataaatcttgtgagcgctttgttattttggctggcccatctttgattgccctttcttctggttgcccctggccatgcatgcccattgtaggtgctttgtgggctcagaaggtgaagcgctggagtgactttt

SEQ ID NO: 23872 - DNA, 327 bp, Glycine max
  unsure (1)..(327): unsure at all n locations
attccctggagttctccaaccatgagggcaagaattggttgaatgctgaaaagtgtgcggagaaagaagaaagaagcaatgaattgagataatagaatggaggttaaatccagagctccggggaaaattatcttgagcggcgaacatgctgtggttcatggatccaccgctgttgcctcttccattgacttatacacctacgtttctctccgcttctccactccttcagacgactaagattcgttgaaactgcagctgaaggagacggctttggagttctcgtggcaatcanccagaataagagcatcctttcctcagctatcttcc

SEQ ID NO: 23873 - DNA, 468 bp, Glycine max
ggagttgtatcaaatttcaaagctttatgatggtgctgaagaaaagctttggggtgttttgacgcggcaaagaagtgtgctatgtctgctgatagttcgatatgcgaagagaactgatgagcatcagtggattctggagcataggtatgtaaccaattttgagtctagaaggcatttggccatgatgatgttcccagaggtaaaagaggactatgaggagttacatgagatgcttattgacaggtctcagttattgactgagtcttttgaatacatcgcacgtgctgagcctgactccctgcatgctggcctgtttatggattcaaaaatgaggaagctactggcccaggtgtattaagggagtggtttcttctggtatgccaagcaatattcaatccacaaaatgctctttttgtggcatgcccaaatgatcaaaggagatttttccctaatcccgcatctaaggta

SEQ ID NO: 23874 - DNA, 510 bp, Glycine max
  unsure (1)..(510): unsure at all n locations
tgacggaccgacccgatttggaacgctgtcagggacgaagccaagctcgaggcggagaaggagccgattctgagtagcttcttgtacgctagcatnttggcgcatgattgcttggagcaagcattggcgtttgtcgccgctaatcgtctccanaaccctactctcttggccactcagcttatggatatcttctgcaatgtcattttgcatgacaaagctatccagcgatccattcgtcttgatgttcaggcatttaaagtcgtgaccctgcttgtttgtcgtattgctccgcgctttggtatatgaagggttatcatgctctgcaagtacatcgggtagcccatacattatggcaccaggggcgcaaagtcttggccctagctttgcaaagtcgtgttagtgacgtttttggtgtggacattcatccagctgcgaaaattggggatgggattttattagatcatgcgacaggtgtggttattggtgaaactgctattgttgaaacagagt

SEQ ID NO: 23875 - DNA, 365 bp, Glycine max
cggaggagtttttcgttggatagttccatagggaactttaacattgaagatggattgcctaagcttcctccttcgaaaaatcaaatgggtcagcactcacctagcaattcgatggacggcaaaatgtcagaaacctccacggggtttggaaatggcgaatttactgcacaggaggtaaagaaaataatgggcagtgataaactagctgaaattgcttcgactgatcccaaacgtgcaaaaaggattttggctaatcgtcaatcagctgctcgttcaaaggagaggaagatgcgatacattgctgaattggaacacaaagtgcaaactcttcagacagaaacaaccacattgtctactcagtatac

SEQ ID NO: 23876 - DNA, 484 bp, Glycine max
tgatcctatttctgtgatgaacccggatgagtgttgatgagaaaacaaaggatagagggagatctgtttaagtttgaaaacatctcttcgtcacagtctttgttctttctagttttatctcttttgttgttgttggaaggaacccgacacaactttacacagtttacacagatctgttcctttttgacactgtcaacagaactatcctttcattcactgccgccagtgatgataacttgaagaaagaatcagatatggagggtgatcttcaaagggctctatctttgcgcctacatcgtagaggagaccgaagtaatcaaagtcctgctaaagattttgaggtgggcttcttttcttcagggagggtacctcaggattaccccatgaagattgtttggaaaaaagggtttgttcggttggttcttgtagcaaggatcttgcggatgttattaattcttcttgcattattgttccatatatggtc

SEQ ID NO: 23877 - DNA, 727 bp, Glycine max
cggctcgagcccggttttaagctgctttggaacacggtgaaatcatttcttgatcccaaaactacttcaaagataaatgttcttggaaacaagttccataacagattacttgaaattattgatgcaagcgagctgcctgaatttctaggtggtaattgcacttgtatggatcgaggtggttgtatgagatctgataaagggccatggcaggatccaaacattttaaagatggttcttagtggtgaagtacaatgttctagacaaatagtaacagtttctaatgatgaggggaccgtgatcgaatgtgataaggcatgttatccaatgccaataagaagtagtgatacatcaacagcagaatcaggatctgaagtcgaagatattacttctcccaaagcaagtgggaattatacaaacccaaggttaactcctgtccacgaagaagcaagattgattggtagggctagtggtttctctgagtatgatgagtatgttcccatggttgacaaggctgttgacctcgggtggaaggagaaacaagtaacaactcaaaactcatatggctcaacagaaaatttcctactgagggctggaaaatctggtggaaactgtgcatatatcttggctgttatcgtgggcttctttgttgccatttttacttttgttcgttcattagcacttcgtgtgactaagagaatacaagacacaaaatctgattctgccaaaa

SEQ ID NO: 23878 - DNA, 535 bp, Glycine max
  unsure (1)..(535): unsure at all n locations
ggtagcggctcgctgcgttcataaaccctcattttcattgcgcaagaaaattgaagagaagcaaaaccccaacatccctttcgcctctgccctcaccagaacagaacatcgtcgtctcatttctgtccacatcgtcgtagcagagaagaagagaacctcttcaatcggaaatggacgccggtaacggttccggagatgccaaactcgacaacacacccacgcaaatggattcggattccggtgctcaagcaaaagacaaagaaaaggaggaactcactgagaatatgaacaagttgcatattgagggatcttcgtctggaagtggatcatctaacatcagaagaaaccctgtcatcattttagntgtgggaatgggagggagtgggaanacaacactcatnnataggttggtgnggcanacacatgtgagagacatncggngttatgtgatgantctcgcccccncccacatgacactcccatntggtgntaacattgatgtgagagacactgntatttntatagacgtcatgaa

SEQ ID NO: 23879 - DNA, 542 bp, Glycine max
  unsure (1)..(542): unsure at all n locations
ctttctcacttacactcacacaatctctctcttctatgtgtctttctctttccagcttggtaatattagtacaagtagagtagtagtagctcctggtggtgttgttgttgtgttgtgatctattagaaggttagatatttatgccacattttgatgtttatgcttagtacccaattgggtgaaaaaaattggtttatagctagctaggcatttgatgctcccgtcagagaaacccccctgcaaagggaaactctgctaaaataaattctgtctctttcagtcatcgcaggatttttgagttagaatttgatgcccttggtcgtgccttgttcttggattccaaattccaatcccagaattttaatggcaagagtctcaactttcaacaacccttcctgtcctatcttttaaatcagaagaaaataagaatagatactcattgttttgttcactcatgtcatgttggagcttcttaattagaagaagcgtggtgttgtgttttccactacgacaaatanagtcatcatctaatctttgcttaa

SEQ ID NO: 23880 - DNA, 735 bp, Glycine max
caacaactacgatatcagtcttccattcatcaacaaccactctctctcccctctctgcagcaaaaccaattctccggcgacatctccggtcaggttccggcagcctctccggcgactcggcatggcaactcaatgaatgcggaactcatgccgccggggctcctcatgtcggtttcctgcctctccgactacgacctcctctgtggcgaggacacctccggagtcctctccggagagtcgccggagtgctcctcatccgacatcggctcctcaccacttccgccgtcacctccgccgtcgccgacgatgacggaggattgttattccatcgcgagcttcatcgagcacgagcgcaacttcgtccccggattcgagtacctgtcgaggttccaatctcgctccctcgacgccaacgccagagaagaatccgttgcatggattctcaaggtacacgcgtattatggctttcagcctttgacggcgtacctcgccgtcaactatatggatcggtttttggattctagccagttgccggtgagctctcatttctcggcagctttttaaggatgtgttatttccgaaagttgaaaaactcataagagtcattatcattattattgacagaataaaatgttaatgttactatctaatcacaaactgtgatataactttattaatttctataataaccaatttaaaaattatatggatagcttctgattaatcaatcatttg

SEQ ID NO: 23881 - DNA, 932 bp, Glycine max
atccgtcttccattcatcaacaaccactctctctcccctctctgcagcaaaaccaattctccggcgacatctccggtcaggttccggcagcctctccggcgactcggcatggcaactcaatgaatgcggaatcaccgccggggctcctcatgtacggcttcctgcctctccgactacgacctcctctgcggcgaggactcctccggaatcctctccggagagtcgccggagtgctccttctccgacatcgactcctcacctcctccgccgtcgccgacgacagaggattgttattcgatcgcgagcttcatcgagcacgagcgcaacttcgttccgggattccagtacctgacgaggttccaatctcgctccctcgacgccaacgccagagaagaatccgttgcatggattctcaaggtacacgcgtattatggctttcagcctttgacggcgtacctcgccgtcaactatatggatcggtttttggattctagccagttgccggaaacaaatgggtggcctctgcaacttctatctgttgcatgcttgtctttggcagcaaaaatggaggaacctcttgttccatctctcttggaccttcagatagaaggtgccaagtacatatttgaaccgagaacaattcgtaggatggagctacttgttctgggtgtcttggattggaggctaagatcagtaaccccactttgcttcctcgttttctttgcgtgcaaagcagattcaactggaacttttacccggttcctcatttcccgggctacagaaatcatcgtatctaatatccaagaggctagctttcttgcttacaggccatcatgcattgctgctgcagccatactcactgcagctaatgaaattcctaattggtctgtggttaagcccgagcaagctgagtcctggtgtcagggaataag

SEQ ID NO: 23882 - DNA, 353 bp, Glycine max
aatttccaagtcatgggttacttatattcgtatgttcactgcctcttctatcccattttttcctatttctttctttctttaccatcatattacttatcagttatcacatctatcactctctttatcagttatcatatgaatatgtgaatgtcataaaccatacaataagttctcatgttttaagaggctcggtggatctggaagcttgaaaactcaattgatgtgcgtgtcaagataattctgcaatcaatgattaagttagcttggatttgattcataaaggaatgtaccatgcttctcagaaaaaaccagagaagaggatcgcaagctttgtagaattaatagctgctgag

SEQ ID NO: 23883 - DNA, 396 bp, Glycine max
ccaaaattaccagtcctcattgagcatctaaccatggctgctcctcttcaattcttctttctcttcaccctcactctcttctcatcatcattctccgagcaatcccacatcgaactaccctcaaacaacaacaaccctaaccctaaccctttacaaaaactgtccaatctccacttctactaccacgacataagagacaacgaaaaccccaccattgtgcaaatcgtggacaccccaaagaacgttccgaacgggttcgggtctactttcgtgatggacgatgcgatgaccgaaggaccagagctgagctcgaagcacgttgggagagcccaggggctgtttggcttggcctctcttcaggaccttgggatgttcatgctcaccaatttcgctttc

SEQ ID NO: 23884 - DNA, 269 bp, Glycine max
caaatagctaccaaaactaaggcttttttcctttcttcctttttcaatatctgatatatttttcaatgtattcatagtctattatgaagaccttgttgcaaaatttccctttctgctgctgttgttgaatccccaaaaggccacaaatttattgtttcagttcagatttagcattccattccatcatcagttgcaagtttgcttagaaaacgtctacattttccattgttcatctgagacttgagggaaaggctgaaaacgcttccttt

SEQ ID NO: 23885 - DNA, 895 bp, Glycine max
aaaatgcagagattgaaaaaattgttcaaaccataataaaaaaattgggttccaaattttcaagtcttccgaaagataatctagttgggatggaatctcgtgttgaagaattagtaaagtgtttgcgtttggggtctgttaatgatgttcgagttgttggaattagtggcatgagtggaataggaaagactgagcttgctcgtgctttgtatgaaagaatctctgatcaatttgatgttcattgtcttgttgatgatgtaagcaaaatttatcaagattctggtagattaggtgtacaaaaacagttactttctcagtgtctaaatgaaaaaaatctagagatttatgatgttcccaaggaacatgtttggcatggaagaggctacaaaatgcaaaggcacttgtagtttttgatgaagttgttaatgaaagacaactacagatgtttacagggaacagagactctctattacgcgaatgcctaggtggagggagcagaatcatcataatatctagggatgaacatatattgaggacacatggggtagatgatgtttaccaagtcccattgttggatagagaagaagctgttcagttgttttgcaaaaatgctttcaaagataattttattatgagtggttatgcagagtttgcagatgttatactgtcacaagctcaaggcaatcccttagcaattaaggcggtgggctcatctttgtttggcttaaatgccccgcagtggagaagtgcagtggctaagctaagagaacaaaaaagtagagatattatggatgtgctgcgaatttagtttgatgagttggatgacacaaacaaggaaatatttctagatattgcttgcttctttaataatttttatgtgaaatctgtaatggaa

SEQ ID NO: 23886 - DNA, 509 bp, Glycine max
  unsure (1)..(509): unsure at all n locations
caaattgaaccttaccttttttttattcagaatctcaattcaattttcatggtggaccaatttgctgaattgggctaacacctttgattgatcgttgtgggggtcttttggtcaatattttggaactgtgaagatttttgttttagactgtgctggttttgtttggtaattttatgcactagggtgcttctgtgttactacaaggaaatgctttcctattggattgcagtgttttagttaacaatggctatcactgtgttgttcttggtgctgttgctgcaattgtggacagtttttggctctgaggttgtcctacagtcaagggattgtgactctgattgggtggcacattcgtattctagtcatggtcaggatctgttctacatanacggcaatgtagtgaacnaagttgctntctgtgaggctctccaattgtcatatgcataggggtgtgatgtgaggactactttggcagtgtcaatgtgtggtgatactctatgtgattacct

SEQ ID NO: 23887 - DNA, 880 bp, Glycine max
  unsure (1)..(880): unsure at all n locations
ctcgagctcgagccgcgcattttctgcattcccctagctgttaccgttgttctctcttccgctgttccgtttccttcctccgccgccgccaccgcagcattctctcgccaccgccgtctcgtcgcctccgcatcgccgatgaatccgtcgtcgcagtctcagtccccgcctcctccggtggcaaagaaggtggagcatgcgatggaaatgttcggcgacgtgagaatcgacaactactattggctccgtgacgattcccgcaccgatcccgaagtgctctcgtacctccgccaggaaaatgcctacaccgattccatcatgtccggaactaaggaatttgaagataagctttttgctgagataagaggaaggattaaggaggaggatgtctctgcacctttacgcaaagggccttattactattataagagaactttggaagggaaggagtatgttcaatattgcaggcgccttatatctgataaccaaaaggtgccatctgtgcatgacatcatgcccacaggacctgaagctcctccagagcatgttattttggatgtgaatgttaaggcacaacatcacctatactacagtatcggtgcttttaaggttagcccaaataacaagttggtagcatatgcagaagacaccaagggagatgaaatatatactatttatgtcattgatgctgagactcaagctactattggagagcctcttgttggtgtaacatcataccttgaatggnctggtgacaatgctttcgtttacatcacaatggatgagattctcaggcctgacaaggcatggtttcatgtgctgggaacagaacaatcaaaggatacttgtctttatgtggaaaaagatgatatgttttctc

SEQ ID NO: 23888 - DNA, 356 bp, Glycine max
atcacgttttacacaagagcttatctcaactattttgttcactgtagctgtggggttggtctggtttatgggtgctgctgcacttcaaaaatacattggaagcttgggtgggattggaccttcaggagttggatcaagttcttcctatgccccaaaggagctgaataaggaagtgatgcctgaaaagaatgtaaaaacctttaaggatgtgaaaggttgtgatgatgcaaagcaagaacttgaggaagttgtggagtacctaaaaaatccatctaagtttacacgccttggaggaaagttgccataggggattcttttgacaggagcacctggaactggaaaaactctgctagcca

SEQ ID NO: 23889 - DNA, 370 bp, Glycine max
cgacgtagctcggcatcggctcgagacagacagaacaacgctctctctttcttcttcttctctctcacattggttattgatctcagtgaagagagagatttgcgattcgcaatggcctcttccgcgacaatgcggttctccgcgacctccaccggagccgaggcggctcttcctcgccgcaactccgtcgccggattcatcggcgtcgcggcgagatcctccgccaaatcgaggctccgcttcatcggaaggaacgcgaacttgagcctccggaggaggatgagctcttatcccgttgtgaagtgcgtctctggaagtgaggcaaggcgcaggatcccagtggcaaacgacaagtagctacaacctctct

SEQ ID NO: 23890 - DNA, 336 bp, Glycine max
tcaggcatggaatttagtcaagaccctgtgattccaatatattcagcaaaacctgatctggtaaagaaagccttgaagtatgtacattctgctgtacttgataaacttggtgggaaagaactagagttgttgattgccattcttccagacaacaatggctcgctgtatggcgatctcaaaagaatctgtgaaaccgatctggggttgatttctcagtgctgtcttacaaaacacgtattcaagatcaatagggcagttatttggcaaatgtggcactaaagatcaatgtcaagatgggaggaaggaacacagtacttttgggatgcctaagttgga

SEQ ID NO: 23891 - DNA, 375 bp, Glycine max
ctttctctctctcctcatttacctagctcgaatctcatctccaaaggcaacaaacaagagcaaaaagaagagaagaaaaaagaaaaccccgtcatttcagcaacaaaactaatgcaacttgtactacaaaaatatttatactaacccactccttaccttgccgtctccaacaccctctcatatatatgtttttgcttattattcaacatcatcaacaaatcacacacacacacaaacacaaagtgatatatatctccggagagaagaagacacaaagagattcatttttagttactattatttgtattataaattagataataataataacaatgccttcttctcttcagttggataggttcaatcctatcaccg

SEQ ID NO: 23892 - DNA, 653 bp, Glycine max
  unsure (1)..(653): unsure at all n locations
agattattacatgcagnaggtgcaggagaaggttccgcgcagaatgcgcgtgccgcctccgggcgtactggtcggagaagcagttttccggggagggatatcagccgacggtgacgacggcggctccgggaggaggtgaccagccgatgtatgttatggcggcgccggggacgttctatcaccactcgccggtgatgcgacctccggcggcggcgcagggatactacgctgtgcagaggatgggttctgatggctaccgtgaacagcaggcggtgtacggaggcatggctgcgccgaaagcggggttttcgacggcggggatggttaaggggccggcgtattcggagggatatagtggcggcgtggtgaggccggcggggttgccggataatgcggcgtatgcgcaggtggcgtatgatagcgcgagtgggagacaggtttactatactgcgcagggaggagtggtgcacgcgccgccgcagtaccaggggggtccgcctcaggatgtgaggccgggtggggtttcggtggggcaggatggtaaggtggttaacaaggttaaccaaggttctgtgtgattataatagctgtgattgagattgtcattatgttaattttgaaataaataatacactaaatatgttttgcttttt

SEQ ID NO: 23893 - DNA, 334 bp, Glycine max
  unsure (1)..(334): unsure at all n locations
cacaaaggacaggttggaggttgggtaactgagtatgganatttgttgacctttgccactgtaagaggagctgctcacatggtaccttatgcacaaccttcaagagcacttcatctattcagttcttttgtgcgtggcaggaggttgcccaacacaacacgtccttcaattgatgaataaggatgatagttatgccagttgtgtaacaaaaaagtggcatgctctgatgacttttctaaagcctaaaaggccatagaaaaggaaatgtgaaaggataaaaaagactgtttcgttataagtaaccagcgattgtatggatagganaattaacgtg

SEQ ID NO: 23894 - DNA, 615 bp, Glycine max
  unsure (1)..(615): unsure at all n locations
gttggttctgccggaacaacaaacaaaaccgtcanaatgcctanaaattttaccctcaaagcaccgggacctggctatacttgtggtcctgccaaagttgtgaaaccaactgtatttattaccaatgacaagaggagaaccacccaagccatggtgacctggaatattacctgcacttattctcaattcctggctcaaaaggcaccaagttgctgtgtttccctctcatccttctataatgacacagtagtaaactgcccaacctgcacctgtggttgccgaaacaaaacagaacctggcagctgtgtagatccaaattcgccacatttagcttcagttgtatcagcatcaggcaaaacggcaaacacgcctctagtccagtgtaccagccatatgtgtcctattcgagtgcattggcatgtgaagctcaattacaaagagtactggagggtcaagatcacaatcacaaatttcaattacagaatgaactattcacaatggaaccttgttgtgcagcatcctaatttagataatattactcagctcttcagttttaattacaagtcactaacaccctatgagggcttgaatgatacaagtatgctgtggggagtc

SEQ ID NO: 23895 - DNA, 723 bp, Glycine max
tgaaaaaaacagaataggctctgtaactaacgtggtgaggccaggacgtaggacatgtgtgtttgtttgttttactcaaaacgcgcgttcggagtcccgttcaacgcaatttctgttacaaaaagctttggtgttgaacgtcgtggtttgcttcaaagccaaaccaatctgtagcagctcaattatccctccacgatccgacgaaaaaagccgacacacactcataacttgtttttctggcttctcaagatacggcgtttactttttcagatccgacgaaaaaggcgagaacgaattctccacgtgcagtgaaagttgttgagtgagatgattacattcatggacacaaaggagaaatcaaaagaggtggagagttgtttggatcctcagctatggcatgcatgtgcaggtggtattgtacaaatgccagcagtgaactctaaggtttattacttccctcagggtcatgctgagcatgcatgtggaccagttaacttcaggacttgtcctaaggttccaccttttgttccatgtagagtgactgctgtcaaatacagggctgatcctgagaccgatgaagtctatgccaaactcaagctcattcctctgaatgccaatgatgttgattatgatcgtgatgttgttggtggggctgaaactcaagacaagcctgcttcatttgcaaaaaccttgacccaatctgatgccaacaatggtggggga

SEQ ID NO: 23896 - DNA, 591 bp, Glycine max
atcgagccgaatcggctcgaggaggatctgagtgaactcaattggcgtcactaaacctcaagaggtcagtttaatttacttaaaaaggaacaacatcaaagaggggcagctaatggttttgttatgacttgtatgtcagcattcaaaacagttggtcctgctagtggcggtgcaatattaacttggtcagaaaagcatatacattcttttttcctgccaggcacccatatagtcttccttgccctgaatgttgttgaaggacttggagtactgttgatgttcaaaccattcttgagtgtgaagaagaaaacaccatcatagacgttacattgatatcaaaaaatttggtacaaggggtgaagcatttggagggtaatattgtgtattggttttgagatcatggccagtatggataatgaaatgatgatggatcattatgtgttgtatatttccatcatataagtttagactttagttattaacattttagcatgggtgaatgtgtattgaacagaattagttaaagtatggacctgtatgtaccaatatatgtgatatagagttattatatgttctttgaaaactttcact

SEQ ID NO: 23897 - DNA, 486 bp, Glycine max
caaacattaagtactgttccttaacaaaaaaaaaaaacagaatggctgagctacctagctcagaagcatcgtcatcatccgcttccagtcggaagcactcgtcttcggaggcccatttacccgccccggatcagaaaaggcccaagcaggcccgagatagcagcagcaagcaccccgtctacagaggggtccgaatgcgggcctggggaaagtgggtatccgaaatacgcgagcccagaaagaagaaccggatctggctcggaacctttgccaccgccgagatggccgcacgtgcgcacgacgtggcggcgctcgccatcaaaggcaactccgccattctcaacttcccagaactcgcggcctcccttccccgacccgactccaactcgccaagagacgttcaggccgccgccggcaaaaccggcggcatggaggttaacgatgttccgacgacgccttcgtcttcgtcgtcgtcggcgtctctgt

SEQ ID NO: 23898 - DNA, 974 bp, Glycine max
gaatttcatggacatggtggcttccatgcccgccatgaagctcgataagctctatgaaaacggattcatctgtgaagctattctcaggtctcttctgcctcttgcgaagaaatacgtcatacagatgctgcatattgatgtgtcagtggcagctaaattgttggaggaatgggtgcttccgggtggagtttcaaagcacagagtggccattgataggttggttcaattgagagttttccttgaagctgttgacagaatgaaaagacttacaaagttaatccaacatttcagagaagtctccaaaaacttttagtacaaggtggaactttgccaagggaatcaatgccttctaatattactgtgaggctcccaaccttagagaatcttgaggcttatgctctagaacaatgggagtgtttcttattgcaacttataagcccaagtcaggttgaaaagcccttgaatattagctcttccctgatgaaggttttccagcggcgtatcctgagttacagagacaaagaagctccaaaattaactgaaagtggtttccagtttttgctgatggatacaaatgcacagctttggtacatcatcagagaatatatatctaattctgaggatagaggtgttgatgcagctgaccttatctcattcatgctggaacttagttttcatgacattggggaggcatatagtgttgacacattgactagttttcagaggaccataattaatgacctagcagaccttggtttggtaaaaattcagcagggcaggaaaggaagttggtttatacctacaaaattggcaaccaatctttcaatgagcttggctgattcatcatctagaaaacagggatttgtggttgtggaaacaaattttagagtttatgcttactcaacttctaaattacattgtgagatattgcggctattctcaagggtagagtatcaacttccaaatcttattgt

SEQ ID NO: 23899 - DNA, 375 bp, Glycine max
  unsure (1)..(375): unsure at all n locations
ctcgacccccgcgtgccttgggtttcataggaagagttgggagatatttgggctatggccactgggaagacggttatgtgttcgctgagccagttgcgtccgctaacatgcgcatcgacgtcagcgtcacgattagtgccccagccacccgacctcatcaagtgggtaaccagagaaggtggcttcgtgcaccgcgccgtcaagataacacaactcgactcctccaacggactgggcctggtggccaaggaagaaattccacgtggcagtgatcttattgtgctgccgcaccatcttcccttgcgcttcacctctctccacaagacccttctctgctccatcacttggcgcgccaatcnctgaggaactatgggc

SEQ ID NO: 23900 - DNA, 370 bp, Glycine max
cgtttgcattagtcctatgaactaatgctcggttcttcaggattatgtctcgttacatttaatttagtatactttgttttttgagcttagtgaacaccgggttgtcttgtctccgattctttaatcaacttcaacctgaattcatggtggtccaaagcacaagacttagattagtgttcatgcaatctattatgcctcgttgcttctaagctctcacctttatttcattctcaagttggtcgcaaaagcttggtcaaaagcttctgttgagcagtgacgaggttggaacataaggcacggtttgccaaggatattggaagtactagtacttatctgttgcaaatagtactcgtttccataagcaacttct

SEQ ID NO: 23901 - DNA, 506 bp, Glycine max
ccatggactggttctcctggctatccaggaccagcctagagccatccctcatctacgaatacggcctcgccttcgcgcgcaacgagctccagctggaggatgccatctacttcaaccacgagtttctccagagcatgggagtttccatagcaaaacacaggctggaaatcatcaagctcgcaaagaaagaagttggtggcggtggggcggtgatgatgatgaggagcagcagcagcatcaagttttctatcaagaagtgcctgaggaagtgctttagcaagctcgtttcgcgtgaagatcaccacgaagcgatgatggcgacaacagcgatgatggcgaccgagccgaattggtaccaagggaagtggaggagggcaaggcacaatgggaacaatgaggatctcaagggagataataataataatgataataataacaataagggagttcaaagaagtagaactattgcattatcagggcctttggatgggaatggaagaataatt

SEQ ID NO: 23902 - DNA, 354 bp, Glycine max
gccaatagctttagcttatattatagacgtaccacacttattgtatcaagacacaaaccctaatcttcattttcaaccatggactggttctcctggctatccaggaccagcctagacgccgtcgctcatctacgaatacggccttgccttcgcgcgtaacgagctccagctggaggatgccatctacttcaaccacgagtttctccagagcatgggcgtttccatagccatacacaggctggaaatcctcaagcttgcgaagatagaagacggcggggtggtgggtgagagcagcatcaagttttccatcaagaagtgcctgaggaagtgcttcagcaagttggtttcgcgcga

SEQ ID NO: 23903 - DNA, 515 bp, Glycine max
gactttttcatttggggagatgaaagtgaatttgctgatatattcgatttggagcacttcaagagtgttcttgtcaatgatgtgcgggtggtttctgcattaccatcaacacacctaatgacaaggccagtggaggggagccctctccctcatgccactcccagttggattcggtcacactatctcagaagattcaacagagaaggtgtcttgcttttacgtggattggattcgaggctaacaaaggatcttcctcccgatcttcagaagcttcgatgcaaggttgcttttcaggcattaaggtttgcaaagcctgttcaggaactcggtaacgatattgctgagcaaatgaaaagcaaggaccctaccttgctcttcatctacggatggaaaaggatgtctgggtgagaactggttgtctacccggtttgagtcctgagtatgatgagattgttaacaacgagaggataaaacggcctgaactcttgacagcaaaatccaacatgacttaccat

SEQ ID NO: 23904 - DNA, 346 bp, Glycine max
aaagaggttctgttctggaattgcttgaagttgaatcaacaatctcttgaggccattgcattgaatgcacagatcaatgtgatgaaatttgcaaaccgacgcctctctgtatcaaatcacgatgatgttgaaaattacaatgattatgataaaaaatatcatttttatcaagttgtctacgtgtatccaggaagtagtgttctagagtggttggagtataagacaagaaataattatataattattgatatgtcttcagctccaccttctctcccagtgggcttcattttctgcttcgcccttggtatgtatggagacacatccctggaaagaattgaagctaaca

SEQ ID NO: 23905 - DNA, 268 bp, Glycine max
aatatacttcaatatgctaatcatggaagtttcacttcgtggcttacttggatttgtcttcgttcttctgtggaggcaaaaatacaagagcagctaaatgtgcggatgtattctatttgaatgtagatagagctccgtcatctgtaaacattttacaatatattcttttgtttggcaatcattataggtgttattaaaattttcgtggcatgtatgccccaaattaagcacattgagtaagaaatatacgagtgtttggtaaactgaa

SEQ ID NO: 23906 - DNA, 354 bp, Glycine max
ctcggtcagtcgcgaaatgaatgtttattttttatatataaaaagatagcaacattaaaaggtcttattgtgcacagatttggatgtatggtattctgatgaaggatctggttattgaaaattgtgttattcttgaaaaaaattttaagttgagattcgtaactgttaaattgcagtgcaggataataatagacttgtcattaagccacttcttgttgtcttcttcgtgctgttgttcttactcccaagtattgtaaaaggagtcttgacttatggggtggtggctttgtactctagggggtcttgtctgtatactgtaacagaacagaacgagaattataagaggacttgatt

SEQ ID NO: 23907 - DNA, 195 bp, Glycine max
catgtttttctaacaatacaattctaagcgatctgcatttgcactcttttttctacactactgtagccggcaccctgcctccttccatgtccttttaattcgccatctcagtgtcactcctctcggctccttcttattccaacctctctcattttgagagcacggaatcaatgagaaaataattagaatatttta

SEQ ID NO: 23908 - DNA, 1960 bp, Glycine max
ggatttgaagctggtggccctaacactccttcaaatattgacccttggtcaattattggaaatgaatcattgataaatattgaaactgatcgcacctcttgctttgaccgtaacaaggttgcactccgattggaggtgttatgtgacagcaaaggtgacaacatctgccccgctgatggtgttggtgtctataaccctggtttctggggcatgaatattgagcaagggaagaaatacaaagtggtcttctatgttcgttcaactgaatcacttaatctaacagtttcattaactgcatcgaatggtgtaggaaacctggcttcatctgtgatcacaggttctgcacttgatttttcaaactggacaaaggtggagaagatactggttgccaaggcaacagatcataactcaagacttcaattaacaaccaccaccaaaggtgtgatatggttggaccaagtgtctgctatgccactggacacatataagggacatggtttccgaactgaccttgttgaaatgctgacagctttgaaaccaagatttatcagatttccgggcggttgttttgttgaaggagaatggttaagaaatgcatttcgatggaaagcatccgttggaccatgggaggagagacctgggcactttggtgatgtttggatgtactggactgatgatggacttggctattatgagtttctccaacttgcggaggacttgggtactgcaccaatatgggtatttaataatggtgtcagtcataatgatcaagttgatacatctgcggtcttacctcttgtgcaagaagcccttgatggacttgagttcgcgagaggtgatcgcacttcaaaatggggttcccttagagctgctatgggacatcctgagccatttgacctcagatatgttgctgttgggaatgaagattgtggaaaaaagaattatcgaggaaactacctgaaattctatagtgcaataaaaagtgcttatccagatatccaaattatctcaaactgtgatggttcttctcgacctttagatcatccagctgatatgtatgattatcatgtttatacaaatgcgaatgacatgttttctagagctaatgcatttgatcatacatctcgaaatggtccaaaggcttttgtaagtgagtatgctgtgactggaaaagatgctgggacaggaagcctcttggcagccctagctgaagctgggttccttattggactggaaaagaacagtgatgttatccaaatggccagctatgctccactttttgttaatgccaatgataggaggtggaacccagatgcaattgtattcaactcctttcagctctatggaactcctagctattgggtgcaagtatttttctcagagtcgagtggagcaacacttctaagtacatcacttcaagcaccttcctcaaattcacttgttgcatcagcaattacatttcaaaattctgtagataagaaaaattacatacgaataaaggttgtgaacttcggtaccactgccgtgaacctcaaaatctctcttgacggactagaaccaaactcattgcagttatctgggtcaacaaagactgtgcttacatctgcaaatgtaatggatgagaactccttctcacagccaaagaaggtggtgccaatccaaagtctacttcagaatgttggaaaggacatgaatgttacagtcccaccacgttcgttcacatcatttgatttggtgaaacagtccagtactctgaagatggcagggagcgattcttccacgaggtcttctatttaacgttatgaataattataccaaaagcagaaaaagaaataaaggggaaggaatgggttatatgcaatagctgcaattaactatataataagtttgacaccttggtctactttgccatgtaattaaacaatgttgtgctgtaaataacatttatgtggtttaattt

SEQ ID NO: 23909 - DNA, 230 bp, Glycine max
tgaaaagggcagagtagagatgcctataggctataggctagaggagagcataatagttttgacgcgtaagaagttgtggatgttggtgagccaacccttttgctagctggctgtcggggagaggttcccagatccctctcgcactgcacgtgactcacaccctctccctctccctgcaaacaagaagcgcatcatcccttctctttgctttcttcttccatcatcaatcc

SEQ ID NO: 23910 - DNA, 430 bp, Glycine max
  unsure (1)..(430): unsure at all n locations
aanaacacaagttgtgagagactaaatccaacaagaacaacctcgttacattcacaacactatgcaagcactgtgtccttcattcccagattgcagcactcttcgagtgcccagattctcaatcagtgccactcctccaaattttgcatcttttctgagcccctccaaggctggaatcaaattgagttgtgggattcacaaaccagtttggaggagtaggtgtgatggtttaagggtacagtgtgcagcctccaatggagaaaatgatgatgatgatgggttctacatcagaaggtgtgttgagcttgcaaggaaggctgttgggttcaccagccccaatccattggtggggtgtgttattgtaaaggatggcatagttgttggtgaatgcttccaccctaaagcatgccaacctcatgctgaggatatg

SEQ ID NO: 23911 - DNA, 390 bp, Glycine max
tcgctttattgaaattgaagagaattgggataaggtcaaaactatattccttccgacggaaaaaccattgactccggaggcatgtgcgccattgattgctatacttcctttggagattagggggacaattggcgatttcataatgggtgtgtttgctgtcttcaaagatctggacttcagttttttagagatgaatccatttacactggtgaatgaaaagccatatccactggatatgagaggggaattggatgacactgccgcattcaagaacttcaacaaacaagtgcatcattgaaatttactatattgaatccgaaaggacgcatatggacaatggtagcaggaggtggtgcaagtgtaatttatgctgatacggttggagattta

SEQ ID NO: 23912 - DNA, 382 bp, Glycine max
ggcatgtgcgccattgattgctatacttcctttggagattagggggacaattggcgatttcataatgggtgtgtttgctgtcttcaaagatctggacttcagttttttagagatgaatccatttacactggtgaatgaaaagccatatccactggatatgagaggggaattggatgacactgccgcattcaagaacttcaacaagtggggtaatatagaatttccattgccttttggaagaattctgagccctacagaaagcttcattcattccttggatgataagacaagcgcatcattgaaatttactatattgaatccgaaaggacgcatatggacaatggtagcatgaggtggctgcaagtgtaatttatgctgatac

SEQ ID NO: 23913 - DNA, 475 bp, Glycine max
gatatgcatgagctcattgccaagaaggaagagaaaagtgatattaacatgatggagttgctatggcaggagacacacaaggaatctgtgaagtggaaatttatgactgaccatcgccttactgaaatcatgacttctttgaaggatattcaggggaagtatggtgaattgatgatttggaaaactacagttgagcaacaacttatggaaataactgataaattgaatgatcttcaagcatctagggagtgcaccactaatagtcctccttcagaaaggtggaaagattggatagaaagtaccaacctagacaatattcaggaagatgcatttgcaacttggattgggaatccggagctacttaatgttccacaagaggttatacttgaagatcccaacacaaccataccaacacagccacccagtgaagaactgactaacaagaggagcgatgtgctggagttagtacctggta

SEQ ID NO: 23914 - DNA, 497 bp, Glycine max
  unsure (1)..(497): unsure at all n locations
aaagatgggacttcctgtaggatccaaggttgcaccgtcagcaagcacacgtaccttgctgcgttgttgtgaatggtggagtgagcatgaccgtcgacttgctactcttgagtttgaccgtgataggaagtcaatgggtgttattgtggactctggtctaggcaaaaggtcgcttctagttaagggtgctgtggaaaatgtgttggacagaagctctaaaattcagttgcgcgatggttctatagtgaacctagatgataatgctaggcaccttgtattgcaagctctccatgaaatgtcgactagcgcactgcgctgtttgggatttgcatacaaggatgaactccccaaatttgaaaactacagtggtaatgatgatcatccagctcaccagcttatgcttaacccttccaactattcatcaattgaaagtgaacttatttttgttggcctggctggattgagggatcctctagggangaagtataccaagcaat

SEQ ID NO: 23915 - DNA, 410 bp, Glycine max
cactgctccatcagacgtaggttcacggcaacgcattcccactgagtcactcactaggttacgaatcaaaaccgatgctaatgttgttcctttttccgcttcctcgtctcagtaacatgtaaatttatcgagcaagcactgattattgggaagttccatcgaaaagaccaacattgctttgattctctcagtaacgaggagtttgcagtgaagagggaaatgtctttccacaatcaagcattttggatggggaagagtcctggggggttgaatgacggtgacatgacaaatgacaattcttctagaatagagtccaagcgtgctcatcagtggttcatggatgaccctgaagtggatatgtttcccaataagaaacaagccgtagaggctccaaacaatttgttatctgg

SEQ ID NO: 23916 - DNA, 390 bp, Glycine max
agacgtacctcactttctccatcatcacatcaagttagctagagcgccataggatcaaagacgatgaagctgagactcagatctttggactccaaagaaacccttaaaatcgaagtccctagactcctgttctctgctgctactcaaagacaccgtttctcgcaccatctcttcttcttacctcttctctgcatctttccctacaacagaaaggacgaaattcatgccccttcgccggaagagcccctccactctctcggcgtcgcgacggcgacctcatcttctagtctctcaaccccatcgtcttcaccctcgaaaccctcctctacaagccagaaactgcttcacgcgacggtccctccatccaggactcgccggaaaccctacgca

SEQ ID NO: 23917 - DNA, 375 bp, Glycine max
tgaacacttgtttagcacagcttcaaacattctcagttcagcaagggagtgtgatgaacctgaaacttggttctttcactgtgcctgcaccatccattccagttatcccccttcttttcatgtccatcctgattcccctctatgaattcttctttgttccattcgcaagaaagatcactcaccacccttctggggttacacagcttcaaagagttggcgttggactagtactttctgccatttcaatgacaatagctgggataatagaagtgaaaagaagggaccaaggaaggaaggaccttcaaggccattagtctttttggttatcttcgatatgctatattggagtgcagcatgtcactctgaggatctaga

SEQ ID NO: 23918 - DNA, 586 bp, Glycine max
tttctaccaaatccgtgctgcgagggtgtgctcatgtgcgctctggataattggtgagtattgcctgtcactttcggaggttgagagtggcattgcaaccattaagcagtgtcttggtgacctcccgttttatactgttactaggaaggagacggtcaggaggcatcgaaacccatacagcaggtgaactcaaccaccgtgtcttctaggaggcctgctattcttgcagatgggacctatgccacccagagtgctgctctggaaactgccatgtcaccacccacccttgtacagggttctctagtcctctattggcaacttgagatcactcattctttcgggtgatttctttcttggggcggtagttgcatgtacactgacaaaacttgtcttaaggttggaagaggttcagacttcaaaagccgaagttaacaaggcaactacacaggccttgttgatcattgtctccatgctgcagctgggtcaatcttcaattcttccacatccaattgataatgattcttttgacaggattgtcctctgcattagattgttgtgcaataccggtgatgagataagaaaaata

SEQ ID NO: 23919 - DNA, 505 bp, Glycine max
ctttaaaacacccaaatagccattcaatttcgaggctttacgcgccgtttcgaaagcgatgacgctatccaccgcgccctcaccgccaccggcattagaagagcagccgttacctcacgacggcgacgattacgacggcatcgtttcactggacgacgagggtttcccgtcgcaattccccgaatcaggaacggcgtcggaaaagagcagtttcgccgcggatcgtctcatcgcagcggaaccgattggtcctcgctgttgttgtcgctggaagatagtaaacagagcgatttagcgcaagattcggggaagaagatgaagcaggccaatctgttccagatttgggggtttacagagaaacgacgccattggttcagttgaatctggtcccagtaaaagtggttgttgtgacgacggaggtggttcttctgagaggaagattgtgaaacctgaaagtcggtgttcgatttttcccgacacagggaaagagttcgagaacgcgaaa

SEQ ID NO: 23920 - DNA, 130 bp, Glycine max
caaatattggttgtagagtattgcttttttaaataacaatgtccaattaaattcaaggatccgatcctatccaacataattggacattgttatttaaaaaagcaatactctacaaccaatattttttttt

SEQ ID NO: 23921 - DNA, 418 bp, Glycine max
tgtgcaaggcactacccacaacattgtggtcttagtcataatcttcaccaaacttctgtgtatatggctgtactgtagaagacttctgcaaccatatacacagaagtttggtgaaggatgtgaagtatgttctggtctggggtattagtgcaaggcactacccacaacattgtggtcttagtcataatcttcgtgacgaagatgtggttcagattgttaagaccaaggaaaaggaagagggaggaaggggacgatttaaatcacattccaatgctcctgctaggatatctgacagagagaagaaggcaccactgaagacataattatatgacactgcctgtgatatcattgatttttgcctggtggatgggaaaaaatgactggaggtgatgatacatccaaaggcaaggttcttatc

SEQ ID NO: 23922 - DNA, 453 bp, Glycine max
cgtaccaggctcttcatcaatgaactccaatggttaccctgcttcctccttcaaaatccccaccgtcaagttcaccaagctcttcatcaatggacattttgttgattcactttcaggaggagaatttgagacaatagacccaagaaccggagaggtgattgcaaggattgcagagggaaccaaagaagacattgaccttgccgtcaaagcgtctcgtctggctttcgaccatggtccatggcctcgtatgcctgccgtagaaagagcaagaattatgatgaaatgggctgacctaattgaccaacacgtagaagaaattgcagcactggatgccattgatgctggaaagttgtaccatatgcttaaggctattgaaattcctgcaacagcaaatactatacgttattatgctggtgctgctgataaaattcatggagaggtattaaagccggc

SEQ ID NO: 23923 - DNA, 618 bp, Glycine max
  unsure (1)..(618): unsure at all n locations
gctaatgaggtaagctacacagcgagacgccagtgtgtttcttttcctccctacactatcgaagacctcagcttgaccaccctctctctcctatggccaccgccgaaccactccagaatggcaccgccgaaccactcctgccggacaatgtctccgccgcacaaccgcccaccgagacggaatccaacgccgccgccgcggcttccactccgccggagaagaggtggccggggtggcctggggactgcgtgttccggctcatcgtgccggtggggaaagttggaagcatcattgggcgcaagggagaactgataaagaagatgtgcgaagaaactcgatctcgcattcgcgttctcgacgctcctctcggcactcctgatcgaattgtacttgtgtccgggaaggaagagccagaggcagccctttccccggcaatggatgctgtagtaaggatattcaaacgtgtctctggattctctgaaactgatgctgagaatcaagaatctgccgctggtcttgcattntcttccatccgtttattggtggcatcgactcaggctatcaatttaattggaaagcaaggctctttaatcaaatctattcaggagaataccagtg

SEQ ID NO: 23924 - DNA, 720 bp, Glycine max
gatgattctttattgaatgatgaagctcgacagcctctttccaggaaggtttctattccatcttctaggataaatccatatcgtatggtcattatgctgcggctggttatcctttgcattttcttgcattatcggataacaaatcctgttcccaatgcatatccattgtggttggtatcagttatatgtgagatttggtttgccatatcttggatattggatcaatttcccaagtggcttcctgtaaaccgtgaaacatatcttgacaggcttgcactgaggtatgatcgggaaggagaaccgtcacaactagctgctgttgacatttttgtcagtactgttgatccattaaaggagcctccacttgtgactgccaataccgtactatctattcttgcagttgactatccagtggataaggtctcctgctatgtgtctgatgatggtgctgctatgttgacatttgaagcacttgctgagacatcggaatttgcaaggaaatgggttccttttagcaagaagtatagcattgaaccccgtgcgcctgagtggtatttttctcaaaagattgactacttgaaagataaggttcatccatcatttgtcaaggatcgtagagcaatgaagagagaatatgaggactttaaagttcgtattaatggacttgtttcaaaggcacagaaagttcctgaagaaggatgggttatgcaagatggtacc

SEQ ID NO: 23925 - DNA, 505 bp, Glycine max
gctcgagcggctcgagccgcgactatacagccaaactttctgattttggactagctaaagcaggaccacaaggtgatgaaacccatgtatccacccgagtgatgggtacatatggttatgctgcccctgaatatgtaatgactggccacctgacggctaggagtgatgtctatagctttggcgttgttcttttggaacttttaacggggaggaaatctgttgacaagaccagacctggaaaggaacagagcttggtagattgggcacggccgaagctcaatgacaagagaaagctccttcaaataattgatcctagattggagaatcaatactcagtgagggcagcacaaaaagcatgtagcttggcttattactgtttgagtcaaaatcccaaagcaaggccactaatgagtgatgtggttgagacattggagcccttgcaaagttcaagtgttggtccaggtgaagtctcattatctggatcaaatagtgggagtgctgggcc

SEQ ID NO: 23926 - DNA, 493 bp, Glycine max
ctcgattgttattatctttcattgacgttacaagcctcctgtgtctcattcaccgccgcattttgttcttgttgtagctctttcaacaggaaactcctccttcaacagattatgagtgcggttcattactcttgaagcaaggtttggtgggggtaaaaaaggaatgagttttgttaattcaaatcacacccgtggtttcacattattcttaatcgggaaactgaattaagggtatttttgcataggggaataagatcatgcctggcattctctcaaggctgaatgcaaccatttactgtcgcattcgggaagcaataacaaggcaacaaggagtgccgacatccttgtacagaagttcagctttgcctctttgctcgctcacttcaagtcacacacttcacacaaaatcaatgattactgcctcacattccaatgctatgctgggagatgtttatgcttatggcttaatctcaggtcgtggtagtgtgcgaga

SEQ ID NO: 23927 - DNA, 614 bp, Glycine max
cattatatgagtataaaggattgggtgaaaaatcagcgaatcctaaacaccgttgcttcacttggggttctagatactctgagaaatacatagcagacttctatgtatcagacttccagtccggtttaagagcattagtgaaagcaggttatggtgccaaggttgctccttttgtggaaccaactactgtagttgatataacaaaggataacagagagttatctccaaatttctcaggctggcttgcagaccacaaactctccagtgatgataggataatgcgcctcaaggaagggtacatcaaagaaggtagcaccgtaagtgtgatgggagttgtccaacgacatgaaaacgtgctcatgattgttcctgcatccgagcctgtctcaacgggctgccagtggatccgctgccttttgccaacctatgttgaaggcctaatcttgacatgtgacgatagtcaaaatgctgatgtcattcctgtttagtgttgttttcttttgcttggaaatcagtgtctcgcgcatctgaacatgacaaaaaactgatggggaaatcctacaatatggcatcaagagtattttccacttgctggtttgtgtaaaatggcttgg

SEQ ID NO: 23928 - DNA, 349 bp, Glycine max
atgcaatttcctttgccatcattagacaaagagcacttgccagaaggtgctgaggccactgtagacattccatctgaaaaaattgagtacttaaagttggcatatgataaattgcaacatgctgtcaaacaatttgtggccaatcagttgccaaattggataatttgtgattttagtcctcactggatagtagacattgttcatgagtttcaggtaaagttgatcttctataatgttttatctgctcctgcattaacagtttggggaccaccaggtacaaggaaaactcccttgtctccagaaagtttaacagcaccaccagaatgggtgacatttccatttcagtggg

SEQ ID NO: 23929 - DNA, 341 bp, Glycine max
ataaggccagcagtgtttaacatctctgtgaatgatcggtggggagcatccatgatgcagaaatgttaaggccagcagtgtttatttggattataacttggagccaagattgtcagattttggactggctaagattttcgggagtggcttggatgaggagattgcactttgttcacctggttatgctccaccagagttttctcaaccagaattcgatgcctcagttccaaaatccgatgtgtactgttttggggttgttctctttgagctactaaccgggaagaagccggttggagatgattatcctgatgagaaagaagcctctttggttagttgggtca

SEQ ID NO: 23930 - DNA, 967 bp, Glycine max
actggctcttgcaagttcgcatgtaataggggcactctctttcccccagacgaataggcaggccaagaaagagagtgaccctattacatgcgcactggctcttgcaagtatggagcaaactgcaagttcaaccatcctgatcctacagctgttggaggaggaggaggtaatcctccttcagggtatggtaatggagggtctatttcattacaaggtgtatcacaaacatctgtaccctcctggtcttctccaagaacattaaatgaagcatctccttttgtgccaatgatgctttcacctactcaaggagtttctacccaaagttctgattggaatggatatcaggcatctgtctacttacctgagaggagcattcatccaccttctacatttgtcatgaacaacccagcaattgatacaaatgtttacatgcaccatcaaaagcagatgcctgttgatgagtttccagaaaggcctggtgaacctgaatgcagctacttcttaaaaactggggattgcaagttcaaatctaattgtaaatttcaccatccaaagaatcggattgcaagattacctccatgcaacctcagtgacaagggtctacctttgagaccggaccagaatgtttgcacatattacagacgttatggaatttgcaaatttggaccggcgtgtaagttcgatcacccagcgccctcaactatggctggacatgatcaacaatccacatatataaactcagctggtgttgatgtggctgaaaatggaggtgccgaagatgggaatcagcagtctgtgtaaaacattttctggctttgaatatgcatatcacccataatttgtaatcttatctaaaaacatgataaatttatttaatttcactagttatgctaatgtggcacaagccttacagaatagcaatatatacggctaatagaagttttattacagtaacatgtagattatt

SEQ ID NO: 23931 - DNA, 368 bp, Glycine max
gctgttaaagagaaggcaggagatagagaagataccacagaaagatcgggcatgacagaatgcaagtattatcaaaggtcttggggttgtaagtttggtaaatcttgtaaatagaaccacacaagaggaataatttcaacagcaccagcaccacttttggaacttaactttcttggcctgcctattcgtctgggagagagagagtgcccctactacatgcgcactggctcttgtaagtttggagcaaactgcaagttcaaccatcctgaccctacagctgttggaggagtaggaggtgatcctgcttcagggtatggtaatggagggtctatttcattacaaggtgtatcacaaacatctgtaccctc

SEQ ID NO: 23932 - DNA, 482 bp, Glycine max
taccataagggaactcattcgaattgaaggttgctttcctgcactacgcaatctgtatctaaacaataattattttactggaggaatacctgcacaacttgctaacctaaccagtcttgagatcttgtacttgtcctacaacaaaatgtctggagttataccatccactgttgctcatattcctaaattgacatacttgtacttggatcacaatcagttttcagggagaattcctgaacccttttacaagcatccatttttgaaagaaatgtacattgagggaaatgcattccggcctggtgtcaaccccattggtttccacaaagtgcttgaagtttctgatggagacttcctcgtttaatgaggctctaaatatttatatatatttttttcttcaggaggtgtacttgtataattattgaaacaatcgttcctctaattatctcaatgaaatagctaaataggtaattcaattttgtcta

SEQ ID NO: 23933 - DNA, 510 bp, Glycine max
gcagaagccgaagaagaccaagaagaagagcgagtgctagcacggagcgaaagagagagagagagaagcattggttgttaatgatggcggaggggaaggaagagagtaaatttagcgaggaaagcgtgaagctgttcgtgggtcaagtgccgaagcgcatggcggaagatgaagtgcttgcaatgttcaaggagttcgctttggttgacgaggtcaacatcatcagagacaaagctagtcgtgcctcccgaggttgttgctttgtaatttgtccgtccagggaagaagcggataaggcggtcaatgcatgtcataacaagaaaacgctccctggggtgagtgagtgggcttcggtcccgcacgcatcttcattctttgcttttcagaacgttcagagtggaatggatttttttttctttcttttaaccctctggtttatcaggaaaaagatgacatgattaatgcagagttcagccagaagaaaaattaagcctgaccaataattatttc

SEQ ID NO: 23934 - DNA, 329 bp, Glycine max
caaggttttgttttgcctgctgcagtcttcaacgcctcagttgtatttcgcagtttgcttactctgtctcaaatcatggtaaccttcaatctttccgtcgagccgaaacccttcaccaatgacgtggtgatcatctccgataaagacacccggtggggttttgggggcactctcctcaaagcttttcaactgtgtggtttccgtgcagtcttagtcggggctggtaatgagctaggaagaaaggaaattgaagaatccatggttgttattcctgtcttctccatggaccttgtatcctctccagatcacttggaggaacttgccacggt

SEQ ID NO: 23935 - DNA, 546 bp, Glycine max
ctcccaagcattttgaggcattggtggaagagcactttagacaatgctccaaacatatacttttggcttgtaaggcatatcttgaaggagctcctattggatgtggttttggtggtggaaaagctgagcatgaaaaccaaaagggaacttctactggatttaaaataatgcttgctaagctcttcccaaagctagtagaggcattttctgacaagggaatcgattgcagccagtttgctgagatgcaaaagtaattgtctgttctaccttgttgtgaataagccgtccagctttctgtcaaggatattcaaactttatgtgtaatattaatttgttttcacttatcttgtataatatcaaatgtgtgcttgataaaaaaataccaatatcctcttgtaaaccaccaccccctcccaaaataaaagaagtggtgaagatgtattgataataaaaataccctgtggtatgtaatgtatcatatgtactatgtaatggcttgaagatgtgagaatgtaaaataagaagcacagtgattggagtggttta

SEQ ID NO: 23936 - DNA, 260 bp, Glycine max
gtgagaatgtaaaataagaagcacagggtatttttattatcaatacatcttcaagccattacatagtacatatgatacattacataccacagggtatttttattatcatatgtactatgtaatggcttgaagatgtgagaatgtaaaataagaagcacagtgattggagtgaaaaaaaagaacaaaaagggggcccccccaatttttagcctttcccaccgggaatttttcccggtcgggcaacccgaaggcttcccgtt

SEQ ID NO: 23937 - DNA, 502 bp, Glycine max
atctccaccttctctttcactgctccttgctctttcttctcttaggtttccgcaagatctgcaaaccatggcttccaggaaattcgacaaccctcactccggcgacggcgccagtccaggcaaaatcttcatcggagggttagccaaagacaccaccctagagacgttcgtgaagtactttgagaagtacggggagataacggactccgttataatgaaagaccgtcacacgggtcggccaaggggattcggcttcatcacctacgccgatccctccgtcgttgaccaagtcattcaggagaaccacgtcgtcaacggcaagcaggtcgagattaagaggaccattcccaagggctcttcgcaggctaatgacttcaaaaccaagaagattttcgtcggcggcattccaacttctgtgtctgaagatgagctcaagaacttcttctccaagtatgggaaagtggtggagcatgagataatacgggaccacaccacgaagcga

SEQ ID NO: 23938 - DNA, 498 bp, Glycine max
gtttcactttgccacatcaatccatccatcctcacactccaacaccgagcgagccatggcgaagccgagaaccgcactaacttagcttcgtgtttcgtggccaccgttttcttgatcttccttctcattgtggtcttcatcgtttacttcactgtgttcaagccgcagtaccccaaaatcgccgtgagcgccatccagatcccttccttctccgcgactaacggcaccgtcaacttcaccttctcccagtacgcctccgttaggaaccctaaccgaggcaccttctcccactacgacagctcgctccagcttctctactacggcagacaggtcggcttcatgttcgttccggccggaaagatcgccgccggcaggactcagtacatggccgccaccttcaccgttcagtcctttcccttgggcctggggcccacctccgtggatgggcctagtagtgtggggcccacgatggagatggagtcgaggatagagatggcg

SEQ ID NO: 23939 - DNA, 706 bp, Glycine max
  unsure (1)..(706): unsure at all n locations
caatacgacncatttgttcagtttggcctttcaattcagttctcaattaagaaggcttcccaacttgttaaggagattggtagacaggtagctactgacaagtgcatcatgctttttctgttccttattgtctgtggtgtaattgccattattgtggtgaagattgtgcatcccaacaacaaagatattagggatatcccagggttggcacctccagttcccaccaggaggcttttgtatgcaaggagtggagatcaccttgattaattcttatatttgaacacgagtgaacttcatcctagtccttccaacttgattattgttctcattagtgggaaagttagaggattgctgtctgaaggcattattttggtctcatcgattaattaaatatatatacacttgcataccctgtaccctgtctgtgattttatgtaaatcacacgagagccttctgctttttcttttgagtgccgtgtttctttatgtaacattccaaaagtgtaggcctagatagaaagtcatactgtgaaattcgttctgtatatgtctaattcaaaggagatttatccccccctcccccccccttcattgtttttttttattattattatttctgtacacattcgaaactgtgctggattgtttttgtaaaattacattcagagttggcttgctgctgttcatatgaagcttcttttcttag

SEQ ID NO: 23940 - DNA, 732 bp, Glycine max
gacagagtctgggtcttcctttcctaattcccttcccccttccataaaagcacccccgtcccccatacctcaaaaacccacgacaccataattaacaaagtgaacattagaacatacaaacaaattcgaattacaatgatgtcctcatccccgttcccttcctgcttccgcccctcccccaccaccgaatcccagcctcctcctccccctccgccgcctcactccacaatctccaacctcacaatctaccacaccgacacaggtcccgtgtccctaacatggtcacgctccattgtaggacgctccctccacattcagctccaccaaaaccaaaaccccttagattccccaccctaccctaaccccaccaccctctccttccaccaccacataagacccttcctcttctggaaaaaacacggttccaaaaaactcgcccccgacactttcctcttctggaacctctccagagccaaattcggcgccgccccagaacccctctcgggcttctacgtcgccctcgtcgtccacaaccacatgaccctcctcatcggcgattccaccaaagacgcgttttccaagtccaaggcccgccaccctaacacgccacaactcctgctactaaaaaaagaacacgtcttcgccgacaggctgtacaccacgcgcgccacgttcggaggcacagcgcgtgagattcagatcgattgcggctaccacgaccactccaggctc

SEQ ID NO: 23941 - DNA, 352 bp, Glycine max
gttcccttcttgcttccgcccctcccccaacgccgaatcccaccctcctccccctccgccgccgcactccacaatctccaacctcacgatctaccacaccgacacaggtctcgtgtccctaacatggtcacgctccattgttggacgctccctccacattcagctccaccaaaaccccttagattccccaccctaccctaaccctaaccctaaccctaacccctccccctccaccaccctctccttccacctccacataagacccttcctcttctggaaaaaacacggttccaaaaaactcgcccccaacacccacctcttctggaacctctccagagccaaattcggcgcc

SEQ ID NO: 23942 - DNA, 568 bp, Glycine max
ggatcccacgagacattggttgtagccgtcaaccggcgaagtattctggcaaggtgtatttgaaagagagagaagcttaaggcacaaggagaaggaaaagaggaagcagaagagtatagaaaaacaaaacagaataaggaagcgtcatcgccaacaagtgatagggaaatatattaagcccccaccagacgaagaaagctctaattcatctattgcagtaacagcatcatgatgattttaaaacaccatttgttttgagtagttcctcgtataaaattcttttcttcttttgtaatttttatttgattttgcttagcatatgtgattttcgttcagaaaggaatgcacattttctgtggagggtcacgtatgtagaatatggcatcgttctagtcattgatgctctgataaatagctagtgtgtaaagtatcttttattttgttttgacttattctgtaagtctattctttcaggataataaattcatttagagaggtgcggcaaaattccaatgcccgtagctctttgtcaatctaaatgagattaactataatcattattactttg

SEQ ID NO: 23943 - DNA, 359 bp, Glycine max
  unsure (1)..(359): unsure at all n locations
gcttccctatgtgaaaacacaaatccagaccacagatacatttccgaaatattattagcttcaggtctcttactcagagatctgagttccgagttgctgacatttcaacttcactcgtcgggtcatcccattaaccccgagctattccttgtcttggaacagaccaaagcaagtagtctactttcaaaagaagaaagcagccctggaaaagatgctaacatgaagctaaacaaagagaaatttcacaggaaactcatctttgattctgtgaatgagattcttggtgcaaaattcggctcctcacccgagccatgttttcagcctaacagtaacagactcacaanaanaaccttgagtgc

SEQ ID NO: 23944 - DNA, 559 bp, Glycine max
gcgtgagttaattgctccaggaccccacactgttcgatcgtgtgatctcaggatcgaacagttgcaggcgacgccacgtcagtgcacgcgccgtagccgagtcgagtaagtgtgtggctcgcaacgatgtgtctggcgcgcttcagttgctatcatcggctcgagcctctgtgagccgcgaacagggtgatgagtgcttgcgctggctcgaagccaaacgagccgagctgaggaaccaaaagttgagaagtagtaataataattgcttggaggaaaagggggagccgcttacgccgatgtcggcttggagagtagctgagagactggctaaagtggctattatgagaaagtctatgaacagagtcagcgatttacatggcttcgaggatgccagattttaaatgttttgagaattaagaaagcatactgaatgggtgaattcacggcacatttgggagcttgtattttgttgatgcctgaattatgtaagcatagctatagttaccgcactttagttagctaggcatgaaaatattaagaagttatggctctaatcatg

SEQ ID NO: 23945 - DNA, 433 bp, Glycine max
cgttgccaggtcagcgctcgcgccgtagccgagtcgagaaggttgatggctcgtaacgacgtgtctggcgcgcttgagttgctatcctcggctcgagcatctgtgagccgcgaacagggtgatgagtgcttgcgctggctcgaatccgaacaagccgagctgaggagccaaaagttaagaagtagttgtaataataattgcttcgatgaaaagggggagccacttacgccgatgtcggcttggagagtagctgagagactggctaaagtggctattatgagaaagtctatgaacagagtcagtgacttgcatggcttcgaggatgccagattttaaatgtattttttctctttttttcagtatagttctaaattttgtagtttgtaaagggagaaaataaagtgtcaataaaatttttttccgatttatgctc

SEQ ID NO: 23946 - DNA, 577 bp, Glycine max
ggcgtctgggtcaactagtggcggccccccctttttttttttttttttttttgatacatttaacaattaaatttagtcttagggaattttaactaggaagaagaaccatacactattgttgtttacaaaacacagacaagtaatcaccagtacaccaatagggaggttgtaacttcaaattcagagaaaacaagacaactattgaaaaataagtcactcttcgcttgacttttgaatgtaacatcgtataacaagaaaattaaattattagaaagaaaaaaaaaatgcctaatgccataaaccttgagctaagtgacacagttgtgatgtttttgttaagccaagtatccaccctcccgtaccacagttgagatgattagttaagccaaaatgctcatgcaaagcccctcacgaactctgcaaggatagtgtatagaaaggtaatggcagtacacggccaagcctttcaacttgtcttcagtgatcattgtgtagatgtggcatttgcaacccaatcttgcttgacagcaattagtaccttctcaggaacaagtggaccgtcctcatggtccaccat

SEQ ID NO: 23947 - DNA, 213 bp, Glycine max
gggcacagtccgcccgtttatattttttttgaacaattaaatttagtccgagggaattttaactaggaagaagaaccatacactattgttgattacaaaacatagacaagtaatcaccagcctctctctattggtgtactggtgattacttgtctatgcttggtaatcgacaatagcgtatggttcctcgtccgagggaattttaactaggaa

SEQ ID NO: 23948 - DNA, 737 bp, Glycine max
gaactctataacagcatggtagaggaagagggcccaaatggtaaaaaagatgcctttaaggcatataaagctgcccgagaggaacatgaacacgctactgagtcgggtgaaggggataaggtgtcatcagcactcattgggagagttgatgctatgcttcaaaatcttgagaaggaaatagatgacgttgatgcgaaaatcggtgaccgttggaggctgctggacagagattatgatgggaaagtaactcctgaggaggtagcctctgctgcaatgtacttaaaggatacattgggaaaggagggtatccaagaactcatcagcagtctttccaaagatagagatgggaaaattcttgttgaggacattgttaagttgggcagttggagggaagatggtaatgcacctgaagatgataccagggagagggtatgatcccatcatttcacttccagatacatcctatttgagttccatgccacaaaatatgttgcgcaaatgtactataggccattcgaattttccagtcattgatttttgtattcatgtattaataaatagttcaattgtagcagtcagacgaaaatgaagtgtgtgcaagctctgtaaatttttgacagctgagcacacaaatatactttaaatttataaatgatccgacacttgggccttgttggctattggggtgcattactgtactaaaattgaaatataagtgaaacacaatactatttaat

SEQ ID NO: 23949 - DNA, 541 bp, Glycine max
  unsure (1)..(541): unsure at all n locations
gaatagccgttgtcccctcccagaagctgcacaacaaaaactccttaaacctctcctaacaccctaactctcaccattccttcttcgtattctccctcctccatttcctcgctccgcgtaagtttgttccttcgagaatggcatcaccagcaattttgagaaggagaagtttaatccatcaatacttgaataactgttttgcttcttctccgtctcctagtaatcgctctctggaacgcgctatagctacgacgtcatctctgtttccttgtaagcacggaacgacgccgtacagagatgacttgttcaatcctttcggattgggacaagttgttcgaggattcgggagcgcggctccgcgggacgctttttcgagactgaacgcgccgataggtgtgcggtggttgtcgcagtcgtcggccgcggcggcgaaacgtcatcagcactcattgggagagttgatgctatgcttcaaaatcttgagaaggaaaatagatgacgtgatgcgaaaatcggtgaccgntggaggctgcttgacaga

SEQ ID NO: 23950 - DNA, 518 bp, Glycine max
cttcttcgtattctccctcctccatttcctcgctccggtaagttagttcaaccactaacaatagaaccaaaaatcagatctaagcaattcctacttctattaccacatactcttcattctttgtttctaatctcttactgtgatttttccaaggtttgttccttcgagaatggcatcaccagcaattttgagaaggagaagtttaatccatcaatacttgaataactgttttgcttcttctccgtctccgagtaatcgctctctggaacgcgctatagctacgacgtcacctctgtttccttgtaagcacggaacgacgccgtacagagacggcttgttccatcctttcggattgggacaacttgttcctggattcgggagcgccgttccgcgggacgctttttcgggactgaacgcgccgataggtgtgcgggtggttgtcgcagtcggcggccgcggcggcgaaacgtcatcaaccggaaccggacgagaacgatgagacggtggcgaagaagcgg

SEQ ID NO: 23951 - DNA, 391 bp, Glycine max
gaagtggtaagaacacaactccttaaacctctccgttctacttttctaacaccctaactcttgccacactcctccgttttctacgctccgcataagttaattcattcgataatggcatcgcgagcaattttgagaaggaggagaagtttaatccatcaatacttgaataactgttttgcttcttcttcgccgtctcccagtaatcgctctctggaattcgctatagctacgacgtcacctttgtttccttgtaagcatggaacgacgccgtacagagacggtttgttcaatcgtttcggattgggacaacttgttcctagattcggaagcgccgttccgctggacgggttttcgggattgaacgcgccgataggtgttcggtggttgtcgc

SEQ ID NO: 23952 - DNA, 919 bp, Glycine max
  unsure (1)..(919): unsure at all n locations
ancgagatggnncctactcaacctagcccgccgtgtaatcttctgtagaaatactgggtgtatgtgataagtttcggacatattatcttggcacccataatggtaggagattgtcctggcaaactaatatggggactgctgatttgaaagcaacatttggtaagggccaaaagcatgagttgaatgtttccacataccaaatgtgtgtacttatgcttttcaacagcgctgagcggttgacttgtaaggagatagagcaagctacagcaatacccatgtcagatttgaggaggtgccttcagtctctggcctgtgtcaaaggaaaaaatgttcttcgaaaagagccaatgagcaaggacatagctgaggatgatgcattcttctttaatgacaaattcaccagcaagttcttcaaggtaaagatagggactgttgttgctcagagggagtctgaaccagaaaacctagaaactaggcaaagagtggaagaagacagaaagccacagatcgaagcagccattgtgaggataatgaagtctaggcggactctagatcataataatattgttgctgaggtcacaaagcagctgcagtcacggtttttgcctaatcctgttgttattaagaaaaggattgaatcccttattgagcgtgagtttttggagagggataaagtggacagaaaactgtaccgctatcttgcttgaactgtatgtgcttttgatttggcatggctcttgtgtgattctgtctgtcataagtttgagtgcacatcacaaattgccgcaagtagtgtaactctctgcatactcaacaaaacctagatttctcagggttacttcttttcaggctgcaaaacttaaatatatcatttttagcttcttatttctaaacaaaaataaaccaattttttttttat

SEQ ID NO: 23953 - DNA, 426 bp, Glycine max
taagaccgagagatcccgtgaatcaattgctcctcgacgtaactaacaacatcaatcgcctctttcactgttcacgattttcgtgccataaccatgaagcttgactgctctaacggccaggctcctctcgccgccgatgtttctccgccgcaggaagacggctccgaggaggagatattcgtgccgccgctcaacttcgccatggtcgacaacggcatttttagggctggctttcccgattccgccaacttcggattcctgaaatcactccgtctccgttccgtaatgtgtttgtgccctgaaccgtatcccgaaacgacttcggaatttttgaaggccaaacggaataaggctttatcagttccggatcgatggctgtaaggaaccctttgtcaacatcccaaatgatacaattcgtgaagcttt

SEQ ID NO: 23954 - DNA, 311 bp, Glycine max
atatagttggtgctagcctgaatactatatgaatactatatggaccacagctggtttgtcagttcaattggtggaatatgcatgggtttacagattttgcaatgcatggatctgactctagagttttggactgattagtggggttcagaataaatagtttggttgtatccttgaacaagagtgttagcaacactctaacatgttggaatttattaaaaaccataaattttggtgtcacttctaaattagaagagaaatcaattaaatgagaagttgttttagggtcatttggtgtcaaggaataagataca

SEQ ID NO: 23955 - DNA, 335 bp, Glycine max
agggactctgcactccaatccgcagaaataagattatttcgtaggatggcatttggaattcaagattataactccgactttttaagccccagagagtaatttgaatacttaagaggctatcgtatatctagggtgagtctaaatttcttgtcacacccttgtgaaattaagttagttttagatatgactcttctgaggtgagtacccgaaattgattgtatcatgtttgcttgattcttgtaacaaactcttcttgttttttttccactttttttttattctttgtattcagattattattatactttatgatatatgattgatatgtaggacaa

SEQ ID NO: 23956 - DNA, 454 bp, Glycine max
gcgagaatttcttggcaccaagttcttctcggtggccaaaagtggaggttcaggcattgataaagcttcggacgagcatggatgagaagtatcaagagaatggaccaaagggtcctctctgggaggagatctcagcctcaatgaagaagctcgggtacaaccgaaacgcgaaaaggtgcaaagagaaatgggagaacatcaacaagtacttcaagaaagtgaaggaaagcaacaagcggagaccggaagattccaagacgtgcccttatttccaccagctggacgcgctgtacaggcagaagcacaggggcgaagagagccccgcggcggtggaggcgaagcgggagagcgcggtggcgccgttgatggtgcagccggagcagcaatggccacctcagcagcagcagcaggatagggacatcacaatggaagacatggagaacgaagatgatga

SEQ ID NO: 23957 - DNA, 332 bp, Glycine max
tgagaatctgcagaagtccttccataagtatttagaaatcagaggaatcaagcctagcacaaccaatttcttgcatgagtacatgatcaacaaggacagtaaagagtacttggtatggttgaacaagctcaagagcttcgtgcaagcatgagccttcacgtctcttttatgtgcttactgtcgtcatttgaagaaaagcatgaatgttgctgagtttgtgtttaatcacatgctgtacattcgaaggtaaagataccaaggagattttactggtttagctgtagctcctattggttatggaaggtagattatgcctgaaaatgtttggttaa

SEQ ID NO: 23958 - DNA, 292 bp, Glycine max
  unsure (1)..(292): unsure at all n locations
ttttgatgagtaagagtgaccagtaaaagaagcggcttggagcattttggttttaccatttctttctccaatttgtttgatctaggaatgataaagttaattggcttacatatggagttatgtacatttaaatatttattttttctctttccaattttattttatgtacacaaatggacaactaaatggacctatttttgtaaatcacatgtcaaactcgaaccttttacgagcaggtaataacataatatctggaatanaaaaganaaaaaaagggcgccgcgactagtga

SEQ ID NO: 23959 - DNA, 420 bp, Glycine max
ccctctcttccccccacgcgtccgtgataaagcctcaagtgtatcaatcacagaacaccaatcaaaccctcttgtttctgcagaggctatccgttcacagcagtactgcatctcttccactatggttggggagtaaagtgcagaggcaaaaaaagcttaaccacctcgttctggtttcacgcaacgttgaaactaattccactacaacagatactcatacagataagagtacagtgattaaggttaaggccatagttaaggtgaaagtaaccgtgggtggtttcttctcaagtctgaggttagaccgaggaatcgatgatataacagatttgcttggtaaatctctcctcttagagcttgttagctctgagcttgatcctgtgacggggctagagaaggaaacactgaaagcatatgcac

SEQ ID NO: 23960 - DNA, 255 bp, Glycine max
cgaatctgacccttcaatggaggagcacccgaagaagaagaagaaaggctgccgaaaccccgagaccaagttccaattcgagttgaactcatgttccaaagccaaggacctccgcggcgcgatatccctctatgacgatgccgtttcgaacaacacccgcctcaaccagcaccacttcaacgccctcctctacctctgctccaactccgtcgccgacccctcccttaagcccactgcccttgactacggcttccg

SEQ ID NO: 23961 - DNA, 687 bp, Glycine max
ttttggcggtggcggtttgctccggtcgccggatatcggttcggacggtgtttccggtggtgctggtgctcgggatcgtgctgccgtttctgttcgtgaggatcgcgatcttgatgctggaatctgctgcggcgtgttcctcattggaatgtgctgggtggaggtttttcagtggagtcgacacgtccctggaactcagagatgagctgaccagagcgctaatagaggcaaatgatggtaatgttaatgagggagcagggtcgttcaatgaacttgtgaaagagatgacctcaaaacaagaccttaaggcttttgctttcaagaccaaagccatgctatcacagttggaacgcaaggtacaattagcgagacaacaggagtcagtttatcggcatctagcttctcatggtgttcccaaaagtctacattgtctatgcctaaagttggctgaagaatatgctgcaaatgctatggccagatctcgtctaccccctcctgaatttgtatcgcgccttgttgaccctacctttcaccacttagttctcctaactgacaatgtccttgctgcctctgttgttgtaacctctacagttgaaagttcaatcaacccagaaaaactagtttttcatattgttactgacaaaaaaacttatgctccaatgcatgcttggtttgctaccaattcta

SEQ ID NO: 23962 - DNA, 392 bp, Glycine max
cgggggaaatgagtatattgacatggcagaaacactatgtcaaaaacgtgccttggaagcatttcggttggatccggctaaatggggagtgaacgtgcagcctctgtctggttcttctgccaattttcaagtttacactgcattgctaaaacctcatgatagaatcatgggacttgatctaccacatggagggcatctttctcatggataccagactgacaccaataaggtatctgcagtctccttattttttgagacaatgccatatagactgaacgaaaacacgggacacattgactatgatcagttggagagtacggcgaaactcttcaggccaaaattaatagttgctggagctacagcttatgcacgtctgtatgattatgcacgca

SEQ ID NO: 23963 - DNA, 380 bp, Glycine max
cggagcgaaggggtaagagaaattaccaccgcaacagttgaggtgtgttaatttctgacatccaaaacgaaacaaaaccccatcactgaactgagaaagaggctaccaacagacaccacctattttatgcctttcttcttcttctctcgacaatggtggataaaccaatgagcattcatcgaacccggttcccattctcgatcaccaagctcctcttctggtcgcttatcctactcagcttcattgtgctcttcttcttgggatctcccccgtcctccgcttccccttcccaccgccggcgctccctccgcggcggcgactgggagacctccgttcgcgaatccgccaagtccaaatccctccgcgtcctggtgaccggc

SEQ ID NO: 23964 - DNA, 259 bp, Glycine max
acgttggagtcctgctgctattaaatcagctatcatgaccacagcaaccacactcgacaacactaataggccaatccaggatgcgtttgataaaacactagcagatgcttctgcttatggttctggacatgttcgacccgatctagcgatagaacctgggcttgtttacgatctaagcctcactgatttaatctagtctcgaagcacatctcgctatcaagaatcttgtagttaggatgtgaactatatcattgtaacg

SEQ ID NO: 23965 - DNA, 787 bp, Glycine max
tactcctaacagtaatagcagagagagagagagtgaggctaagacagagcactgtctgagtgaaacatccattcttttcctccacctcgtgattcccaaacattctcttcttattcccagctccacgcgctcgtttctatattctcatcactcgcgctcttcttcttcttcttctccctccattagggttttcttaaggctgaatgtggcttccctcgccgcacattgacccttgacacaccacaatgtccggccctctcgaccgtttcgcaagaccctgttttgaaggtttctccgggagtgatgagaagaaagaaaggagatctgattttgagaactccgaagatgaaagaagaacgagaattggatctctgaagaagaaagcgcttaacgcgtcctccaagttcaagcattcgctcaagaaaaagagcagcagaagaaaaagcgatggccgtgttagctctgtttcgatcgaagatgttcggaacttcgaggagcagcaggccgttgatgcatttcgccaagccttgatcatggaagaattgcttcctgagaaacacgatgattaccacgtcatgttaaggttcctgaaagcgaggaagtttgatattgaaagagcaaagcatatgtgggctgatatgctacaatggaggaaggagtttggtactgacactattgtggaggattttgagttcaaggaaataggtgaggtggtgaattattatccacatggccatcacggtgttgataaggagggaaggccgtttacatcgagagactcgggaaa

SEQ ID NO: 23966 - DNA, 1232 bp, Glycine max
gtgaggccattttggtcatggtgtgatcattttctctgctcttattcttaatgaggcttatatccaagtttggccggttgcatattgcacaaggcgtctataaaagtaacatcactgaaatcattgtcaaattgacactgcttttctctaaaaggacttcaaagttctgttagatatacagtgttattctgctttcgatcgctctattattcatttgctaagaccttagagaagacagaggatgggtaccctgcttccagatgaaaaatcagagaatccaaatgctttggaacaacttcaacaccaaaaagatgtggatgcaggcgctctctttgtcctcaaatccaaaggttcttggatgcattgtgggtaccacttgacaacttcgatcgtggcaccacctcttctaagtcttccttatgcattcaccttccttggatggacggctgggatcttaagcttagtgattggagctttggtcactttctattcatacaatttaatatctagggttcttgaacaccacgctcagatgggtatgcgtcagctacgctttagagacatggctcgcgatattttaggtccagggtggggtcgttattttgtcggcccaattcaattcgcagtctgttatggtgctgtagtagcttgtactctcttgggaggacaatgcatgaaggcaatttacttgctgtcaaatccaaacgggaccatgaagctttacgagtttgtaattatatttggatgcttcatgctgattttggctcaaatcccatctttccactctttgaggcacattaatctagtgtccttggttctgtgcttagcctatagtgccggtgctactattggttccatttacattggagactcatcaaaaggaccagaaaaggattattctttgaaaggtgattcagtgaatcgcttatttggaatcttcaatgcaattgctatcattgccacgacttatggaaatggaatcattccagaaattcaggcaacattagcaccacccgtaaaagggaagatgctcaagggactatgtgtttgttatcttgttcttatagttaccttctttagtgtatctgtatccggttattgggcatttggtaatgaatcagaaggcctcatcttaagcaacttcgtggacaatgggaagctctggtgcccaagtggttcatttacatgaccaacattttcactataacacaattatctgcgagttgtgtggt

SEQ ID NO: 23967 - DNA, 329 bp, Glycine max
agcctttgaaaggtgattcaatgaatcgcttatttggaatcttcaatgtaatagctatcattgccacaacttatggaaatggaatcattccagcaattcaggtctgaaacaattttatctccctatgattaagaccacatatttggtccatcaaattaatcgttgtaataaaaaaaaaaactcattttcttcgattgaaaacattagcaccacccataaaagggaagatgctcaaaggactatgtgtttgttatcttgtactaatagtcactttctttagcgtatctgtatccggttattgggcatttggtaatgaatctgaaggcctc

SEQ ID NO: 23968 - DNA, 235 bp, Glycine max
attacattaatatacacagttgttgtagatcgttgcttttcattctcggtatgacaagggagaaatccgtgaaatgggtcgacaaataggttgtctttaacagtacaaggctgattataatcatcaaattgctagtgttaacttacaatagtgaattaacgtattagggtcggtctagtggtaggatattagaataaaaacacaaaggcttttgatacttgtcattatacattaa

SEQ ID NO: 23969 - DNA, 340 bp, Glycine max
cttatcatcataaaaacgagaaacgaatgattcacattagccaaaactaaacgccgctctatttccgtctcattttcactcactatggcttcggatgagaccatgaactttcactcttgttcgttacacgaagatgactttgatgatgatgatgatgatcacccccacaacttgtcgaggctctccgtgtgcactggcagcacctttggtgtcgacgacgatgttgacaatctggcctccatgtgcgtgtcacacttgtccatcgaaagcttcgacgcagatggtgagttatcatccgactcagagaacgaattgggaagttgttactctctgccctcta

SEQ ID NO: 23970 - DNA, 344 bp, Glycine max
cgaaaacctttctaacaagtctctaactccatcggaggcaaggccggttctaggaatggcgaagaagaacaagaagcaggcaacagagggcgaggtggaaccggaactcaacaccaacaatgacgacagcgatgattctcacaataagaagaaacttaagaaaaagaataagaagatgaaaatacccacagttagcatagccgtgcctgcttccatcattgacaacgttccaactctcgagctcgctacccggttggctggtcaaatcgctcgtgccgcaaccattttccgaatcaacgaggtggttgtgttcgacaataaaagtaacccagataatgattccg

SEQ ID NO: 23971 - DNA, 201 bp, Glycine max
atcctgagattcatcagcagccaacagctttgtcgccaactctttccttggtttaggtgaaagtcctttggctaacatctcctcatcatacttcctagcccatatctatgagggccttgtccacaagagcatctatcaaggcattgtaagccgcagcatcaggactacacccaagttgcttcatcttattccacacaacat

SEQ ID NO: 23972 - DNA, 362 bp, Glycine max
cttttagttcagctcttatacaccaggagatgatggagtcaacgatcataaaccaagtgcttctcttcttctgcttctgtctatgctctctcttagtctcagattcttcaccatctgcttcaaaaccaactccttcattccccaaagaagccctccccactaagcacggttaccttcctatcagtcccacttccacttcttccattttccatgccttctatgaagcacagaactcaactttaccactctcccaaaccccacttctcatttggctccaaggtggccctggctgctcctccatgattggaaacttgtacgaactcggaccctggcgcatcaccgaatcactcacccttcaacgc

SEQ ID NO: 23973 - DNA, 688 bp, Glycine max
tcgcttttctattcctcttcctcttcctccttttcccttctttttatttccttacactcacaacatttcccttaaaataaacataaacaaaccagcactgttcttgacccccaaaaaaaaaaaatctttactatttattaactatattaattcctccataatataatcatttgatttccttgttttctgttttctcttataatatataaccttcttttatctatttattctgttttgcaccttgtgattgtgagttatatctatttatatttatatatcattctctctcttttttttggatgtgtctatggctggtttggatttaggaagcgcctcacgctttgttcaaaaccttcacagaccagacttgcacttgcaacaaaatttccagcagcaccaggaccagcagcaccagcgtgatttggaggagcagaaaactcctccgaatcacagaatgggggcgccgttcgacgatgatagcgatgatagaagcccgggcctggagctcacttcaggtcctggcgacatcgtcggacggcgcccgcgtggcaggcctcctgggtcgaagaacaagcctaagccgcccgtcataatcacccgggagagcgccaacacgctgagggcgcacatcctcgaggtcggaagcggctccgacgtcttcgactgtgtcaccgcgtatgcccggcgg

SEQ ID NO: 23974 - DNA, 351 bp, Glycine max
tggacgagaggtgggagccaaaaggatggagcatccgccggtgggcgctggtggccgcaatctgtggtgggcctgatcggggttgtctcagtctgcctgatagtctacttcgccgacgcagcgcacagcgaggcctgtaagaacgggttgcggttgcaggatgagtgccgaaacaccacgcacctgttgaagcaccagctcacccgcgcccaggacagcctgctgcagacggagatgcaggcaaactcctgcaaccagaccgtgatggaccttcgggattccctgaagaagaaggtgtctcaaacccaggagcagcaggcccgcatcaaggaacttgagaataagatcgag

SEQ ID NO: 23975 - DNA, 573 bp, Glycine max
cataaagtagaaacagagtaagttgctgagcacgtgtggcttgcttggacgagagtgagttgcagtgcatagtgattgagagcagaagaagctgcttaagcttaacttaaatgggttttagaattagcggttcctcctcttcatcatgcttttgtttgcaacgtacgcttcttcctccgttaacagcgatagccacttctactcgtgccttcaagaggaggagtaattgcataccaagttgttcagtatcttatcaaaagtttgttgagtttgctttggatgaaaccaaacgccacactcacttgatcccttcgcctttacaggaaaagttcagtttcatgaattccaaggatgttaaagggagtcttagtatgctatcatttgaagctacaaaaattaggcttctacgaagattgatcattgagacagaaacaatgcagggggttttttttaatgcccatcaattatcaaattgatatatggttggtatctactagtgtcttaacaaaatatgcctttgtgtagtccctcccaatctattacaacaataacaatttcaaagattgactttgt

SEQ ID NO: 23976 - DNA, 583 bp, Glycine max
aattctcacaattgttggggacataactccattggatggaggttctaaagcagaaaagaatcaacgagaacaggcaacactagatcatatgtgtaaagtacttggaggaggatgtacaagtactttcttttcactatacatgagtttgttaatgagataataatgaaaattcacaactcttggtctttaaaagcgatagtcagttttacttgtgccttgaggaggaggaggagtaattttataccaagttgttcagtatcttatctaaagtttgttgagtttgctttggatgaaaccaaacgtcacactcacttgatcccttcgcctttacaggaaaagttcagtttcatgaattccaaggatgttaaagggagtcttagtatgctatcatttgaagctacaaaaattaggcttctacgaagattgatcattgagacagaaacaatgcaagtggttttttttaatgcccatcaattatcaaattgatatatggttggtatctactagtgtcttaacaaaatatgcctttgtgtagtaccttgtaatctattacaacaataacaatttcaaaaaatgactttgt

SEQ ID NO: 23977 - DNA, 776 bp, Glycine max
ctctcctctaacttgtaagcaccataccacattatctctctttcgtttcctttcccttctcactctttctctatctaccctttcccttccatccattagagagtggaaaacatcatccatgtgttcatatcatgttaggtcatggatacaagagctaccactctttgttaatttcttcttaagaccaatctgtgagaggtttgacttttcttgtcccttgaatcccgagaacacaaaccaaatcaatctcctattgctaacataacctatagctagcaagttggcaaattgcgttctagcacaggcaaattgatggagctagctagctttaaattgccttagtgagtcatgatgcatcatctttctttatcattacaaaaaaatataggttaagaaagttcgactcagttcagagtagggaaagcctctgatcttcttgttcttgaaagaaaacactctcaacactcaacagaaattctggctaatccttggtggaccggtcatcaggtggggttgggtgtaggggtagaccctgcagcaaccaattgaccttcttccaacctaaacaaacgccacatggacctttccatcaacgaaagaagccttgttagagaaagacaagaggaagaagaagaagaagaagatgaaagagacaacggtgatgaacccaaagagggtgcagtcgaggctggaacacgcaggccaagagggagaccccctggttccaaaaacaagcccaaaccccccatctttgttaccagggacagcccaaactc

SEQ ID NO: 23978 - DNA, 314 bp, Glycine max
tgtggatgagaagctttgttatcagattctgcacgagtacaagattcacaatgcagagatccttttccgtgaggatgctacagtggatgatctcatagatgtcattgaaggaaaccgaaaatacatgaagtgtgtatatgtctacaacaagatagatgttattggtattgatgatgtggacagattagcccgtcaaccaaattctgttgtcattagctgcaatttgaagctgaacttagacagactgcttgcaaggatgtgggatgaaatgggtctggttagagtttacacaaaaccacaaggccagcagcctg

SEQ ID NO: 23979 - DNA, 711 bp, Glycine max
ctttctgtcaggagtcagcaatcttgtccttatgccaagaagaggtttgcttcaggaccggggcatggagtcatacaatccatgccacatgcaaatgtttctggcagatcaaggtctagttccttttcaaagtcgtcaatttcttcacctagatcaatagacaagcaaaagggcattttcattgacaatgacattgccggaccatcttgctcaagtcaaccatcaccaccacctgatgatgatgaatcaccaaagttggtaaagagaacttctgttggaaggaagttgagggaccattatttctgttttggtgcacctggcattaatgtcaaaaactcagttcacaggcagcaagaaagccagagttacaaggctcatgttgttgcagtggcttaatgggatgagcttatataggtaattctcctgaccaggctaattcaacaaataagggatgaagctgattcatcaactttaaactttactgttaagggtcccttgggggttccttagttgcaagcttttatagattatattttgttacttaaggattagctcatcctcaacttcacttgttaatggtaaaatgctgttaaaatatgattatcatattagcatcaaattaactcaatttggtgcttagtaatgtaagaattagtgttgccaatgtacccattaaaccttttggattaagcagtcataagaatttttgtt

SEQ ID NO: 23980 - DNA, 301 bp, Glycine max
tgcggattttaaaaactacgggaattcgttcaaccctggttcggacactttcaaaggctacgctaaaggcgcagaagataacaaggttggcttcacaacctacagcgctaacacaaacgctacctttaaagattacgccaaacacggcgtttcctttgctagttacaacgtctcttcggaatctaaaacagtcagtagcagtgtggtaaaaaggtgggttgaaccgggtaagttttttcgcgagaccatgcttaaggaaggcactgttatgcccatgcccgatataagggataagatgccg

SEQ ID NO: 23981 - DNA, 276 bp, Glycine max
ctatactccaagggatagggacaagtttgaagggaaaatcagagctgtagttcaatcacttattgataatgggattgatatcaaggtttatcttgattgagtttagtcactcaagtttgtgggactatcagttaaggtgttgatattttggttgaagcagtaggccccttgtgtgtttgaacatgtccatttagtttggttttgatgataatgggaatatcattattcgaattacagatttggtaatttagttttatgaatgagttatgttgtcgt

SEQ ID NO: 23982 - DNA, 360 bp, Glycine max
acggatgattcgcttgatgatgatgatcacatgcagcaaagcagaaatgttaaagttgaaaaggctaaatttatggacaatgatgtggtttcaaatgatacgatggactatgactctgattgccagcagagggaagaacatagcagcaagcaagttgaagatatggagagagatgcaaattcagaagattttttggatgttggttctcttcagctgcaacggaagacttccagagccatgcatgccaaaagcatcaatgaagaagatataatttctgatgaccaaatggagagtccttttcgaaagaggcaaaagagaattcctacaaacaggcaggcaaatacttactggaaagatata

SEQ ID NO: 23983 - DNA, 429 bp, Glycine max
gggttttcactcgcgtcgaattgaggtaccgtatggctacggtagtgccgtgtttggttgcgtaaaacaactcgcgttaactggttttttttaatcgaggttagcttctttggtttttttgctgctataggaattgggagtgatggatttctcttcggtgagggctgcgttggattcgaagtcgtacgacaaggttgcggatgtgtgcgacaacttgatgcttcaggttgcagctgagggcattgcttatcaggacgattggccctacacaattcacctcctctctcacatttatgttcacgacatcaatagtgcgcgctttctttggaagtcaataccttcctcaatcaaagagagccagcctgaagtcaccgcggtttggaaaattggtcagaagctctggttacgtgactatgccggagtgcacga

SEQ ID NO: 23984 - DNA, 516 bp, Glycine max
gtagatttagaggtacgaagagaaggagagagcaaagcatgttttgctgtcggggatgccattgctcgtatccaattgcgctaaatcctttatcctctccacgctcccaaagtccaagcaaatgtcccgtcaagctcccggcgtcgtcaaaacgcgcctgaggggcgtcgttttcgacatggacggcaccctgaccgtcccggtgatcgattttccggcgatgtacagggcggtgctgggcgacgaggagtacctgaggctcaaagcggaaaacccttccggcatcgacattttgggccacatcgacggctggccacctcacaaacagcgcaaggcattcgacgccattgctgaggtcgagcgtcagggtctcgagcgccttcaaatcatgcctggttgtgctgagctttgtgccatgctcgattctaagaaaataaggaggggtttgatcactcggaacacgaagtcagcagttgatttgttccatgaaaggtttgggattaattttctccagca

SEQ ID NO: 23985 - DNA, 347 bp, Glycine max
aataatacacgttgttattgtttgaactccacccactcacgctcgttcctttcaaccctagaaattgcaataggagtggtatggacttacaaggtgctgttaaggacataattgcttgggatggtactctctcttcaagtgatttttccctttctgctcatacattttctgagaagtggaaaaggttcaatccttcctttcctccatggcagtggatcccatgtttaaaacatcatttggttgcttctcataaggtggaaggatacttatccctggagaacatgtgccatatcaaatcaagtgaggcagaagagagtgatagaagtctgacatggaaagtagagagc

SEQ ID NO: 23986 - DNA, 362 bp, Glycine max
gcagaaagtagccattaagattgttggcagcaattctgaagagcaacaaaaaatgttcgggaggcactttgagattgatgatgaacttgtaagccatatttcacggagatctatcgatatactcaaagctaattatcgggatgaactaaatatggaggaatggaggttggttgtgaaattgaagaatcttttcaagatacaatgaggagacttgatgtgtgggcattcatttaagaaaaaacaaggttttagtgaaatgtttggttttatgcaacactttgaaggatttgttgagcatgcggttggatccaccagagaccagtaaagatgatgcattgattcagatagatggctgtgtcatg

SEQ ID NO: 23987 - DNA, 382 bp, Glycine max
gtggttttgataagaaaatcctctttatttgtggggattacatggaagattatgaggtcaaggttccttttcagtcccttcaggctttaggatgccatgttgatgctgtttgcccctcaaagaaggccggtgacacttgcccaaccgctgttcacgattttgaaggggatcaaacttacagtgagaaaccaggacatacttttgctttaacagctacctttgatgatgtggatccctcaggttatgacgctcttgtcatccctggaggtcgagcacctgagtatttggcattgaacgagtcagtcattgccttggtgaagtatttctttgaaaacaagaagccagtggcatctatctgtcatggccaacagattttatctgc

SEQ ID NO: 23988 - DNA, 412 bp, Glycine max
ttaagacctgatttcgctctctaaaagttttgaggtggttgggctcatcacttggtcctgttcgtaatctgccaaggttgccgggatgtggaatccacgcgctctctctgcgccactcgccctgcttcttcttcactcgctccttgctctcatctctgctcagagatctacctggaacactctcagcggaggtgcgccattggttgtagcacgtggtggattttcggggcacgttcctgattccagtgatgcttcctacactttggcagtaataacgattggaccagatctctatatatggtgtgatgtgcaattaacaaaagatggacttgggatttgccagccagatataaaccttgcaaattctacttacattgcaagcgcttacccaaataaaaccacaagttactta

SEQ ID NO: 23989 - DNA, 102 bp, Glycine max
gaaaacataagtagattttgggccgataagtggagccattttatgtgctgactgctgatttgtgaactagttctacatcattatatgctgtaattttgtcaa

SEQ ID NO: 23990 - DNA, 556 bp, Glycine max
accaatctcagagctgaagtacctaaaaataacgattcctcggcggtgcaatcgttcgagtccaccgccatacacaccgaatcaatttcttcggagatcaatttccccttttccgttttggattttcttgcgttgcctaatttctcggcaaccaaacagcttctacaacttccatttccattccgttgattttgccgcatctccgatcatggaagctcctgacaactcagaagccaccgttccatataattctccaaaactagctggaacagttaactggggcacggcaactgtcgttggagtatttgcaggcatgttatatggcggtagcaaggaggcagctgcttctgttagcaaggatgcagaagttatgttgaaacttgggagcacagaagacaagcgtgagcaatatcgattgatgagagatgcaatggagaaacgattcattcgagttacacggggctcaatagttggaggggtacgtcttggaatgttcactgctgcattttatggcatacgaaatctgctcgctgagaagagaggtgttcatgatgtt

SEQ ID NO: 23991 - DNA, 352 bp, Glycine max
actcgagccgattcggctcgaggttcttatggtcttgtcacttgtcgctgttgtgcaccttctagcagttagttatagacacaaaaacagagggaccctgcttcaaaatttcattgtatagattgtttgttctatattttctaatgggtatcaagttgaatagaccagtcactgttgagattttgtttcaagtttttatagtcctatccttgtttaggattacaacttcggttttacaaccagcaaattttgtcttcggagattctcttgtcgatgtggggaacaacaattacattgcttccctctcaaaggctaattatgttcctgttggaattgactttggaagaccaac

SEQ ID NO: 23992 - DNA, 785 bp, Glycine max
  unsure (1)..(785): unsure at all n locations
attcggctcgagcgcgtatttagtcctccacctccaaattgtagacgaatcattgttgcaacaaatattgctgaaacttccttgactgttgatggtgtagtgtatgttattgactctgggtatgtgaagcaaaggcagtataatccatctagtggcatgtattctcttgatgttgttcaaattagcaaagtgcaagctaaccagcgagcaggccgagctggacggacacgtcctgggaaatgctaccgtctatatccttcccgtatttacaatgatgagtttttggacgttacagttcctgaaattcagagatcttcccttgctggcagtgtccttcacttaaagtcattggacctcccagatattgacattctaaaatttgactttctggatcctccatcatctgagtccttacaagatgccttgaagcagttatttctgattgatgctattgatgaaaatggtgcaattacaagtattggacagaaaatggctgagcttcccttagaaccatcattggcaaaaactttaatggaggcaaacaattatggttgcttatatgaggctttgactgttgctgccatgttatcagctgaaactacattgctaccagggcagaggaagactgagaagaagaggaaacatactatatctaacctacctgatggttctggattgggtgatcacattcaattgctgcagatatacgagtgctgggatcaaactgattttgacattggctggtgcaaagataatggcttgcangtgcgagggctgttgtttgt

SEQ ID NO: 23993 - DNA, 692 bp, Glycine max
ttcgatagtaggtcccatagtgacgatgaagggtcaactggggatggaggaattgttgacagtgatgatgacagggcactagctgggtctgagggtccatcatttcaggatgtaaaggaaataactattcgcagatcaaaacttgccaaatggtttatggagcctttctttgaggagttaatagttggttgctttgtaagagtgggaattggtagatcaaaaactggaccaatctaccggctctgcatggtgaaaaatgttgatgcttcagaacctgatcgacagtataaattagaaaataaaactacatacaagtatttgaatgttgtttggggaaatgaaagttctgctgctaggtggcaaatggctatggttagtgactctgctccaatggaagaggagttcaaacagtgggttaaggaagtagattgcagtggcggccggatgccaagtaaacaagacgtgctagagacaaagcaagctatccaaaaagccatcacatttgtctactcaagggctactgtgaagcagatgttacaagagaaaaagtctgcctcaacaaggccactgaatgttgctgctgagaaggatcggctgaggagggaagtggaaatagcacaaagtaagcatgatgaggcagaagtggagaggatcaagacaagactgcaagaattagaggcatcgagacaagc

SEQ ID NO: 23994 - DNA, 484 bp, Glycine max
tcccggattgtggggccacacgctctcatgcttaaatggttcttggttggtggtttttggtgggtgtggtaggcagggattgctcaatgatgtgtttgtgcttgatttggatgctcaacagccaacaggagggaggtttgtggtggaacacaccacttcctagatcatggcatagctcttgcacaattgaagggtccaaattggttgtctccggcgggtgcacagatactgggggtacttcttagtgacacatatttactggacctcacaacagataatccaacatggagagaaattccaacttcatgggccctccttctcggttggggcactcactctcagtctatgggaggactaagattctaatgtttggaggacttgccaagagtggacacttgcggctacgatcaggcgaggcttatacaattgacttagaagatgaacaaccacaatggaggcaactagaatatagcgcattcacagg

SEQ ID NO: 23995 - DNA, 538 bp, Glycine max
gaagaattagacttgaatgcagctctacaaagatatttcccgcaaggcattgacatctactttgacaatgtgggtggggatatgctcgatgctgcactccttaacatgaggattcatggtagaattgcagtttgtgggatggatctcagcaaagcctttccaagcccatagggatatacaatttattcaacctcattacaaagcgcatcaaaatgcagggttttttgcaaagtgattacttgcacctatacccgcgctttttggaagatgtttcaagttactacaagcaaggaaagattgtgtatattgaagacatgaatgaaggcttggaaagtgctccagctgctttcgttggacttttccatggcaaaacgttggtaagcaagtcattcgtgttgcccatgaatgattttttcagtatttggttagctgaagcttgatatgttttaaacatattcaattgagaatttttggatgttcttgaactgtgtcagctggcaaggccttattctcaccttctgccttgagcagaaaatgt

SEQ ID NO: 23996 - DNA, 349 bp, Glycine max
  unsure (1)..(349): unsure at all n locations
cagaggtcctacaagggaaggcattgtaagaccttttacacggaggaagggtgcccctatggagatagttgcacctttcttcacgatgagcaatcgaagaatcgcaaaagtgttgctataagtttgggccctggtggttacggtggcggcggcggcggcggcggcggtgttggtggtggtgacagtggtggtaatggtggtgctaatgctgctgggaatgggcctaattcgaagccctctaattggaaaaccaggatttgcaataagtgggagatgacagggtattgcccctttggcaaagtgtcattttgctcatggtgccacagaattgcacagnatatggagcggg

SEQ ID NO: 23997 - DNA, 383 bp, Glycine max
  unsure (1)..(383): unsure at all n locations
gagaaaggcacaaaaagcttgctcaatattgtgattaagaatcagaaggcttgctcaatagtgtgatttaagaaccagagattaataggaggtattgactgtctggccaacctttaatgctgcctctccattggtttttcttgttttggtcgctatcctttgtagcgagggcaggaagctgtgtatagtttggactgacatcttaggccttatgatcaatcacatgattactgccttgtctgtctcattttcatactctgtaattaaaactagctcaattacatagctcgccgccgacctatttccttctactattattatgttagtagcccatactgcttgctttgtgaatgtggtcatattcatttggccttnttgatgtc

SEQ ID NO: 23998 - DNA, 594 bp, Glycine max
  unsure (1)..(594): unsure at all n locations
attccacaatcatacgagtttctanaccattctgaattgttttgttttgttcagacatggcccttcagcatcccaagctttcaaggttgcatttatactactatacctcccttacttcaacttccatttcatgtttttaaccgaccatgccccttatcgatgattctccaacacgcttctcccacctctccacccctctgcccctgtaacttgttcgccaattccgcctccctcaaattccgcagaaaatgcactgtcctactctgcgccgttccctccgacaacccaaattggaacgccgatttcgccaattccgcccgcaggaccgccacaaccttcgtcctcaaacgaatttccaaccaactcgaaccccacaccaccaccaccaccaccaccaccaacgataacggtgttattgattccgaattacaagcaacaccgccggttcaattaggttcaaacttcaccgctttcagcgaggatcctattgtggataagctgaggacccagctaggggtgatacacccgattccctcccctccaattaaccgcaacgtcgtcttcctgttcgtcttcttcttcttcgtcggcgtc

SEQ ID NO: 23999 - DNA, 896 bp, Glycine max
attggctgtggagaaacaaataagactagttatacatgtaccaggagcaatcttgggatgaagttttccaatgcttctgatgatggctgcagattggttctgggattgggcccaacccctatggcatatgtcgatgactacaacaatttggggttgaatatgaagaaaaactcagccaacctttttactcagcatgtgccatctgaatgtgaatcaatccttcaacttggtctttcgggtgtaacaaatgaggcctcaagtgtgcttgactgctcaggttcaactgagactgatgtgaatatgtcatgtttctcaagccaaacttcttcagaaaattattattcaaggattcctgttgttgatgagggttctacctcagcaaagaaatcaggtggctatataccatcacttcttttagctccaagaatggataacactgaaagttcggtgcaaacacaagaattaattgttggaagtaaacctcaactgtgcccagaaccatccaatgctgtaaattactcccttggtactgtatctgggccccaggatacagggataactccagagaaccgaacatgcaatcctaagagatgtagattttttggctgtacgaaaggagctcgaggtgcttcggggctttgtatcgggcatggtggtggacagagatgtcagaaacctggatgcaacaaaggtgctgagagccgaactgcttattgcaaggcccatggtggagggaagaggtgccaacacttgggatgtactaaaagtgctgaggggaagacggattattgcattgctcatggcggtggtaggcgatgtgggtatccaggtgggtgcaccacagctgctcggggtaagtcaggactttgcattagacatggagggggtaacaggtg

SEQ ID NO: 24000 - DNA, 364 bp, Glycine max
ctaacactatagtactactctttttttcttgcctgaagtgaaggaataatggaaagatttcatgaggaagaaattgaagagccagtgagtccaacagggcaatacttgacaagctcttcactaagtgtgtacattcttggtgtcttggaaagtgaggttcccattgatgactctcaaaccgtgccacttcttcagaatctcttccttcccatcaactcacgtttctcctccatcatgattatggacaaaaatcgggagaagaagtggaagaaagttgaagttaagctggaggaccatatcagagttcctacattctataatggcaagtcatccaacttgttcttatatgatgaataccttgatg

SEQ ID NO: 24001 - DNA, 439 bp, Glycine max
gctggggaagacagaacaggcagtttaatttgttgttctaatggagcaatcatgggagaattggcctcttgatatgggaatggaggaagacagggatctgagggatgaggaggagttcctgagaaacatcctcagtgaaccttctgagagtgagatggtaaccgttgggtcagccaaaaggcctccgaggacatacattttgtcttttgataactccaccataataccagctactcctgaacccacttccagaaaacgcacacgccaaccacaaaatctcaacttagaaccagttaaaccaaaccccaacacccagcctggaaagaggggtagaagctgttcccagactctggatcacattatggccgaaagataaaggagacaggaactcacccagaagttcattgctctttcagccactatcgctggcttgaagaag

SEQ ID NO: 24002 - DNA, 659 bp, Glycine max
tacggaattcgacagaaggggggtgtaagtgttgttcttccgatttggttcaatcaaatcaatgatgttgaggaggaggggttctgtgacctccttctattccaaattcatcgattctcacaatcttaattgtgggcgttcctcttcgaatccccatcgcgtcgccgcttctgcaacttcattcgatatctcttccgcttctgcgtctaaagctacgaccgactttgtgtcgttgacccgccactatggaaggtgctattgggagctctccaaagctcgtctcagcatgcttgtggttgcaacatctgggactgggtttgtcttggggagtggtagtgctgttgatctttcggcactttcttgcacttgcttgggtaccatgatggttgctgcatctgctaactctttgaatcaggtgtttgagatcaataatgatgctaaaatgaagagaacaagtcgcaggccactaccctcaggacgcatcacaatacctcatgcagttggctgggcatcctctgttggattagctggtacggctctactagctacgcagaccaatatgttagctgctgggcttgctgcttccaacctaattctgtatgcatttgtatatacacccttgaagcagattcatcccataaatacatgggtgggagctg

SEQ ID NO: 24003 - DNA, 372 bp, Glycine max
  unsure (1)..(372): unsure at all n locations
aatcaaggcaacttgaagcggaaaaactgaaactagaagagctgcttgctacccaacaaatggatttgcaaggtgaaatcagttgtttgaaggaagaacttgatcagagaagacatgatgttgaagctgtgaataaggaatttgacaggcacaagcagaagtgtgatgtgctcatgactgaaaaagatgaggccaatgctaagattcataaccttatggctgagacaagagaccgaaacaattacattgcaaatctggagagagatataatcctgctacgtggacaagaggcagagctgagcacaggatctgcagctacactgacttgtaaaggagttgaactaaaagccgatggctcgantagtagtgatc

SEQ ID NO: 24004 - DNA, 726 bp, Glycine max
ctaaggttacagtagtacatcattataaataaaaaaaagtctacacactactatggggtgtgtaacattctaaatttctaactttcctctctctctctctctctctccgaggtcttagatctctgctctgtctctatctctacttgaggcctttccctctgttccgttggcgggtgggtctttcttctctcaaaatggccaccggagtgaccagaaaaatttctgctgcatcagctcgggcccacaccagaagggcgaagaaaaccaattctctaccccttccttcaggaattcttggaacagcactagcagtgttgtttattgggtttctagcatgggcttatcaggttattcaacctcccgctcccaagatatgcggcactcctgatggaccacctataacagcaccaagaatcaaattaagagacggaaggcatttggcatacaaagagcatggtgttccaaaggatgcagccaagtataaaatcatctctgtccatgcttttgattgttgcaggcatgatactgtggttgccaataccctatcgccggatgttgttgaggagctggggctctacattgtatctttcgacagacctggttatggggaaagtgatcctgatccaaatcgtactttaaaaagccttgctgtagatatagaagagcttgcagatcacctgggattggggtccaaattctatgtagttggtgtctccatgggtggac

SEQ ID NO: 24005 - DNA, 528 bp, Glycine max
caaacaaataacggggaaaatagcagtcaatcaggctcatttgttcatcttaagaaagatgatggctctcaatcaggcgaagaaagtggtgctaagtctgtttctacttacaggtcttcttcacatcctataactgcaccgtcccccttgtgtggtctgcctgaattttctcaccttggctggggacactggtttacgttaagggacctagaacttgcaacaaacaggttttcaaaagacaatgttattggtgaaggtggatatggtgttgtttatcagggccagttaatcaatgggagtcctgtggctgttaagaagctactcaataatctaggacaagctgaaaaggaatttagagtggaagttgaggctattggccatgtgcggcacaagaatttggttagacttctaggctattgcattgaaggcactcacaggttgctggtttatgagtatgttaacaatggcaatttagagcaatggcttcatggagccatgcagcagtatggttctcttacttgggatgct

SEQ ID NO: 24006 - DNA, 356 bp, Glycine max
caaatcggtcgataatgaagaattgggaactgaagcaagttttaaaggtgctgctatttctacagagaagaaaagtgcatcatcaccttctttgtcccgtctcctattggtttgctctccttgtgcttatatatgtggttgctcaagttcaagtaacgaatcttctgatcaacaagcaagtgaagatggcatgttctattgcagtttgtgtgaagttgaggtcttcaagtatagcacgcattgtagagtttgtgacaagtgtgttgatcgctttgatcttcattgcaggtggctgaacaactgtcattgggaaaaggaactacagaaaattcttcacccttatggttgcttctctc

SEQ ID NO: 24007 - DNA, 385 bp, Glycine max
ctgttcttgctagtgcttattcaaatggtggggagatggaagaggcacagaagatcttggcagaagtaaaaaagaagcatgctaagttgggacctgtaatgttccacactctgattcgtggatattgcaagttggaacagtttgatgaggctttgaagttattggctgagatgaaagattatggtgtccatcccagtgttgatgagtatgacaagttgatacagtctctctgcttgaaggctttggattgggaaatggcagaaaagctacacgaggaaatgaaagagagtggtttgcatctcaacaggcatcacgaggggtttgattagagctgtcaaggagatggagaaggaggttgtggaggctgggagcattactgcagcag

SEQ ID NO: 24008 - DNA, 406 bp, Glycine max
aggatgttgcagttccccactcataaagatagctaggtaagagggtgtaagggaagagaaagagatcatagaagagatatagtttaattttgctttgctttaatttgtgaggatttgatttgatggaagaacatctcactccattggctgttacccatctccttcaacacactctcagaagtttgtgcagccatgaaaattctcaatgggtctatgcagtcttctggaggatcttgcctagaaactaccctccacccaagtgggaaggacaaggggcttatgatagatcaagaggaaacagaaggaattggatattggtgtgggaagatggtttctgcaattttgctgcctcagcagcacctgaaattaactcaggtgattgttctaccccacctgtttatgggaa

SEQ ID NO: 24009 - DNA, 188 bp, Glycine max
tccgactccactccgaggtttgttaagctgaagactaagagcggttgtgatctcgctcgcgagattattcatagtacacattaatatttagaaatgcttgtagctcgaagcctctccccttcaaagcttaaaccactcttttatctatcgatcctttgtgaatgccaaaatcatttccacacaacata

SEQ ID NO: 24010 - DNA, 726 bp, Glycine max
gaaggagccggaagagagtcgtttagagagaagtagacgactgaagactgacaaggccataaaggactcttacaacaatgttgaacaggagaaaataagattgattattgaaattgagaggtataaggagtctctgaaaaggttatctgatgaagttgaaaagcttaagattgttcttggcaatcttcctgagggtccaaatgtggttcaacttctttctggatccaatgtcgatgactttgctgctccttacatatctgctgtggaaagttttgaaaaggaagctcagtcagtatttcgtgagcttggaggtcgcggtaatcttggagatgcagcaacagttacggatggttcagcagctgctacaggttctcttgtccatcctcaaccccaaggcattacattttcagcggcccctggagctagtggtttaccacctaaagccagtggagaaagtgagaaaagacttgcattacccaaagctagtgttgaaactcgtcgagcaggtaggagattggtcaggcctaaactactagggcctggtgagaaaagacctgaggagcttcaaggtggtgacacagaaatgtctgatgctgaaggacctgggggcaagcctgggcagtctagtgacacagatactagtaatgttgttcaatcatctcaacaattggctcgtaagcgtgttgctcctacctccacttctgaattacgtgaagaatcagttgc

SEQ ID NO: 24011 - DNA, 359 bp, Glycine max
gcacttgcaataggagataacttcaataaatacttaatgtatgcaatgaacacactacaacttgctgcagagatgtatgcccacacgtcaggttttgatgatgaaatgacagagtacatcaattccttgagaaatgggatattagaggcatattctgcgatttttcaagggtttaagaattcatcaaagacccagctcttgattccttatgcacctcacatcctccagtttttggatagcatatacgtggaaaaagacatggacgaggtagttatgaaaacagcaattggagtccttggagatctagctgatacacttggaagccatgctggttctttaatacagcagtctttgtccag

SEQ ID NO: 24012 - DNA, 458 bp, Glycine max
caatgatgtggactgtcacagctgtcttttttctactagtgggagctgttgtttggattttagagcataggctgaatgatgattttaggggacctcccaaacaacaaatggtcacaattttgtggtttagtttttcaaccatgttctttgctcacagggaaaacacagtgagcactctcggtcgctttgtgctgcttatatggttatttgtagttctaataattaactcaagttacacagcaagtttgacatcaatcctcacagttaaacaactttcttcacctgtcaaaggcattgaaagtttaagaagtagcaaagagcctattggctacttgcagggttcatttactcgaaattatttaattgatgaaattggtattgatgaatccagactagttcctctgaaaacaccagaagaaactgcagaagcacttaagaaaggtcccagaagggtggtg

SEQ ID NO: 24013 - DNA, 353 bp, Glycine max
gctgtttttttattttccccacaaaaccatatattcatcggtcgtagatcccacgaaccccatcatcacaccactctctgcagttttcgcaaccaaaccttcttttttgtttttattcctctgcttattggattcaacgaagttgttgtgattaaggagaacataactttttgaatcacacagagagagagagagaagagacccagtactttctgcatccaaaccaatcactactgcggataactggtaagttcataaaggggagattcttcagtgatcatctatctgatttggtccagctaaggaatcattcagaagccaagttgattaggtactagagagatcatattttg

SEQ ID NO: 24014 - DNA, 522 bp, Glycine max
  unsure (1)..(522): unsure at all n locations
attcagttgagagaaacctaagctaaggtaaaaccgttagtgtaacaactatttcattttttcagaactcagaacaaaacaaaacaaacccccttcgtgttcctacttgcatttgtaacataataacatttcgcagcgttcttgttctcactttggcaaaaaagnaaagaaagagggaaagacattcgagaatcaattaacacaatccaaatataattaattaattaattaattataagataaataacatagagaaaggatgagatgagtgaggctgcagctacgacgacttcgtcttccatgatgcgcaattaccctctcatttccgccatcgttgctttcgccatcgcacaattcatcaagtttttcaccgcctggtttaaggaaaaaagatgggatcccaagcaacttgttggatctggtggaatgccttcatcccattcggctactgtcactgctcttgccgcggcaatcgggttccatgaaggctttggaggacctctttttgctactgctttggtt

SEQ ID NO: 24015 - DNA, 384 bp, Glycine max
atacactccattaacgtaaccatgctctctttcaaacttagtctctaccttcttattgcctctgtctttgtcttccacctgcttcctagtccagtgctctgcaacgacgaggaggatctacttcatgacatcaacgtatacagaaaagttttgaaccttcctgttctggatgaaagtggcaaagcttcttgcttagctgaagagatagcagaaaatctagagcacacgaaatgtgaagactttcgtgactactaccctctgcctagttacacctccaaaattcctaagttccaaaagagcataaacaaatgcaagatcacacatcaacaccacaaaagatggggtcatcatgcctctctgtgtgcccaagttggaccccgatgc

SEQ ID NO: 24016 - DNA, 529 bp, Glycine max
ctcactccttcaattcccacctcaaccaattccatccaatgctttatttcacttttagaaacaaagtttcagtttaccctgaatcagttggattttccaaactttcaccaactgggtacacttgaaaacagttcagggctcctgattcagcataaagttttaatttttcgttcatttattatatgtgtcttcaattcaacttggatttgtatacaagttccctctttgttcatttatttgggtacagtaagaaatagtctcttttaagctttcagtatatataaattttaagaatgatacatacagttgattctgttgattattacttgatcaatccctagtggcataagttctagttttttttttatccgtgggaatcgaagacattgtcagaggatatgggttctagtttttggtttgttttaaatgttatttatttacatgaaattatgaactgttattttgctatgtaagatttgtgaatatgcttaaaacataggcattgatgtcatttatatgaactattatt

SEQ ID NO: 24017 - DNA, 576 bp, Glycine max
  unsure (1)..(576): unsure at all n locations
agaanatctgccaaggcagggttgaacgaactaagaagagttgcaccttccagaaagtggagacttgtggaaattgatgctgacttgtcagacttggtgttcgaaactagtcatgttatgtccctcataaatcctgccaacacctacatggacctgaatattggaattgctttatggcttgctgctggtggtgatggatgggtatctgatgcaaatacatatgataatgatggcaatcatgtacgaattaaatataagtcaaatgcgaagattctccttgttggttctggtgccgatgagcagtgtgctgggtatgggagacatagaacaagttatagacgtggaagttggctggggttacatgaggaaatgagactcgacatgcaaagaatttggagaagaaatttagggagagatgatagatgtattgctgataatgggaaggagatttccattcttggatgaggatgttataaggcttttgctcaatattccattgtgggaggtagccaacctcgatcaacctagtggcattggtgataaaaggattttaagagaggttgctgaattgcttgg

SEQ ID NO: 24018 - DNA, 347 bp, Glycine max
caaggcgccaccctggcccaatccccggcccaactggcccaactccgtcgtcgtcgacaccaccagctcccaccccgacctcgcccgccagatcttctccgcagcacgctccctcgacgcctggtccgtcgacgcccccgtctccggcggcgacatcggcgcgcgcgacggcaagctcgccatcctagccgccggagaaaaagccgtagtcgaatggctgagccctctgttctcgatcctcgggagagccacttacatgggccccgcggggtgcgggcagagctgcaagatcgcgaaccagatcacgattggcgcgaacttgatcgggctgagcgaggggctggtgt

SEQ ID NO: 24019 - DNA, 451 bp, Glycine max
cccacgcgtccgaccctagttacttcctccgtctttgtctctctgtctgcgtctcttctcaaaaaccctacaaacaaaacactctctgcttcgcaaattcgaacctttgaatctgaatcatgccgcgcaagaagaaagctcacgacccattcttcaccaacgattcccgaaagcgccaaaaaccgaataaaaaactcgacgaagatgaggaagacgccgagatagaaagcgactttgatgaagacggcttcttcgccggcggcggtggcggcggctcgggtgaagagcaggaggaggaagagaccggcgcggaggtgcggaagagactcgcacaggaccttctccaaagggttcggaaaagcgcgcagaaaggagaggaagaagaggatgataaagaagaagacgaagaaggagcaagagactcgctcgtagctcagaagttgttgaagga

SEQ ID NO: 24020 - DNA, 516 bp, Glycine max
ggtaattgcaagcaaaaccctagtgagtgatagataggtgaggtgctgttgtctgaatcgaatagaatcgggaaggaagatcaaagatgtggtggagatcagcatctttcatcatggacaggcagcggaacgaggaggctgatctgaagggggactcctcaaaccctaaccctaaccctaatatctctgcctactatgagacgagagcggcgcaccacggcgtggtcaccagcgactggctggcccaggctcaggccgctattgggcccgaccccgtccccgaccccaaccctgaacctgaacctcaactcaggcccgatcctgacaagcccttcagtgtcatcgatgagtttaacagctggcggaaacagccccatttggccgaggccgtcgccgtcattcgggccctggccgccgtcataaggtccagcaaggctaccaccatgatgcagctcgagattgagctcaagaaggcctccgattttctcaagtcttgggataccacctctatctctc

SEQ ID NO: 24021 - DNA, 278 bp, Glycine max
ccagtctgttactaaccctaattactttttcgagattactcaatagcaaaaccccaggtgagggtgagggaagatcagagatgtggtggagatcagcatcattcatcatggacaggcagcagcagcagaaccagggggactcctcaaaccctaatatctctgcctactatgagaccagagcggcgcaccacggcgtggtcaccagcgactggctggcccacgctcacgccgctattggccccgaacctcaacctcaacctcaactcagccccgatcct

SEQ ID NO: 24022 - DNA, 827 bp, Glycine max
accagccaagatccaaagaaacccattgagcacttaaatattctctcatttgatcaacaacattggcgggggaatatcatggcaccaagaagaattgagatgctgctgagcatgtcccttgtaatggttctttggggtgtcacattggctcaatctgatcaatcaagtagttgcaccaatgtgttcataagtcttgctccatgccttgactatgttacaggaaatgcctctatcccttcttcttcttgttgctctcaacttgcctttgtggtacggtcacagccactgtgcctatgtgaggttgttaatggtggtgcttcatctattgctgcaagtttcaacatcaatcagactagggctttggcactccctactgcttgcaatgttcagacacctcctattacctcctgcagtgcctcggcttcttcctcacaaggtgtttctgtttcctactttccaaattccccttcaggaattggatctagcactgtttcatcaacgatcggaggcagtagaagtgtcggtgcctcatatcatggaaattcaagttcaacaaaattgccatgttctttgcttgtcatcatgtttttccttgcaacgactttgactttcaccttcaagaccatgacctagacaacgtcgttgcacatttttttaaactttgttattatcttctactgcttcgagcatactcacttactggtatcatttgtcctttatccttattaaaaaacttaggattaaaatttcccctgtatatttcatgtacatttttatttctctgtttcttctattgatggctaagatataactgtgttttgattctt

SEQ ID NO: 24023 - DNA, 581 bp, Glycine max
tgagttaagggttgttcctgagttgttgtgtagtaggtgtccaccaatgacatcctccttttcagcattagtagggggtggtgcagaagacacccgaacacagtaccccatagaaaccgaagaaagtgccattcttgttccaccgccaaaagattcatcctttatcctctaatgcgagacccatttgaataaatccccaaatatagaaaaaggggttttacatttttccatgatcaataaatagcggttgttgttgttgttgttgttgttgttgttgttgttggatatgctgaggttgtggaaatggtaccagaattgcttggcggttcaccctgttaagacacaggtcatcagctctggcttgatttggggtgctggtgacatagctgctcaggcagttacccactacactgccaagaaacgtgtcacttttgatgcggatgacactaaagaattcaagatcaactggagacgggtgtctacgaccagcttgtttgggttaggatttgttggccctgttggccacttctggtacgaaggtttggatcggtttataagactgaaactcatgcttaaaccga

SEQ ID NO: 24024 - DNA, 347 bp, Glycine max
ttttaatctttcaatctctcagactttgttattatattcttgagagtgagcataattaatggctaccaagcattcactaatgtctctctttcacagaacttcatcaatgagggtgagcacaacccgttaaacatgtccgatgagcagatattggaccaaatttactcaacccatgtccacagtcacacaaagtttgatgtagactctcttttcattcttgttgagaacacccttaggcgttcaactctcattgttgacaatgttgttcagggttccaaagcaagcttggagcaggtagaagacaagattccccaagccaacttcaattctccactctataccctgaa

SEQ ID NO: 24025 - DNA, 423 bp, Glycine max
ggaaaaaggcgaaacagagacggcgtagtgatgctatgttatggcttgggtgtttgagttgcggagtcgttccctctgcacgtcctcctcctcgaaatggagggtgaagcaggtgacaacctccaacttccaagagtccctgcaagagataaagacgcacatctccaactccgactttgtcgccatttccatgggaaaaacgggctctccctccgcgccgtcgtggctccgccctctacccttcgacaccgcccagactgcctactccaaggcccgccgcgccgcccagagattccagctcctccacttcgccgtctgccccttctccgtctcccgctccgacaaactcctcgctcacccgtataatttcatgttgtttccaagagatgaaatgaagatggggatgcccacttacagcttttc

SEQ ID NO: 24026 - DNA, 1128 bp, Glycine max
gttctttctgcctggagtggcattcgcccattagcgatggacccaacagctaaaaataccgagagtatctccagggatcatgttgtctttgaggatcaccctggtttggtcaccattactggtggcaagtggactacctatcgaagcatggcagaagatgctgtcaattcagctataaagtctgggaagttgacccccgccaatggatgtatcaccaacaatatcaggattgttggtggtgaagggtgggatcctgtttcctttaccattctttctcaacagtatatgcgcatgaaagtcacatataggggtaaagttgttcctggtgtgatggacactgcttcagcaaagcacttgtctcatgcatatggaacattggctgaacgtgttgctgccattgctcagaatgaaaatttgggcaagcgacttgcccatggttacccttttttggaggctgaggtggcctactgtgcccgtcatgaatattgtgaatctgcgattgacttcattgctaggagatctcgtcttgctttcctggacacggatgcagcaggacgggcattacctcgtgtgattcaaatattggcagctgagcacaaatgggacaagtcaaggcagaaggaagagatgtttaaagctaaagaatttttggagacttttaaatcctccagaaatgctcaattctatgatgggaagcacaattagctctggatttgaccaagaagggagtgaccttccaaacatggtattattgcctatagtttccgtgggtcaataaaggattgctgctacggtcagtagcataatacatctcagaagtcaattatttagtgaatttgtcaaagctgcctggcaaaatgctttcaaattagtgttttctcccagttctgtgccacgtttttttggagcgatgtgagtcacattcgtgggttgtggctgttgttggtatggaagatattaataaaaaagaagtgtatggtgaaaaggtaaagaaagagaatgtgacagaggacctcttgtgaagagatcctttttttttttctctttcaaacaagtccttcggaaaaatattgtccatttattggtttagacttttcattgttgtaaaaaaaaaaaaaaaaaagagct

SEQ ID NO: 24027 - DNA, 295 bp, Glycine max
tctgatgagaggcttcaggataactcttattgggcagaggatggtgctgagaatggctatggtgctatagcagcagaaattcttgatcaagttagaggaaggggttttcgtcatgagaagaccaagaagaaacgtggaagctatcggggaggacagattgattacaatcccactctgtaaagtttaattattctgatgaggactgattgggaagcatatagaattatagattcgtttttggtttgtagtttgaacaatgttggtggacggcagtattgttttattttgtcgggga

SEQ ID NO: 24028 - DNA, 610 bp, Glycine max
aatgaaagctggacttgtgcaataaacgaacaacaataacagagacagtggttctcactttccgcacaagcgaatcaattacgccacgccatagccacaatttcacctatccaattattcacgacatgtaacaaaacgacaacaccactttcgtcgttcgccgtattcgatttcagagttccgtggcgtccggccatggccctgcgaaacggcggcagaaaaatctccttcgaggtccttagcgtcgaggacgaatcggatccaacggaacgcaaccgcaagaagcgcaggcaccgcgcttcgaaaaagaagaagaagcttctcgatcgggccgattccgattccgcggatccgcgttcggcgccgttggagaatggaggagcctgtaacggattcgagctcgacgctagcaggtactgcggcggcggcggcggaggaggaggaagcgttgtcgtgtgcgaggaggttcgcgaggccgagagtgtgtgcgcggttgcggaggcgcgtggggcggagagtgaggaagcaaccgccgtgcgcggtggcatcgaggggtttaatttcggggaattgaggcagaggaacgtgaattgtgggagttcggaggatt

SEQ ID NO: 24029 - DNA, 380 bp, Glycine max
ctttaaggatggaaaggatgctccttcattaatgaagaaaaacattaacacagatgaggcgatgttgttttctcagagaaatgacaaatcaggtagctattctatgtcaaatctgtcgggcaatggcccagaatcttccctcactaaatgccagacagaagaggattggttcattatcaaccagtctggtaaaccaggaaatgtggatcaaaaccgagatttcagcatgtttgatggcatttccgtttcatcatcagctactgattcgtttcatgtagagaagaacaagaaagacattgtgactgatgactctttcatgattcaagctcgatcatcagaagatccattcaattctcagtcagcagctgatctaagtttgg

SEQ ID NO: 24030 - DNA, 504 bp, Glycine max
tcgcccacgcgtccgcccacgcgtcaattaaagacccttgacactgttgcgtttggctaaaatgccggatgttcagacccttgttaacgattttctgaatcagcttaagaaacgtaaaattgaaggttctcaggccacagcgaagctcacagcagagttgctccggtctgtgatttcacagcagcgagtgccacacacaaaccaagccacagctctgattaatgcagtgagggctgtgggggagcagcttattgctgctaatcctgttgagctagctgtcggaaatatcgtgaggcgtgttttgcacattataagggaagaggatctttcccttgcaacagctgctatggatggtttgggggtatcagctgcaagtgatgatgaagatgatgcagagcgagatgaaaatcctgttttatctgctggctgctgttgcagctgctgccagaagcacattgcgtccaccgtcattgcaaactcttctagaggatacatctgattcag

SEQ ID NO: 24031 - DNA, 445 bp, Glycine max
gtggctaacaaaacgacgttttgagtaacgcggcaggtgtgccgggagtgtcgtttaatcgcccgccaagacattttcctttttcatatcatcgctgagtccctaaagtgcagtgaaatggtcattcttcacctcccaaggttccctctctacctcgttaccttatctccctccctcactccccgagcctactccaaaaccaccctcttacggccacccaaatccactctcaccgcctcacaacccgtaactgttaacccttccccaacagagctatccctcgagaagctcttcgttccgccggagaccaccgtgtccctcgaaagttccagagtcttgaacggttccaacattgtgctgagttactacgccaatgatgctcaggtgttgcaagccgagtttgtgaaaagcagtgtgaagatcgaggattgtcccttcgatggac

SEQ ID NO: 24032 - DNA, 557 bp, Glycine max
aaaccaagtgttctcttttccaatattttgcaatgcccccaattttctcccctttgctttccaagcagtttcccccaaattctgaaatcaaagggtttctgaatttctgataatcacactctcatacatatataatagcagacacatcttaccatctctcaccaatcacacaaccaaagacctttttctctcagttcccctgtgactcactctcttccttcactgctaaactcttccaatggcaacaaaaactagtcaaagccataggcattgacttgggcacgacctacagctgcgttgcagtgtggcaacacaaccgcgtcgaggtcatttccaacgaccaaggcaatcgcaccaccccttcctacgttggcttctacgacacccaaaggttgttgggtgactccgccatgaaccagcgatccatgaatccgaaaaacaccgtctttgacgccaaacgtttgattggtcgccgattctccgaccaaaccgttcagcaagacatgaagatgtggccttttaaggttgtccctggaaacaaagacaagcccatgatc

SEQ ID NO: 24033 - DNA, 331 bp, Glycine max
tgtgcttctttacttattctatagagagtgctttgtgttgttagtgagttcagtttccatggatcgtacgcttgttatgtcttcacctaatgtctgttcaaacactaatggtggaaatctcatgcgcaggaaacattccaccatggccaacaatatatactatccaacttcttgcgtatcaaaagcttcacaatgccacaggaaaactcaaatagaatgcaatcttttgaggtcacaacagtcaattttgaatcatcattacaaatgcattgaaggaaggccaacatttcaagaatgcaatagaaaatatgttgtaaaagcagcccatgct

SEQ ID NO: 24034 - DNA, 443 bp, Glycine max
aaacaaacatacatcctcaaagatggagaagatgaaagaagtgaggaatagcagatgttgttgttgatacaatacaactcatctgtcacaatccattctggcgccctcaaaacaccctctaactgaacaaccaaagaaaaagaaaaagaaaaaaacttgagcactcttcctcttgccagtttcagatctctctgagaaatgataataacaataatgggggtgtgagatgtgatgtgatgtgaaggtgtgtaaggtgtacacaaaagatggagtgttggaattcggtggacggggtggtggaggagataatgaggattcacagatctcttccagcacggcctgggatccatgaagtcgaagcggcgagaggtttgatcgggaatgtggagaaggaagaccaggccaggctcgaagccatagcccggcagagcaagggcgttgat

SEQ ID NO: 24035 - DNA, 428 bp, Glycine max
ctcgagccgctcgagccggctctactcagtgaaactcataccataccaataccatcttttacgcaatttagctgttgtttgtttgtcatttcatttgtttcagctccgaaccctgcagtagagtatgctgtgttgtgtgtgactaaccaaaccaatctctatcttagtaaaagtattttagcttcataacatgaagatcttgtggctttgtgtcagttacttgtttcctgcaatcattcttgttctgcttactccttcctcagttgcacaagaatcaccaagtgagggtagaattctattccaagttcagaagcttcttgagtatcctcaagctcttcaagggtggacaagatggaccaacttgtgcttcctccctccctcaccttccctcaagattgtttgctccaatggtcatgtcacagaactta

SEQ ID NO: 24036 - DNA, 393 bp, Glycine max
gcctcgcgtccgagtttttatacgtttcgccacaaatcccgcaccacaaatcccgcatttaactctctctctaaaatctttgaaaatggtatccaaaaacccgaacccgcccgagggattctacttggatcccagtggtggcatgcctcttcctgggatgcctcccttcgcctccgtctccgccgctaccgccgccgcgaactcgccggaggacgccgccaagaagatccgcaagccctacaccatcaccaagtcgcgggagaactggaccgaacccgaacacgacaagttcctcgaagcaattcaactgtttgatcgcgattggaaaaagattgaagcatttgttggatcaaagagtgttatacagatacgtagccatgcacagaaatactt

SEQ ID NO: 24037 - DNA, 517 bp, Glycine max
tatcgagccgattcggctcgagggaatatgtttgaaaccccaccaaggtttcatatcaaacatcagtagtcgtttaatcatttctcggcagttctccctgctgagtgtgctgttgcagaggtagccagttaacatgggacctggtgggccagggggtcctgggcctggtggacctagttggggtcctgggcctggtggacctggttggggtcctggtggtggaggacctggcgggccaggatggggtcctgggcctggtgggccaggctggggtccaggcctgggtggacctggcttctttgggcctggcggacctggcttctttgggcctgatgggttttttggtggatgtgcaaatggtttatgcagccttgtatcttcatgcttctactgcttgtgctgttgttggtttttccgagattgttttggtggtccaggcatggcaccttctttctgataacaggaacattatcactgttattattattaatttggattagaagagttgaagatttac

SEQ ID NO: 24038 - DNA, 692 bp, Glycine max
atttggtgcatgaggttgtctaacttttttttccaaatgtcctaatggaattcgtatatttaaaactggctattcattaccactttaattttattttattttttgcatcattgctgacatttgaagttaattccagcttctaacatttgtaaaattttccacactttcagttggcaattgcatggaagaagatagtttggagtctcggcatgtgggattctgtccgtgagtttgctagaatgtatgacgctggaatgggtatgatcatttttgcaccaatagcatttttatcgtggtttccattcatttcgactttccaatctcgccttctcttcaatcaagccttcagccgtggtcttgaaatctctatcatccttgctggaaataaagctaacgttgagagttagcgccattcgtcttactctgtatccctgtggggcttgtatatttagatgtatattattttgtagttcagtgttgagttatacatttagtctatgaaaaaaaatgaaagatgcctttttaagggtgtgtttgttttgccttgttcagctgtttattagttttgatacattttgtctttgatcagtatttggcatttttgcgtatgtatattattttgtagttcagtgttgagttatacattttgtttcccccccgtgtatctatatgatagaatattcatcaagtct

SEQ ID NO: 24039 - DNA, 622 bp, Glycine max
gatacagtaattgttaaaaaacaagtgttcctcatagtattaaacttggtttggttgttcccatgactgctggcgcggctccggatgggtgctttcacttcagaaaactccgtctcctctctaaatgagatatagagatggtgaaaaaaggaaacattgtgcagtatcgggaaaggttggacaacacccttgccttacctgatctgacaaatgaacagatactcaaaacgcttgtcaaaagtcaactccaacgttcttcagaagtggaaattgaaggatgtaatgagaaagaagttgaaaccaagactacagagttatgcaaccttcttgatatgttgagaagtgcttctggagacaatggtggaggatctagtagtacatcacacgctgattggaaatttaaacaggataatgaaggacccccctctacaagaaatggtggcctcagtttactcttcccagtttcaaagttttagtatctgatcgtttgcaaagggtccaaattggggaacaaatatcactagttaggatgaaggttccatggccactatctacaagggaggctatagtgcattattatctgtttgagtactttcaagatgacttagtagttattcttttg

SEQ ID NO: 24040 - DNA, 655 bp, Glycine max
gaaatgcgaaattgaatttaaccttaatagatggcttgtttttggagaatgttgagttcagaatcttagaattattataacattaatggttgttttagcacatgactttctgatagaaggctcgttcttttttccttagagatatagagatggtgaaaaaaggaaacattgtgcagtatcgggaaaggttggacaacacccttgccttacctgatctgacaaatgaacagatactcaaaacgcttgtcaaaagtcaactccaacgttcttcagaagtggaaattgaaggtaatagcattcccttatttgctttgagctcttcggcagaaaaaaaaaggtactaggtgacaggtattgttattttaggtagttatgtaattatatttatctttattattattatttctatatttggttttgcaggatgtaatgagaaagaagttgaaaccaagactacagagttatgcaaccttcttgatatgttgagaagtgcttctggagacaatggtggaggatctagtagtacatcacacgctgattggaaactaaaacaggataatgaagagtttcgtgttatgtatcgtgaaggaccacagggaactcccattcatacattgctagttgaaggctatgtagatgggcctctagatctttc

SEQ ID NO: 24041 - DNA, 360 bp, Glycine max
ccaaggttttattttctccctcctcctctgcaaaaaaagaaagaaaagaaaatccaataaccccgtcttcttcttcttcttctttcccttttattcctcattctctgtcggtacttcagagtctcaacttcgatcttctcctcaaaatggctcatactcttttgttttagggtttccacggtttctgggtcaccttcaagttcgtccctttcggtgttttccgcccccattctgcagtgcttgctaggtcttgaacccgctagcgctggagttagtttcaagtgggggcgtggcaaagggaaaaaagggcgtcgtcgcattggtgtttgtcaaaagagaggggtttttatcttcttctta

SEQ ID NO: 24042 - DNA, 303 bp, Glycine max
gggtgtggataggtggcagctacgacacaacacaacacaacacaacacaacacagtcctaagttattgggacactgtattgcatgtaaatcaggaaatcatgacttctactcatgacctctcagataatgaagctgatgaccagcagcagtcggaatcacaaatggagcctttatctgcaaatggaatttcttatgcaggtattgctactcagaatgttcagtatgcaacaccttcacagcttggaactgggcatgctgtggtaccgcccacttacccatatccagatccatactacagaagt

SEQ ID NO: 24043 - DNA, 220 bp, Glycine max
cgtgaccatcaaagtcaaaatagcgttcagtgcttttgatgcttctgctgtccttccagatcttactcaccattcgattcttctgcgtcttcttcactcagacttttgtgggggggtgcctcatatttaggaaataaaggcataaggagcgttctcttcttacccatatgaacctttggtgttgaatttggtgggtgtgtaaattcttgaagggggtgta

SEQ ID NO: 24044 - DNA, 458 bp, Glycine max
ttcaaaccctaaaaccctagaagccgcttaattttttctagacttttctttttcttttcataaacccccaaccccacgcacactctcttagttctctctcgtttgcatttgcattgcttcctacgtttgctttaccttctctctgtctcttccatactcacatcatgtatcgcttggcttctaacctcgcttccaaagcaaggattgctaggagtagcagcctacagattggaagtaggctgagtttgagcagaaactatgcggctaaagacattagatttggtgtggaggctcgggcactgatgcttaagggtgttgaagagctagctgatgctgtcaaagtaaccatgggtcccaaggggcgtaatgttgtgattgagcaaagttttggtgcccctaaagtaaccaaagatggagtaactgttgcaaagagcattgaattcaaggataaagttaag

SEQ ID NO: 24045 - DNA, 337 bp, Glycine max
cttaatttctctctgtctcgtttacacatctctccaacctttcactttcgtttctcagttttattcgaatccctctctcaatctcctttccacatggccagcgttgaggtaattcaaagacacagtttcgttgtttataattttgcctcagctggttttgtacattcctttattactccaacgtgtgtagcagtggtagtactttatatggttcctacgtgcacacggtgaaactcaacactttagtaactaactgtatatatacaactgtttcttcactttcttactttctgtgttgtgattcattatcgatcatagaaccgagttggttttttat

SEQ ID NO: 24046 - DNA, 382 bp, Glycine max
gtttatcatttatgagccacaaacttgacaccgagttaaaaacgtagcagcaatagcacacaatacatcgtattcgtgtgagcatacgatgttgcctccttttgctgtcgatatcaacggtataaaagataagctctcctatcagttccgcccttggcaacgctccttccaattctgggttcgagccattgacatttacaccggttacaaggtgtttcaagtgagagtgaatttcgtcaaagatgcgcagaagcaggaagcaatgtgggagaggcagcacgagcttgccgccgataagattttctccatgtgctatgaccttggaggtttcttcctcaagattgctcagattattgggaagcccgatttggccccggctgcg

SEQ ID NO: 24047 - DNA, 790 bp, Glycine max
ctagttgtcaagttgaggagttcggattcgcaagtggcggcgtctcgtctgtgtctgattgactctaacctctctctttccccttctttggtttttacttcctcgaattctccttcaaattccaaccaaatcgcaaaaccaaaaccaaaaacccaaaccgaaccctttccctctcttaaatttcgccttctccatgtctctaagactgtcgaattcgtcggagaatctgatgctcccggtgtccgatcctcccaagacccaagacgccgacaacaagctcttcaaaggttccgccatgaccaaacgcggacccttcgccgccgtctcctacatgtcctgcgccgttctgttggtgatgttcaataaagcagcgctttcgtcttataactttccgtccgctaatgtcatcacacttcttcagatggtatgttcgtgttgctttctctatttattgagatgctggaggatgatttctttctcaacaggcgaacccttacatatatctgagaactcatccaaatttgtatcattgaagactttgaagcacactcttcctctgtcaggagcttatttattttacatgctagtcaccatggagtctgttcgtggagtaaatgttccaatgtacacaactcttaggaggaccacagtggtatttacaatgcttgtagagtttgttctggtggggcaaagatatacaccttctgttattttcagtgttggcttgattgtctttggtgcgtttgttgctggagcacgggatttatcttttgatggttatggctatgct

SEQ ID NO: 24048 - DNA, 542 bp, Glycine max
ctcgagccgcgggaatatccgctattctagttgctgcttctgtctgtaacacaatacaatcatcattcatcaaatcactgaaaccaaagccacaagctgcgacatcagaagaatggaagacggtgttgaccacttggctttcgagaggaacaaggcgcagttcgatgttgaggacatgaaaatcatttgggccggttctcgtcaagactttgagctttcggatcgaatttctcgccttgttgccagcgatccggccttcagaaaggatgacagaaccacgcttggtaggaaggagttgtttaaaaacaccttgagaaaagcagcttatgcatggaaaaggatcaacgagctccgtcttaatgaacaggaagcttataagctcagatcctttgtggatcaacctgcttttacggatcttcattggggaatgtttgtgcctgctatccaaggacaaggcactgacgaacagcagcagaagtggttgcctctagcttataggatgcaaataatcggttgctatgcccaaactgaacttggtcatg

SEQ ID NO: 24049 - DNA, 624 bp, Glycine max
gtaaaagatgccttgtttgaaacttcattgaaaaacaaattaaaggaatggcttttggaacgaattatcttaggcagcaagagtactgaatatgatgcgcaagggcaagctgcaattcatttgtgtgcaatgctgggatataattgggcaatttccttatttacatggtcgggcttgtcgctggatttccgtgacaaatttggatggactgctcttcattgggcagcatattatggaatagagaaaatggttgcaactttgctatcttgtggggcaaggccaaacttggtcacagatccaactcctcaatatccaggtggatgtactgctgctgatcttgcttatgtgaagggatgtgatggcttagctgctttcctttctgagaagtctctggttgagcagttcaatgacatgagcttggctggaaatatcagtggctcactggaaactagctcaactgatccagtaaatgctgcgaaccttaccgaggaccaactgtaccttaaggagactttggcagcttaccgtacagctgccgaggcagcagcacgtattcaagctgcatttagggagcattcatttaaattacgatatcaagcagttgaaattatgagcccagaggaa

SEQ ID NO: 24050 - DNA, 311 bp, Glycine max
acttatgaacctgaggatcccttatttcacccttcaaccaagatcaccacattcctcacttccaaatccaatgcaactttcaagtctgataacagtgttgtgagaactggggaggatttcatggctgctaatgaaactgcgtttggctccattatcaactcaactgatgttgacaacttggctagtgcggaaattattgatgccggcgatgcagctgcggctactcagtgtgatgtgagtggccctattgattgtaaggaccctgaggtatttcatttgatgatgagggcaacaattgacaagtttcagga

SEQ ID NO: 24051 - DNA, 1205 bp, Glycine max
gctttgcttcgttcctattccacctcacgttccttatctttcttcttcttcttcttctcaaccgtcgtcgattctcagtttccgattgcagaatttgatttcagaatccaaaaaaatgaacacgttaatctcaccgccttctacaaaccgttacctttgtggggtcccttactctttcctctctccgcttcgacacaacaacaacaccaaccttaaccttccgaggttccattccacagttgctaccaacttcttgtcacactctccggttcgggccacgctctccgcacgtgccacttccgatgaagtagacacgcaaacggtggttgaggaactttcagaggagaataaagtggaagagaacaccaacgaggacaacacaaacacgtccactttttctgctccaattgacaaagaacttaaaaaggttgctcagaagactgctgctacctttgcaccaagggcttccacggctacaaaaaaccctgcagtgcctggaactgttttgtacagtgtttttgaggttcaagggtatgtttcaatgttgttgggaggagctttgtcttttaatctcatattcccttctgatgaacctgacatttggagattaatgggaatgtggtccatttggatgttcacaattccttcattacgagctcgagattgctcaaagaatgagaaagaagctctcaactatctttttctcctcgtcccattgatcaatgttataatcccattcttttggaagtcctttgctgttgtttggtccgcagatgtagtagccttcttgggaatgtacgcatggaagtttggatggcttcagagaacggattaaggaacccaaatttggttagtaaaagttatcaatgcttgttggctttgtctttctcatggatctcaattttgtataacacgcagcaatgagatgtgacattccttgtagcacttcatggcccccaactcatggatgagtgatttctgtgttaaaagtttgagtagcctttgcatctactaggggagcaagataccatgttgcattcgttaaacatcaaatgaagagaatgttataggttctttaaaaagtttagcatgttgtattattgccgtgtctcacgttgcaggaaatttgaaattcccgaatgtaatcaagaacctccaaaagatgaaatgtgaagtcatgatacatatatttttgtaccactgag

SEQ ID NO: 24052 - DNA, 388 bp, Glycine max
aatgtacgcatggaagtttggatggcttcagagaacggattaaggaacccaaacttggttgttaacagttatcaaggcttgttggctcgtctttagcatggatcccaattttatggcacccaccaatgagatgtgccattccttgtagcacttcatggtccccaactcctggatgagtgatttctcatggagtagcctttgcatctacaagggcagtaagataccgacgttgcatccttcctattatcaaatgaagagaatgctataggtcgttttcaaaagttttgcatattgtattatcgccgtgtctcccattgcagaaaatttgaaatttcagaatgtaatcaagaatctcccaaagatgaaatccaccgtagtcatgatatgt

SEQ ID NO: 24053 - DNA, 262 bp, Glycine max
tgcgcattcaacctaccttcgctattgcatggtcaaatcttgctggtctgttcatggagtctggtgatttcaacagagcccttcagtattacaaggaagcagtaaaactaaaaccttccttccctgatgcatatctgaaccttgggaatgtatacaaggctttagggatgcctcaagaagctattgcatgttatcaacatgctcttcagacacggctaaactatggcatggcttatggtaatttggccagtatatattatga

SEQ ID NO: 24054 - DNA, 380 bp, Glycine max
acaaacatagttcctgctttgggtggcataaacatcaaagagcttttagatgatgctactgaggaagttggggggaaactcttgttagattttcaagacaggatgggtgacagaattcaagtatttctggagtgattccagacataacttttctcaagtctaacggtgataactggaagctaagggttaaacctgatctaggcacaacagctcggttgttggaagtgaggaagccggacgtggtacaagcagcatggtcatcgggaaccagtaatttaagatatcacatggatttattatccaaatactggaacaagaaaaaagttattacaactatagtcaggaatgggaaatttcttgaaaataatttttccctttat

SEQ ID NO: 24055 - DNA, 618 bp, Glycine max
gctggaggaattggtgttagtgttcacaacattcgtgccacaggaagttacatccgtggcacaaatgggacatcaaatggtattgttccaatgctgcgtgtgttcaacgatactgctcgctatgttgatcaagggggaggcaagaggaaaggtgcatttgctgtgtacctggagccatggcatgctgatatatttgaattcttggatttaaggaaaaaccatggaaaggaagagcatcgagctcgagatttgttttatgctctttgggtgtctgatctctttatggaaagagttcagagcaatgggcaatggtctttgttttgccccaatgaagcgccaggtttggctgattgctggggtgaagaatttgagaacttgtacactcaatatgaaagagaaggaaaagcaaagaaggttgttcaggcacagaatctctctggtttgaaattttgaagtcccagatagaaactggaactccttacatgctttttaaggacacttgcaataggaaaagcaacaacagaatttgggcacaatcaagtcatgaaacttgtgcactgagataattgagtatacaagtccaacagaaacggctgtgtgcaacttgatcaattgctc

SEQ ID NO: 24056 - DNA, 468 bp, Glycine max
aaaaatctctatcttctcctcatccaaatggccgactccacccctctcctctcccaacccaacccatcatcatcatcgtctcccgacacacaagaagcaccgccatcgaaccaacaccatccctctctggggtccacagtagaactctgcataggcgagttcaactggtcccagttcctccagtcgattctggtctccctcgcatggatattcgacgcccagcagaccttcatctccgtcttcaccgacgccctgcccgagtggcactgcaccgagcggggcgccaatgcatgcaagactgccaccacagtctgcagcctcccaaagggctcgtgggcctgggacgtgcccacgcaggcctccatcgtgtcggagtggggcctggaatgcgccaactccgcgatcacgggcctccccgcttcgatgttcttcttaggggtgttgattggcggggtcgtactggcctcg

SEQ ID NO: 24057 - DNA, 343 bp, Glycine max
ggaaaagattagtgaaaggatgaaaattcttcaggatttggtccctggttgtaataaggttattgggaaagcattggtccttgatgagataataaattatattcaatctcttcagcgccaagttgagtttttgtcaatgaagcttgaagcagtgaattcaagacttaactctggtattgaagcgtttcctcctaaagattttggtcagcaagcatttgatcctgctggcataccattcggttcgcaagctccaagagagtatagcagaggttcttcaccagactggttacatatgcagataggaggtagttttgaaagaacaacgtagtctacgagatccctt

SEQ ID NO: 24058 - DNA, 384 bp, Glycine max
gcacccttgtctgatggaaggattgatcaatggggcaggttgcagtgtgtgtaccatggttggtgtttcaatggcaaaggagaatgcaagctcattccccaggcaccccctgatggccctccggtacatacgtccaaggaagcatgtgtagctgcttacccaagtactgtacagaatgatatcttgtggttctggcccaatactgatcctcaatacaaagatattattacaagaaaaagacccccatacataccagaattagatgatccatcgtatactaaattaatgggagacagagacatcccttatgggtatgaagtactgatagcaaatctcatggacgctgcacatgttctatatgcacactatggactaatgcgtact

SEQ ID NO: 24059 - DNA, 535 bp, Glycine max
caaccatggctatgtctactattttgcttttgactttcttttctttcatttatggcagtgcagctactcatcacgtttatagaaatcttcagagtttatcttctgattcctccaaccaaccttacagaactgcttatcacttccaacctcccaagaattggataaatgatcccaatggaccattgagatatgcaggactttaccacctattctatcaatacaatcctaaaggtgcagtttggggaaatattgtgtgggcacattcagtgtcaaaggatcttgtgaattggactccactagatcctgccatttttccatctcaaccgtccgatataaatggctgttggtcaggatcaaccacactacttcctgggaacaaaccagttattctatacactggaattgacctattgaatcagcaagttcaaaacttggcccaacccaaaaatttgtctgacccatttcttagggaaagggtcaagtcccccaaaaatcctctaatggcaccaactagtgctaacaagatcaattcaag

SEQ ID NO: 24060 - DNA, 437 bp, Glycine max
aaataacacaacacaaaacgatcttttatttctctgtctagagaagaatctagcaagccttgctcgtcacaaaatcaaaggttgcaactgagaactcactccttcgaatcaaaatcaaaaaatgtcggtgactctgcacacaaacctaggcgacatcaagtgtgaaatcttctgcgacgaggtccctaaaacctccgagaattttttagcgctatgtgcaagtggttactatgatgggactatatttcaccgcaacattaagggttttatgattcaaggtggagatccaactggaactggcaaagggggaaccagtatatggggcaagaaatttaacgatgagataagagaatctctgaagcacaatgcaagaggaatattagcaatggccaatagtggtccaaatactaatggaagccaatttttcttgacttatg

SEQ ID NO: 24061 - DNA, 449 bp, Glycine max
  unsure (1)..(449): unsure at all n locations
cctttgatgaatagaaacttgaatatactgacttgcatcaaaccaaggtactctaaattgctcaattctcgtttctatcagaggggtttggtggagatgatgtgcagtttctttgttgcatcatggactggggttgtcaagtaccatgggccaagacctagtatccaaccaaaacaggtttttgtggccaatcatacttccatgattgatttcattatcttagaacagatgactgcatttgctgttattatgcagaagcatcctggatgggttggattattgcagagcaccattctggagagtgtagggtgtatctggttcaaccgtacagaggcaaaggatcgagaagttgtggcaaggaaattgagggatcatgtcctgggagctaacaacaaccctcttcttatatttcctgaaggaacttgtgtanataatcactactctgtcat

SEQ ID NO: 24062 - DNA, 467 bp, Glycine max
  unsure (1)..(467): unsure at all n locations
ttcggctcgaggaaagggggaatctaatctaggctcaaacaacacggccccagaacaaacatggtttcttccaacactgccgagctgctgagagaggagattcctgtgaagcaacaacctctgactttgtctgcagacatcataaccggcctcgtactcgtcgatgttgtcaatggcttctgcaccgttggagctggcaatttggcgccgaaagaaccagatgaacgaatttctcagatggtaaaagaatctctgaggctgtccaaagcattctctgagagaaagtggccaatttttgctttccttgattgccatcaccccgacaaacccgaacccccttatccaccacactgtattataggatcaggcgaagaaaaattggttcctgatctgctgtggttggaaaatgacccaaatgcaacactcaggcaaaaagaatgcattgatggattccttgngtcaactga

SEQ ID NO: 24063 - DNA, 475 bp, Glycine max
cagctccagttacggcttcattatcatctagaggacgcaataagattcaaccatcaatactcaagcccgatgtgactgcgctgggtgtgaacatacttgctgcctattcagaattggcaagtgcatcgaacttgctagtagacactcgtcgagggtttaaattcaatgtattacaaggacttctatgtcttgtcctcatgtcgttggtattgctggacttatcaaaacacttcatcctaattggagtcctgcagctattaaatcagcaatcatgaccacagcaaccacacgtgacaacacaaataggccaataaaggatgcgtttgataataaagtggcagatgcctttgcatatggttcaggacatgtgcaaccggaccttgccatagatccgggacttgtttatgatctaagcctcgctgattacttgaactttttgtgcgcttccggatacgaccaacaactcatctccgca

SEQ ID NO: 24064 - DNA, 202 bp, Glycine max
gattaatgctcggacaaatttatatctagtaaggtacttattaaattgattaattttcgcctctattttcttttcttctgtgaagtttatgccctaccggaatttgaaataaatcttatggtctgtatatatatttcttagtttatttgaagtaaaatttgatatgaaaaaaaaaaaaaaaagggcgaccgccgattagtaa

SEQ ID NO: 24065 - DNA, 637 bp, Glycine max
cttggtgccacaccgaattttcccaattctaattacagtcgtggaagggaaactgaaagcagagtgttgttcttctcgaaatcacacacggttcagatctagagaaagatccatattctcgatggagaaaatggagcagttcattgataacttgccgccgatggatctgatgcgatcggagaagatgaccttcgttcagctcatcatccccatcgagtccacgcaccacgccatctcctatttaggcgaactcagccttctccaattccgcgatgtggagaggattgcaagctaaggttatggagtatcaagtctggtgaactgctttttgaggacaagttctctgattcagttatcttcattgtgtgctataaaacatatggacatagttttaaagcagaagaggaaaaccaatacaagcgtgactcatctcagggtgcatggcttggatcacttgaaggactattttatatgtgctggttatgagtgtgaagggtcctgcagctatagaatctgaagctaactagatgcccacaatacctgataaatactaagtttatagcatattactcacatgaagcagcttaagtcctgagattctagaaggtttactaagatcaggtttgcaatgatacgg

SEQ ID NO: 24066 - DNA, 590 bp, Glycine max
tcatgcgtccgactacattctccagataatcgaggatgataaggggtccgattgctttgtgtttcgtaaatggggtcgagttggaaatgacaagattggaggaacaaagctggaggaaatgtcaaaatctgatgcaatatgtgaattcaaacgattattctatgagaagactggaaacccttgggaggcgtgggaacaaaagactatccagaagcaacctggaagattttttccattggatattgactatggagttaacaaacaggtcccaaaaaataaaaaaaatgatgctgacagcaaattacctcctccattaatagaattgatgaagatgctcttcaatgtggaaacatacagagctgccatgatggaatttgagatcaatatgtctgaaatgccacttgggaaactgagcaaaagcaacatccaaaaggggtttgaagcattgacagagatacaaaatctgttaaaaattagcaatcccgatccatccgtcaaggagagcttactcattaatgccagcaatcggttcttcaccatgatcccttctgttcatccacatattattagggatgaggatgactttaagt

SEQ ID NO: 24067 - DNA, 341 bp, Glycine max
aacccttaggacaatagaccctgcaggtgtttttcttgaggcagttggtgaacccataagggattatctaagaggaaggagagataccataaagtgcatagtaaccatgatgacagatgggactggtgcacattcaagttcatctggaaatcctggagatagccttctcgaagagttgaacagagatgaagagattcaagagaatgctggtgttgatgatgattttaacactgatgataggcaagcatggatcaatgccatgcgatggcaacctgaccctgtggaagcagatccattactaggaagcagagacccaaggaaggtgacatacttgggatgat

SEQ ID NO: 24068 - DNA, 426 bp, Glycine max
  unsure (1)..(426): unsure at all n locations
actccgcaatgctgatttccattctctcttagtgtcagtcttattcctcccgaacccgaaattcagtccttaaatgataaataatatcccagttgtttctgctaaacttgggggagtaggaaaacatggccactttcgagaattttggagcagaaaaacgttactaggtcttgctttgggacagtttctttctctcctcatcacttccactggtttcacctcttctctattggctanaaaaggaattaatgcaccaacttctcagtcgtttctaaactatgtgttcttggcaattgtctatgggattattgttctatacagaagggaagcactcaaggcaaaatggtattattacatacttcttggattggttgatgttgaagcaaattttcttgttgtgaaggcatatcaatatacatcactaac

SEQ ID NO: 24069 - DNA, 490 bp, Glycine max
ctctctttctctctctctctctcacacacacacacacacattcggatccttttaacaccgccccattattgcttgctcgttaattacggcaatgactcggctatttcgatccaaatcttgcggactggtggagttcaacgctgctccgccgagtccacttttccatgatgtgaaaagtgaggacgaagacaatgaagaagatgaagatgaagatgaagaagaggaagaagaagaagaattggacagtgatgatgatgtttcgagcaacccggtttcaacggcgttgatgaatccagggtcaaaagtggagaacaaaggttggcgtggtgggcatggttgccaatctaaccagtttgcgatgttggatattttgttggctgcgttgaagaagtcgctggtgacttgcagtgtggagagagaggatatttcttcgttggatattagctggcccacagaggtgcgccatgtctcgcatgtaacctttgatagg

SEQ ID NO: 24070 - DNA, 377 bp, Glycine max
ctctttctttctctctctctcacagtctcacatacacattcgaatccttttaacaccgccccattattgcttgctcgttaattacggcaatgactcggctatttcgatccaagtcttgcggactggtcgagttcaacgctgctccacccagtccacttttccatgatgtgaaaagcgaggatgaatacaatgaagaagaggaagaagaagaagaagaagaagaagaagaagaagaagaattggacagtgatgatgatgatgaggatgcagacgaagatgatgatgtttcgagcaaccatgtttcaacgccgttcatgaatccagggtcaaaagggcatggctgccaatcgaaccagtttgcgatattggatattttg

SEQ ID NO: 24071 - DNA, 452 bp, Glycine max
cggactcgtgggtacgaggtcatatagtattattgggggcattattgataactcaaggtgcatatatgaaattataaaaaaacaacaacacaggagacacagagaacaaggattgattcgtatcagagagagagagaagatgggaactgttactcgcagctcctctgaagtgtatacaagcgacagtgaaaaggggtttgcgatgaaccactctacttctacttccccagagctagatgctggggcaaagtttgttcttgtatctcgaggatcatggttgcactgtgggtaccatttgactacatctattgtggctcctgtgcttcttactcttcctttctccttcactttgttggggtggggtggaggagtgctttggttgacccttgcagcagtgtatcgacattctattcatacacccttgtatctgtggtcttggaatatcatgcaca

SEQ ID NO: 24072 - DNA, 362 bp, Glycine max
gcaaattagaaatcaagtggtaccgacctaaacctattatgctatatgtatctttgggttatactccatttagtaccgaattaaatgcacagatggtccacgtacacaagaatttgcaaattgaagggctcactgctattgttcttaagcaccattatttgatgccattcagacgagacccattgttactctctaagaacaagcaagcctcagagtctgatcagtcagaatcactgcccttgaatcagaaaaatgtgctcattgttagtgcaaagaacagcactgagttgccattgaggataaaatccatttccatagagtagaggatgatgatgaaagggtgtgctccattcaacatggaa

SEQ ID NO: 24073 - DNA, 325 bp, Glycine max
gaatctttcagattccagaaggtcttgcaaggtcaagaaatatttccaagccaaccatatggaagggccctgtctgttgacgaggcttgtggaaatggtcgctgtggactctttgatggtttccaggcgatgagatccagaaatggatggtcttcccacgtgagcaacaattcctcacatttgcatcctcctgttccatctgggcaagtttcatctccgtcatctgtgttcatgttccagcaagctgtcaatctagtttcaaactccgattataacaacaaaattagtcaggtgatgggcagtaagttccacaacgagttcatat

SEQ ID NO: 24074 - DNA, 501 bp, Glycine max
caaacaccaaccttttcttctcgttttattatcataattattgttcttgttgtttttgaatcattcccatttcccagtctttctttatggaagaacgttcccgacacggcggcgaaccggtccgagccggggctcagggcggagatcgacacttcggcggccgttcgaatcggtgagggaagccgtcacgcgattcggcggcgttgggtattggaaacccattctcaacggtcttagtaacaagcattttgcggccactgagccgcatcacacagaagagcttgaccctgaaaaactggaggagcaagctactgtattggagaaagacctgatcctgaaagaaagggaaacacttgatgtcttaaaagagttggaaagtaccaaaaggcttgtggagaatttgaaatcaaaggtacaaaaagaagaatctgaagcatatttgaattttcagacgagtgtgtgcgaaaatatatcgtctgttaaggaggatgagagagaaga

SEQ ID NO: 24075 - DNA, 461 bp, Glycine max
cgacaaactccaaacaccaaccttttcttgtcgttttattaccataataataataattattgttgttgtttctgagccattcccagtgtgttctttatggaagaacgttcccgacacggcggcgaaccggtccgagccggggctcagggcggagatcgacacatcggcgccgttcgaatcggtgagggaagccgtcacgcgattcggtggagttgggtattggaaacccattctcaacggtcttagtaacaagcattttgctgccactgaggtaacccattttgttttttctctttaaagcattgtgattcctatagtgacggcattgctcgattgaaaaggttggagctttctggtttttgaaagttttaaaaataaaaattgggtgtttgtgtagtttttacttctggaaagtgtgcggtgttgtgagaggaaatcgggttttatttatttatttttat

SEQ ID NO: 24076 - DNA, 480 bp, Glycine max
  unsure (1)..(480): unsure at all n locations
ctatctctctgtcttctcgtttctgtctgcatcggatctcactctctcaagtttcaacacgccaccctcttcttcttattcagattgtcataactgaggaagcttgtttgcatatataatagagaaaatggtattgttgttagtttattacaggtttgagtggttggttagtacttcgtagaagttagctggtaacaacaaataagtaaatcttgactctatggaagactacaatttttctgttggtcaagagtcccctgatgtgaaagcattccggaatgctattaaagaagctgccattgcacagcattttgagcttcgtactattaaaagtgacctgattcgctactttgctaagtgtgcctcagatgggtgtccatggcggattcgtgcagtcaagctccctaatgccccaacatttactattagaagtattgatgggactcatacttgtgggagaaatgcanacaatgggcacca

SEQ ID NO: 24077 - DNA, 302 bp, Glycine max
catcttctcattcaggtttcctttgattccactcctcctctaaatagctcacaactccatgctttcatgtctccgcttgaatttaatccctttgttatgaagaattgggttcaagacaaaattgctccccccttaatgattgtcataacgaggaagcttgtttgcatatataatagagaaaatggtattgttgttagtttattacaggtttgagtggttggttagtacttcgtagaagttagctggtaacaacaaataagtaaatcttgactctatggaagactacaatttttctgttggtc

SEQ ID NO: 24078 - DNA, 398 bp, Glycine max
gggtgcatatccaaaatcacaactttatttttttatctgttttccttcaagccagaagtagctatgccgcagccttgtgacttgccaatcaacattgatggtcagcagatattccttttgaaagagaaggtcatatcaaaatactgtggagggttgaagaaactattgaatcaccaaaagagaagatgtcatgtgaaggagttggggattagaatcaatgatttccctggaggaccagaagggtttgagctagtttcaaggttttgttacagcaatgccaaaatccagatcactgtggctaatgtgtctctccttcactgttgtgctgtttatcttggaatgactgaggaatcattcagcaacaatctcttgcaacaaacagaaacttttcttgagag

SEQ ID NO: 24079 - DNA, 1365 bp, Glycine max
tttgtcccttcttctcaagatctcattgcatttccctccctttacaggggagatagaatttagatagtgcaagagaagcgtaatctccaagttctcatcttttttgttcccttttgttttcagagacatacataggccccagaagaacaaattgctacaacctattttgatttgagatctgtctgtctctttggtttcacttcagggctcaaagtgaggaatgcgaagaaaatggggaggaaaggaaatagttggttttctactgtgaagaaagctctaagccctgagccaaaggagaagaacgatcagaattcaagtagatcaaagaagaaatggtttcagaagcaaaaattgcagacttcagaatcaacctcacaatctgataatgcaccacctcttcctctacctgagattattttaactcatgtcgagagtgaaatcaaccatgatcgggttgaagttgcaactgcagtggatgctgtggaacctgttcctgctgttcagacagcagctgctgaggttcaagccacaacaattgttcagtttgacaataaaccaacagaagaaatggcagcaatcaggattcaaaaagcttttcgtggatacttggcaagaagagcattgcgcgcgttacagggggctggtcaggttgagatcgctgatggaagggccagtggtgaaacgtcaagccattagtaccctccgttctatgcagacttttgctcatttgcaaactcagattcgttctaggaggctcaggatgttagaggagaatcaagcactacaaaaacagctcttacagaagcacgcaaaagagctagagagcatgcggcttggggaggaatgggatgacagcgtacaatcaaaagaacaagttgaagccaagttactgagcaagtatgaagcttctatgagaagagaaagagcaatggcttattcattctctcatcagcataactggaagaatgcatcaagatctataaacccaatgttcatggatccaaccaatccagcctggggttggagttggttggaacgatggacggcagcccggccctgggagagccatagccagatggagaaagagaagaatggcaataaatctctaagaagttctagccgtggcattaccagtgctgaaatcagcaaagcatttgctaagtttcagctcaattctgagaagcattctccaacagccagccaaaatccaggctcacctaacttcgagtcgcattcccaatcccattcaaatcctcccaagccaccttctccagcagttgctaagaaactgaagaaagcaagtcctaaggacatcttggctatagatgatgacaccaaaagcatgataagcgtgcagtcagagcg

SEQ ID NO: 24080 - DNA, 549 bp, Glycine max
cttatcatcactttcatatcacactttcttcccttcctcttcatcgaaacgatatcgtttggattcatcatgaaggcctcaatctccagcaatggcgattttctcaagatcgcgttcttcttcctcttcgtggccttcacgttcttcttcgtcggcaagcacttctccgacagctcctcccagcagctaatcttcttctccgccaccaccgccgccgtctccactaccaccaccgccgaggtcaccatatcccccaacttcaaccaattctttaacgtcgccgcgctaatcgaagcccagacccccaaaaccaacccctcccaacaacctcctccctctccccctccgccggagcttctcgacacgatcaagcgcttcggcatcctcaacgacaacggcaccatgtccgacgacttcgagatcgggcatttcgaggaggggttgccggaggattggggaaacgacaccgtcgtcgaggattccgtctccgctcccagaatcgctgtgagcaagttcgggatgtgtccgcgcggcatgagcgagcatata

SEQ ID NO: 24081 - DNA, 426 bp, Glycine max
gttactttctttaaagttgttgctacttgctagtatccaatattagcttactactagggtgtttgaaagagatggggaagacaggcaaatggcttagaaacttgttgacaggtaagaaagacaaggaaaaagagaagggaaaatctacaaccaagcctgaattgttcttcaaatggaacagaaaactcaaccactccaacttgcacaaccccaaaggagaaaaagagatggagttttagaagatcatcagcctcagccactgccactactgccacaaccacaccaccaacaacttccaaggaattgaattttgtagaaacaaatgtgactgtttcacagacggtgcaaactgacactgatattcagaatgagcagaggaagcatgccatggctgtggctgctgccactgcagtagcagctgatgct

SEQ ID NO: 24082 - DNA, 262 bp, Glycine max
agacatgttcaagaagctcggaacttcttcaatactttccgcgaagaccatgaaatgatgcacttgcgtgaccttcagaagttggaaggagttctctctcctaatcatctcaaggaaatggaatttgctcactcgcttagaaagagcaaattcaacatagagatatgtgagtattcctatgagcttttgttgcaacatctacacagtacgcaatccaccactatacttggtattatcaatgagcatattaactttcaagtaa

SEQ ID NO: 24083 - DNA, 636 bp, Glycine max
ataaaagtatgttagcctatgctcgcaggcgtttggttcacagacccattttccatcggattcgcttaattgacacgtggactccacaaaattccaacaacagcgccaaacatcatgcatctccatcgcatagcatacaaaaatacaatcacactcctgagtcttgaattgaacctctttgcccccacaagatctgcttctgggctttttaggatacaaaatgggtgagaaagactcagagaagctcatttgggaacagatgagaaccccgacagctgccactcccattgctgcaccccaacagcaccgcacattaccaaggcttcttgtccttctcatcctcttcgtctccgtcacctacgtcgtctacacgctcaagctcgtctccacctcacgcgcctgcaacaacgacgcccctttctccaccgacaacttctccaaaaccatcctctccgtcaatgccaccgccgcagttctccgccgaggctccctcgagacgaatcccgaggaccggacggacctccgtcacgtggtgttcggaatcgcggcgtcggcgaagctttgggagcagaggaggagctacatcaagctctggtacagggcgagggacatgcgcggcgttgtgtggctcgacga

SEQ ID NO: 24084 - DNA, 315 bp, Glycine max
ctgccgtcatccattttcctgctttatgttatgacagcaaactgaactaaagcagaagaagcgccatccatgtctcggcttcataagtcaacaacaggtcagcagcaacagtttcattccctacaccaaatcctctccccatacatgtcaagtgttgttgtatccgtgttatcatggcatgccattgctgtgctttcgctttcaaatttcgcctctgctgagggcattgaagccacaaatggagacacaagacacagaggtgacgtgatctatgcccacaatggcgctgttgccactgatgacggtagatgctca

SEQ ID NO: 24085 - DNA, 303 bp, Glycine max
cttcactctcattttcccaatttcgcgataccaaaacctcagcaatcaacaatgtcgtttttctcaaggggccgtcgcgacgacgacacggtggacgactacgacgagtacgaccccaccccttacggcggcggctacgacatcgccctcacctacggccgccccatcccaccctccgatgagacctgctaccctctaggagcctcttcttctgatgacaacttcgattatgatcgccctcaatacacctctaacgctgaaccctctgtttatggtgatgaagccctagctactgagtatagc

SEQ ID NO: 24086 - DNA, 927 bp, Glycine max
agacgacagaagggggacaacaagaagctcactctctctatctcttctctctgtgtgtgtgttatgtgtgaatacacatgaaaatgcagaagttcaaattgcttctagtgctattcttcgctacttgccactcctctttgtccatcacagatggtttgttgccaaatggagacttcgaggttggtccaaaaccatcagagttgaaaggttcaatagtgactacccccaatggcattccacattggacaatctcaggaatggttgaatacataaaatcagggcagaagcaaggtgacatggtgctggttgtgcctcatggtacctatgctgttaggcttggcaacgaagcttccattaagcagaagatccaagttgtgaagggcatgttctactcattaacattcagtgcctcacgcacttgtgctcaagaggagaagctcaacgtgtcagtggtgccatccaatgagaagagtgattggggagtgtttcccattcaaactatgtatggaagcaatggttgtgactcttatgcatgtgggttccgagcagattaccctcgagtggaaattgtgatccataaccctggcgtggatgaggatcctgcttgtggtcctcttattgattctgttgccttgaaactcttgcactcacccaaacgaactagagacaatttgttgaagaatggaaactttgaagagggtccatatgtgtttcccaaagaatcttggggggttctaattccacctcacatagaggatgcctacagtcctttgccaggatggatggttgagtctctcaaggctgtgaagtatattgattctgatcactttgctgtgcctgaaggaaaaagagctattgagcttgtagcagggaaagagagtgcaattgcacaagtggtcatcacaataattggtaaggtttatgccc

SEQ ID NO: 24087 - DNA, 1219 bp, Glycine max
tcgcttacgcgtggggtgggatgcttattagtcataaattgacactacttaattgttatttatatgtaatatttaatggtggatgaacaggggatgtttctaccattgattgtgccaccaacaatttatcaagcaggtctttggtcaacttggttgaccgtgctttgttctttgaagatgtttcaagctttggctagagatcgtttggaacggctgaatgcatctccgtctgctacaccctggacatatcttcgagtatattcagcattgttatttgttttcatggttgatgttctctggataaggttttgtctgacaatatatcaagcacatgggtcctctatgtatctgttattattctttgagcctttcagtatttgttttgagaccctacaggctattttggtacatggatttcagttgcttgacatatggttgcatcattcagcttgcaatagcagtgatttccgaacacctagacctgcttgacatgttaactgcaggttcattgttggaattgaagggaattctcattcggaacttggggtttttcttagacatggcaacattttttatggcacttggccattacttgtatatatggtggcttcatggcatggctttccatctagtagatgcattcatatttctaaatatacgtgcattgcttagtgcaatagtagatcgcataaaaggctttatcaggctaaggatagctctaggaacacttcatgcagctcttcctgatgcaacaactgaggagctaagagcatatgatgatgaatgtgctatttgtagagaaccaatggccaaggctaaaaggctaaactgcaatcatctcttccatcttgcatgtttgagatcttggttggatcaaggcctggctgagatgtatacttgtccaacatgccgaaagccactttttgcgggtgtgcctggaaatgaaacaaactctgatgcggggacgatatctagtgatgagcaacttgcacggcaaataagtgctggattggatcggccaaactctgctaggcataccatgcctacaggattctatccaaatcagacactaaacactcctgaaggtgttccttggaggggtgcagggctggactcaggttggttgcattcttggccaaatcaaggtgttgatggggccggtccatctactgctatcagaacagttggattaggaagagttcaaatgatgatgcggcat

SEQ ID NO: 24088 - DNA, 264 bp, Glycine max
gaaagctgcttctatcttgagtagcaatgattctccggttattttggctaaagttgatgccaatgaggaaaagaatagagaacttgcaagacaatttcaggttcagggatttccaacgattaagattctaagaaacgggggcaaggttgttcaagattacaaaggtccccgtgaagcagatgatattgtggactatttgaagaagcaaagtggtcccgcaacagctgaaattaaatctgcagatgatgctagtgctttgattgg

SEQ ID NO: 24089 - DNA, 950 bp, Glycine max
atacgtttgagtctggaaggccatttcgccctgttatgtttgaaggtgtcctaaaaaattttactccggatgtgccaaatagcatttcaggaagaccaagacaggaagatgctcaggaatttctgagctttgtaatggatcaaatgcatgatgaattactgaagcttgaaggacagtcttcaagtcttaatggtagcaaatcttctctggtttcttcggtggaagatgatgaatgggaaacagtggggccgaagaataaatctgctgttacaaggactcaaagctttctcccatcagaattaagtggtatttttggaggacaacttagaagtttggtgagagctaaaggaaatagagcttctgctactgttcaaccatatctcttgctccatcttgacatctatcctgatgctgttcacacaattgaggatgcacttcacttgttttctgcaccagagactcttgaagggtaccgaacatcactcactgcaaaggccggtgttgtgactgcaaggaaatctgttcgaatagtgacactcccgaaaataatgatattgcaccttatgcgttttggctacggaagccagggtagcaccaagttgcataagcctgtgcacttccctcttgagttggtattgggtcgtgacttgcttgtttcaccatctactgagggtcgaaagtatgaacttgttgctacaattactcaccatggaatggagccttcaaaggggcactacacagctgatgcccaatatcccaatggtcggtggctacgatttgatgaccaatctgtctttgctattggaacaaataaggtgctgcatgatcaggcatatgtgcttttctacagacagatgtgaacatataaatattgttctatcaaatatctactccctacagaaaaaacactactcccctataagaaaggattgctggtcgattaatgtcat

SEQ ID NO: 24090 - DNA, 363 bp, Glycine max
ctgatctctctgagtattcttgttatcctagacatgttggaggcttcctatgcctttagttttacagcagctaggggctgaagtcacattttctaacatgtatttgatgcagatattgagcttatgggtactctgtctagtatggctaatacaaaggccaatcatagtgagtctagtgcaacctcaccatatgagacctctaagaggcatagcatgtcacctgcctctgttgaagaatgtccaagacttattcctaatatcccggatgagttatcccttcagattattgctagacttcctagaatttgttactaccatgtaaggctggtgtctaggaggtggaaaacaactataacgagtttg

SEQ ID NO: 24091 - DNA, 323 bp, Glycine max
gggacggaattcggggatacaatacaaatgtaacgtagtagttgaaaattttgttgcatcagatgaaagctatggagttggtgggagagaaatggatagaaattgtgacgtgtttggtaatttcaacaacattaatgcggagtgtaagtggaagtgaaagcgagtgcattttcccagcgatattcaacttgggagactcgtattcagacactggcggtctctcagcagcgttcggacaagctcctccccccaacggaatcacttatttccactcccctaacggacgcttctccgatggtcgtctcataatcgattttatagcc

SEQ ID NO: 24092 - DNA, 520 bp, Glycine max
agttagcctataaaaaaaaactcttttgtagtcttattttcccttgtttttttcgtggtgattttattaatttgttactattggcaccccatgctatcttcctccacatataattttgattgttgttagtgctgcaactgttggtggttaaaaatcttcaacaaaaaggaagaaaaaaacgccaaaaataaacagaaatcgcgtgtttttgttcctgagcttttgcttccattgagcacagcctttcccattgctgaaactgctggttgcctcggggaacaagttgagagacagacaaattcaagaatggcaaggatattacataaactacaaactcatgaagaagcgagtcaagcagtatgcccaacaaattcaacttggagcactagatcggcggcatgtactcaaggatttctcacgaatgctggataatcagattgagaagattgtccttttcttgttggagcaacaaggactcttggcatgccagataacaaagcttggagaacaacgtgatgct

SEQ ID NO: 24093 - DNA, 483 bp, Glycine max
gtcgagccgaatcggcttcagcaaaatcaaaggcaaaaacggaagaaaaagaggacaaaaacaaacagagatcgcgtttttttgctccagagctggaagcaactgaaccccgtttgcttcgattgattaaagcctttcccattgctgaaagagatggttgcctttgggaagaagttgaaagacagacaaattcaagaatggcaaggatattacataaactacaaactcatgaagaaacgagtgaagcagtatgcccaacaaattcaacttggaacactagatcggcgacatgtactcaaggatttctcacgaatgctggataatcagattgagaagattgtccttttcctgctggagcaacaagggctcttggcgtgccagataacaaagcttggagaacagcgcgatgctcttcaggaggagcctgaaataagcaaaataattgaattacgagaagcttatagagcattgggacaagatcta

SEQ ID NO: 24094 - DNA, 422 bp, Glycine max
ctaatgtgaggcttggaacatagcgcgtagtcctattcaatcattattggttactcactcacacattcaaccatttaagcacgtttgtgttccttcagaactcaaagtcactagctttttgtattgcaactgcaaaaggaaatggcattctcaacagccaccgtaaccactgctccttatggatcatggaagtcccccatcaccagcgacgatgtctccggcgccaccaaggacctcggaggcaccaccatcgatggtcgtggccgcctcatttggctcgaattccgtccaacagaatcagggcggggagttcttgttcttgagccggaaaacaatggaggtgaagctgtggatattactcctaaggagtttggagtgagaacattggctcaggaatatggaggtggtgctttcactgtttc

SEQ ID NO: 24095 - DNA, 278 bp, Glycine max
aggaaatggtgcggtggtgagagagaagcgtagggaagagaagaatgagaaggagaaggagaatcgacgcatgcacggttggaaggagtatttggagcattcgaaggagctgattgaaccggacggtggaccgccgcggtggttttcgccgttggagtgcgcttcgcgattggataattctcctcttctgctctttttgccggggattgatggcgtgggacttggacttattttacatcatcagaaactgggaaggatttttgatatatggtgcttgc

SEQ ID NO: 24096 - DNA, 544 bp, Glycine max
gacctttcattcatttatatcacacacaaattttcttagttatatgctctggctctctccattaggaagcaccacattcaatactcacgaaagaatcacaaaacaactcaggagaagatggaagatccagaggttattattgggagcttgaatccaaatgataccaggggaaagaccgttacttgcaaagctgccgtggcatatggtcctggagagccctttgtggtggaacgtgttcttgttcatcctcctcagaaaatggaggttcgaatcaagatcctcttcacttcaatctgccacaccgatctcagtgcttggcaaggcgagaatgaggctcaacgtgcatatcctcggattttcggccatgaagcttccgggattgtggagagtgtgggtgaaggagtaaatgacatgaaagaaggggacttggtggtgccaattttcaatggggaatgtggggattgtaaatattgcaagtgtgagaaaaccaacatgtgtgagagatttggggtggatcctatgaagaaggtgatggctagtgatg

SEQ ID NO: 24097 - DNA, 443 bp, Glycine max
ctcgagccgaatcggctcgaggtaaattgcgctgtatgtagtgagggtcctttggttcagtttcatcaaccataaattttctctttgcgttccatcttctttaggccactcttccataaaaacacaaaaagacccacagagaggaacatggcatgtccagcaatggcaaatgggaacggctcattgaagaacttgaagctaaatgacaccaagggaaagaccatcacttgcaaagctgccgtggtatatggtcctggagagccctttgtggtggaaaacattcttgttcatcctcctcagaaaatggaggttcgaatcaagatcctctacacttccatttgtcacaccgatcttagcgcgtggcgaggcgtgagcgaggctcatcgtgcttatcctcggattttgggccatgaagcatctgggattgtggagagtgtggggga

SEQ ID NO: 24098 - DNA, 607 bp, Glycine max
ctgtgaagcctgctatccctaatttgtctccattacctgatttctccctggagaatgtacagaacattccagaaggacaatgaatttcttacggatcgaatgtcaacaatggaagaagaaacgaagatgctgaaagaagctttggctaaacgtatcagtgagttgcaggcctcaaggagtatgtgtgctaaaacactgaacgcaaacttcaaagtttggaagcacaatctcagaaccagctgaaaggatctccaaaatccatcgtccagttaactcacgaacgtatttataatcaaaattcaagcagtgcaccaagtttgatctccatgtctgaagatggaaatgacgatgcagaaagttgtgctgaatcttgggcaacagcaatagtctctgggctatcccaatttcctagagaaaagtgcaatgaggaatcaaataaatctgaagtcactaacaagttggaactaatggatgactttctggaggtggagaagttggctcgtttgtcaaatgattccaatgtagatgccactatttcagtttcttcaaacaataagacaactgactgtgtggctgatgatttatcagaagtctgtactggcaaaga

SEQ ID NO: 24099 - DNA, 979 bp, Glycine max
  unsure (1)..(979): unsure at all n locations
cagaaggagaccttggatcttcgtcaaggaataatgacaaggaaagttatggaaagatatctgctccatcacctcgaacaggaaaagaggggaaacaagataacggagaggtgacagacaaggatgatcatctctatttctggtttcctttactggctggtttgtctgagcttagctttgacccaaggtctgagataaggcaaagagccttgaaagtcctgtttgaaaccttacgcaaccatggccacctcttttcactacctttatgggaaagagtatttgaatcagtcctatttccaatatttgattatgttcgtcatgctattgatccttcagggagtacctcagaggtcaatgaagtagagactgatggtcagcttgatcaagatgcatggctttacgagacatgcacattggccctccaattggttgtagatctttttgtcaacttctataacaccgtcaatccacttttaagaaaggtgttgatgctcctggtaagctttataaagcgccctcatcaaagcctggctggcattggtattgctgcttttgttcgtttgatgagtaatgctggggagctgttttctgatgaaaatggttagaagtggttttctcattaaaagaagtagcaaatgcaacacttcctaactttctgtttgttgaaagtgaggactttactaaaaatcaggaacatgcttcaacagctgaagatgatagagatcgtgccgagtctggctccccagataatttagaaagcttgaggattcgtcgtctttatgctcatttagctgacgcaccatgccgagctgctgttcaacttttattgattcangcggtgatggagatctataacatgtatcgccctcacctttcagcaaaagccatgctagtcctgtttgatgctctgcacgatgttgcgatacatgcacaccagattaacggcaatactatgttacgttcaaagcttcaagagttt

SEQ ID NO: 24100 - DNA, 431 bp, Glycine max
aaacaactctttttcttcttcttactacttgtttttcttcttcaccattctcaattcttttcttcttcttcttcttctaacatgggaccctcttccaagcacactcctcgttcccccacgtacttgattccctgcgttatagctcttgctctattctccctcaccggactcctcctctacaaggtggacgacgttgcttctcgcaccggaacggtggtgggtcacaacctagaaccgacgccgtggcacgtcttcccccacaagcccttcgacgaggagtcccgccagcagcgcgcgtacaaatcctacaatgctcctacctgacgtgccgctacgccgctgaagccctcggcggagcacggcggagaaccggcggcggcagggaggagtgccccaagtttttccgggcaatccatcgggacctggcgccg

SEQ ID NO: 24101 - DNA, 437 bp, Glycine max
cggctcgaggtggatcattcatgaatttataaaggaacataatcatgaacttttaccagctttggcatatcattttcggattcatagaaatatgaaattagctgaaaagaataatattgatatcctgcatgctgttagtgaacgcaccagacagatgtatgttgaaatgtctaggcaatctagccgctgtcaaaacattgggtctttcttgtgagtgacataaactatcagtttgacagacgccagtatttggctttggatgagggagatgcccaagttatgcttgagtattttaagcatgtaaaaaggagagtcccaacttcttctattctatagatttaaatgaagagcagcgcttaagaaatctattttggattgatgcaaaaagtatcaatgattatctcagctttaacgatgtagtttcatttgataccact

SEQ ID NO: 24102 - DNA, 352 bp, Glycine max
caactcgcgagtgtagtccacgctcccaatccttgacattactcttctctccaaagtgattatgaacaaaagactctcttttctctcccacaacgaaaaatctaagatgaaagattcaacagaaacagatgctttcagcgattcccttgagcttctgagtacctttctggactcggagctcccaagcgtgagaaacttcaaagggaaatggtcactcgcccgagtcaaactcacccaactccaaacccacctcaccgatttctccgccgagttccccaacgcctccaccacaaaccccctctccctccacctcctccactcaatcttcaaaaccctaaacgacgccgtttcg

SEQ ID NO: 24103 - DNA, 393 bp, Glycine max
tccagggggatgaaatttctctgcaatcaaacagtttaactgtcaactcaaagatggatatggaagtcacaagtagtttacaaactgttgaaattgatgacagccaaagcccatctttgaaagctgtgaagcaattgatttcagagacagtgcagaaaaaatcaactccaaggttggatgaggaggagacagttgcagaacttgcaacagatgccccggaacatcctagtcctatctcagttcttgatggctcagtgtacagagatgatgtgccatccccagtaaagcagatatctgaagattcaaaaggtgaggatgctcaagaatccagagaaaatgagattaaagatcagtggaaccctgaagatagcctttcatttaacagcactggac

SEQ ID NO: 24104 - DNA, 285 bp, Glycine max
aaaggcttcatgatacaaacaggagatcctttaggagatggcactggtgggcagtctatttgggggagagaatttgaggacgaatttcataaaagtttgaggcatgataggcctttcacggtatcaatggcaaatgcgggcccaaatacaaatggttctcagttctttatcaccacagttgctactccatggttggacaacaagcacactgtatttggtagagttgcgaagggaatggatgttgtacaggctatagaaaaagtgaagacagacaagacagataag

SEQ ID NO: 24105 - DNA, 272 bp, Glycine max
gaagattctccctgtagatttaaagtgtgcttcttcaaatcaaaagatagactatgatttgcttcaggcccctaaccccccctctttccatgttgaggaacatgtgccctttagtggtcaaatccctggttttgcccacgattgcctccttaaagatggtagtagtcaatctatgatgacaatggatcctaaacacaaactagattgtgctaaacctccatcgggtgatgacctgttcgatgttttaggggtggatttgaaaaaccaattgc

SEQ ID NO: 24106 - DNA, 493 bp, Glycine max
aaaatatctcacgcaataacaaaccctaataacaatgctgaagcatttcaacatgaacattttcttcacgttgcttatagttgtcaccttagctagtttctatgttccccatttgaagcctagtctttcaattacaatacccttctgcatggttgcaaccctagcataccaatttataatgagaacacccaacaaaatttacttggtggattttgcttgcttcaagccaagccttgaatgcctgtgctccaaggaaacgttgctcgaccgggcgaaacgcgtcggtttcctctccgacgagaactacaagcttgtgaacaagattcttgaccggtccgggttgggaccgtggacgtatgtcccggagggtctcctggagatccctcccagactaacgttggaggaggcaaggaaggagacggacacggtgctcttcggggccgtcgacgagctcttggagaaaaccggtgttgaagccaaagacattgggatt

SEQ ID NO: 24107 - DNA, 273 bp, Glycine max
caaaaatatctcacgcaataacataccctaacacaaacaccttcctcccttaaaaatgctgaagcatttcaatttcaacatgaacattttcttcacgttgcttatagttgtcacattagctagtttctatgttccccagttgaagcctcgtccttcaattacaatagctttttgcatggttgcaaccctagtataccaatttataatgagaacacccaacaaaatttacttggtggactttgcatgcttcaagccaagccttgcatgcctctg

SEQ ID NO: 24108 - DNA, 396 bp, Glycine max
  unsure (1)..(396): unsure at all n locations
tgaaagtagtcatatctgtgcaaatggtcaaagagtattacctagtggaggaattagtgccgatggacctccaaccactctcagtggtactggcattgatcacatggcatttttacaggcaaatatcacacgtgataacacacgttttgtgaatggaactgttgttggagacagaaatatgttccaggtagaccaaggccttggcattggcagccagttccccttctttaaccgtcaccaactaactctgacacgatttatccagttgatggcagtggaggaaggggctggtaaaccacctccaccagtgcttgtcctccatggccactatggtggttgtgtaggtgatctccccagctatgatgcttttactcttggggggncctattctgtaag

SEQ ID NO: 24109 - DNA, 262 bp, Glycine max
ctcgagccggtttgttgttggttttttataggatattttacaccattttgttgtggcaaacactctattctgtattctagaatcctcatcacaacaatgactctataaggcagatagaaaaccctaaaccctttccactcactctctctctccccaacgatggcgactcagatcctctctcgcatcttccccaaaaccctaaccctagcgcccttcctcttccgctccctcaccaccgccccctctcgtccttccctccccg

SEQ ID NO: 24110 - DNA, 457 bp, Glycine max
ggtcttttggccgcaggagccaaaaccgatcactgggaaagcgaaaattgttaccacgaagattctgttgtcgaaggaggaggcggacgaggaggaggatggtttgcaaagcctgttggctgagtgggtggagcttgtgcaacctagcagggtggaatggatggatttgctcgacaaattaaaagagcataatcctggtttgtactttaaggtggctgaaatggtattggctgaagattctttccaaacaaatgtatctgactactctaggcttattgatatctatgctaaagagaaccgctttgatgatgttgagagaatgttaaagaaactgaatgaaaatggtctacaagtagatgcttcaatagccagtactttggtcctcatgtactgcaagggaggcaatcttgcacgtgcaactgaagcatttggagtcttgacaagcctgggcttccaa

SEQ ID NO: 24111 - DNA, 337 bp, Glycine max
gcgggtcggatctcaggcggaaccagtccaccggggacgtgaggggattcggcggcggcgggaacgtggcgaggtcaaaatcgacgcaggatatttacacgcgggctgaatcggaagcttctgctgccaacaaagaagaattcttcgcgcggaagagagcggagaatgagtcgcggccggaggggcttccgccgtcgcagggtggcaagtatgttggattcggatctggccccgccccgccccagaggggtaatcagcaaaacgattatttctctgtcgtttctcaggtcccacatccaagctctctctctcttttttttatttaaggggggaaaat

SEQ ID NO: 24112 - DNA, 964 bp, Glycine max
cagaaaaatggtagtaaccattgtagcttctcattgtgttgttccaaaccaagaaacacccaaggttcgtttatggttatcagatagtgaccaagtagtgcgtttaggtcatacacccactatatatgtttacaaagcaaaacacaacaccaaaaccatagagagaatgaaaacctcacttggcaagattttggtgtactactatccagttgctggaagattgaacttatcagatagtggtcgaatggaattggattgcaacgcaaagggagtgacacttcttgaagctgaaaccacaaagtcattgggtgattatggagatttttcaccttctgagtccatcaaggaagagcttgttccacaaattgattatatctgacccttagaggagcttcctttgttgtttgtgcaattgacaagattcaaagatggtgaaagctttgccattggagttgcctgctcccatacgttggctgatggtcttagtgcaattcaattcatcaattcatgggcaaaggtagctcgaggagagacactagagccacatgaagtgccatttcttgatagaacagttctcaaactccaacactctccatcagcaccatgctttgatcacccagaactgaagccactaccactcaaactaggaagttctgatagcattgctgaggaaaacaagaagacatgtgctgtattactgaaactaacaccagagcaagtggggaagctgaaaaagaaggccaatgaccaacccatgaaagaagggtcaagagtaagaccttatagcagatttgaagctattgctgctcatatatggagatgtgcatgtaaggctcgtgaacttgatgagaaacaaccaaccctagttcggttcaacggtgacattcgcagcagactaattccacctcttcctaggacttactttgggaatgctttggcagcaacagttacacccagatgttat

SEQ ID NO: 24113 - DNA, 360 bp, Glycine max
agaacaggtcctagaactccgaaaccaaatccccccaatccacctcgtgcgggaaaatctgttgattgtgatgataacattgatgaaactgtacttctgtctgctgccctggataccaagacaatccctggaggatcacttgccccacaatctgatattcaggatcaagactttactggcgatgctgcatggctagccggcgaatcgcaggctgaggaaagctccgaatatgatggctgggacgacatcttattgtgcaacgagatcttagattcttctgctctgttgaatgactctggattggactacaccaatctcgatgacattgcaagctatgctacacaaagggctagaaatgat

SEQ ID NO: 24114 - DNA, 286 bp, Glycine max
cacatacgtaaccaaaaaccctttcgctgtttctctccagtgttctccaaggcttgcttccttctccgatggcgtcgtctctggccattgcttgcggcggaaacaacaacgccaacttagggatgcactagcagcggtgcgctcgggttctccagccgccgtgctccgtctcgatgggccggtctacggcgagggccgggaggatcacggcggcgatgccgacggtgaaggagcaagagactactccgatgatcatgatgggggcaatggagctgctcgggaagcg

SEQ ID NO: 24115 - DNA, 303 bp, Glycine max
gagaaatggaaaagtacgagaagctggagaaggtgggagaaggaacatacgggaaagtgtacaaggctcgggagaaggcgagtgggagcctggtggctctgaagaagacgcgtctggagatggacgaggagggtgtccctcccaccgcactacgcgaggtgtctctccttcagcttctctcccaatccatctacatcgtccgcctcctctccgtcgaacacgtcgacaaggtccccaagtcccagaaatcctcctccaaccccctcacctcgcccatcctttaccttgttttcgagtatctcg

SEQ ID NO: 24116 - DNA, 574 bp, Glycine max
ggtaaagcacttccccagttttgatcttgtaacactttttcgggtttgttgaatctgcttctttttatttcaatttgggattgactcatatgacaagtatgtatagtggtggttacactgctctagttacaaacttatccccaagagcaacagaggatgatgtgcgcaattttttcacatactgtggtttgattgagcatattgaaatattaagatctggtgaaaatgcgcctactgcatatgtgacttaccgggatgcttatgccctggaaactgcattattgctaaatggatcaatgatattggaccaatgtatattcatttcacgctatgaagcttatgtaaatgactatgataattggagcaatcatgcatcaaatcctgaatacagtattacaacctcacaggatgttcacatggataagtttgttgcttcccctggagaagcactaactatggctcaggtggttgtcaaaacaatggtggctaagggatatgtattgggcaaagatgcatttgtcatggcaaaagctttcgatgaatctcatagtgtatcatctacagcagcaaccaa

SEQ ID NO: 24117 - DNA, 1071 bp, Glycine max
gttacgcttcgctgtctctctccctccaaaatcaaaatcgaaatcgaaatcagcaaaaccctaaaatataacccttagaatagtgaggtgcgcgcagagcaataatagggcatgacatgatgacaagccacgaagaggatctggatctcctcctttcccttgacgagagagttgctgaaacccctccatcttctcccacaatctcagacgatgatgatgatgaacttgaacttcccaaccaaagggaaagggataaacccgacatgtccgttttcaaaagcgcccttcaggattgccttccttacgatccccccaaaccaactaacaaacccgttattaatgttgattcccaccttgaaaagttttcgggccttcgaataaggaaccaattgttaactcctgccgagcttaaggaacatttttcagacattcgttttgttcggctgtcggttatcaagaattccttagttggggatactgtttctggaagttgggccactgttggagtattgaccgagaaggggactcagaagacaagttcaacagggaagagctattgtatatggaaaattggctgtttagatgaactactgtttctctgttcttgtttggagatgcttatcagatgaacatgcaagagcaggctggaaccgtctttgcactctttaattctaccgtccgcatggataatgcgggtaatggtttttctttgagtatatactccaccagacaaattatgaagatgggcacctctgttgattatggagtttgcaaagggaaacgaacagatgggatggcttgtaccctagtcataaataaacgtcatggcacatattgtaaatatcataaatcaaaagcatcagagaagtattcctcaatgcgaactgaactcaagggaggaaacttaagaacagcgtttaggcctatgggttacctcaaatcagaaggaatttacttagttgaccctcttgctgacaaaacaaacttgaagaagtctcagcctgtgaaattattgtcccgggatggtatcagaaaggcattgagcaatgcaggaaaagtaacaacagcttc

SEQ ID NO: 24118 - DNA, 541 bp, Glycine max
accaaaatcgaagaggttgagacttgcattgagaggagccttttttccccttaggtttttaaaattgcctttggaccttccttcccgctcgtttcacaatgaaatacgtggtcatcagcggcggagtggtcagtggcctcggcaagggcgtcaccgccagcagcataggcgtcgtgctcaaagcctgtggccttcgcgtcacttccatcaaaatcgatccgtacttgaacatcgacgctggcaccatgtctcccttcgagcacggtgaggtttttgttctcgacgacggcggagcggttgatttggatttgggaaattacgagcgcttcctcgatgtcacgcttaccaaagataacaacatcactactggaaaaatttaccagtctgttcttgagaaggaacgtaaaggcgattatctcgggaaaactgttcaggtggtcccgcacatcactgatgctattaaagattggattgagtcggttgctgtgattcccgtggatggaaaggagggccctgcagatgtttgtgtgattgagctggg

SEQ ID NO: 24119 - DNA, 617 bp, Glycine max
tctggtgtctggttgtcgaatatcaaaccgcgcaaatcgttctggtactgaccctgtagtgcccagaagtggaaactgatgtatgacattgggtagcgccacactggctttgggatatcatgtgggagcctaaaatagcctgagaccaacatgaatatgccctgaattcctgctccaataatgatgcccatgaggaagttggggacaatgctagcaattgccatcattaagctttcaaccactgtgacactggcataaaggcacaacacaaagaagaggtagtgccagaagccagggtgtaggcgaaccatgaagtaacaaatggttccagagagaaaggtgatcaaaatcaggaagggcattgcagataatgtgttgctgatgacaaatgaagtgacaccatagtggccattaagcctctccctttggaaaaccttcatgtcttcaacaaatgaagggaatccaccaattgacatgaaggtgacaaaaccacagacaaaagatgcacaagaacctctagccagaatagagttgtagcctgttcccacattcaaataaatggttccaatacaaacagtgactacaatgtagataacaagcctaagccagtagtatcc

SEQ ID NO: 24120 - DNA, 489 bp, Glycine max
attttattaaccgcttctacaaataagctatccgtgacacatgatgaagcagaggactatgcttctttgatcatggaatttctcgacaagaaaaacaaaggctacattgagatatctcaaatggggtctctattcaaggcaacaaatctatcaaattcaaaggcacattctccaatgaaacaagtatcatcagtaggtagcagcacacacaatgttcttcataacactagcggtgacttttgtgaagaacaacaagaaccaatgtcaaggactgaagttttgttcagaacttattggagacgtgcttggattgttctggtttggttgcttgcatgcttgggattgtttgtgtggaaatttgttcaataccgccatagatcagggtttgaagtcatgggttattgtcttcctactgctaaaggtgcagctgagaccttaaaactcaacatggctcttgttcttcttcctgtttgtagaaacacaatcacg

SEQ ID NO: 24121 - DNA, 293 bp, Glycine max
ctcaatccggggtacgaagctggcaatagctgcagcatctgaatacgaatggattatatctgtctttttgtcaccttcactgcgattgcgctcttagggtttgtctctgtagtgttctttgaagcatataaaagtagacacaaccatcagcatatcgaagttccggctatttttgaggatcctagctcgttgaaacaggttccttgcccacatattgttgatccagccaccaagtatatttctctgattatccctgcattcaatgaggagcataggcttccaggagctcttga

SEQ ID NO: 24122 - DNA, 670 bp, Glycine max
acaggccaatcatcagaaaaaactgatgtgtttgggttcggaatcttgctgcttgaactgatcacaggccataaggctctagattttgggcgagcggcaaaccagaaaggtgtaatgcttgattgggttaagaagctccaccaggatggaagattgagtcaaatggtagacaaagatctaaagggcaacttcgatctgattgaactagaagaaatggttcaggttgcactcttgtgtacacaattcaatccttcgcaccgccccaagatgtcagaagtattaaagatgttggaaggggacggcttagctgagagatgggaggcctcacagaggattgaaacaccaaggtttcggtcttgtgagcctcaaagatattcagatttaatagaggaatcttcactcgtagttgaagccatggagctttctggccctaggtgacaagcaagtatcttggttttccactatagctccttgtttaaaaggtgtagtttacatgttaaatatgacagtgtcattcgtgtcaatagctatgtaatgctcgtattcatctgtaaaaagaaaaaaaaaaaagaggaaagtcatgtataagtatcttctttgttggaatgttgatttagttgcttcagaaattttttgaatcaatgttagaaaattgtatgtagttgcactt

SEQ ID NO: 24123 - DNA, 290 bp, Glycine max
ctcactaacgcattttttctctatctctctctattcttcacccgaaactctctattttctcatgggttcggatacagagagagaaagctgcaactctcgccacttcgcatggctcatgaagtcatgcttccccaacccaaacgacgccgtcgcgaaactcgcgtcaccgccgcaatcccaccgtaactcccctgtacccgcaaccaccatatcctccctccccgatgacatcgttttagactgcatctcccgcgtgcccacatcctcactcttcgcactctcaatcgtct

SEQ ID NO: 24124 - DNA, 297 bp, Glycine max
tgtcaaagttaattcgaatttgaatggtagaaaagaagataatcatcctaagcctgatcagctatctctggacgtggagtatttgaatttaaaagaggtttccaatgaaggaaaagttaatggttaccgggcacagacatttacttttgctgagcttgcagctgcaacagggaatttcaggttagattgctttctgggtgaaggagcgtttggcaaggtttataaggggcgcatagacaaaataaatcaggttgtagcaataaagcaactagaccctcatgggcttcaaggaattag

SEQ ID NO: 24125 - DNA, 493 bp, Glycine max
gttggctctagccgccacaacgcggtttatgttctgctgctttcactcttctgttcaaactcgagccgaatcggccaggcgcagttgcgaaaccgcaacacaaactgcgatagcgccgccccgcaccggggcgatagcggacgcgacggccgctccttcaatcctccccgcagcagaggtcattgtcgcggcaaggggccgctccgctccggcgcgatacttagatttgcattagcatcaaatgaatgcgtacaggagtgatttacatattgcatatttaacctacttttctgtgtattcaactaataatcattgtcacatttcattgcaggaattttgggccagggttggtagtcctagcaggactgtctacagcataagcttttgtccgaagccttttcgtgttaattttgggatgtgacatggaaagtccccactctcagaacagtccaagaagaaccctcagtctgtcgaaaaagcggagggcaactgc

SEQ ID NO: 24126 - DNA, 879 bp, Glycine max
  unsure (1)..(879): unsure at all n locations
cttctcagtacttcatttcaactgatggagtctacaattcaaggagcanggtcttgggaggtggaagttctatcaatgctggcttctacactagagcaaacccaaggtttataaagaaggtggggtgggatgccaagctagtaaatgaatcacatccatgggttgagaagcaaattgtccaccgtccaaagttttcaccttatcagagagcatttagagacagtcttctagactctggtgtgtcaccctttaatggcttcacctatgatcatctctatggaacaaaggttggtggaaccattttcgacagatttggccgccgccacacggctgctgaactgcttgcttcagggaaccaggacaaacttactgttttggtctatgccactgtccaaaagattgtgtttgatacaagaggaaagaaaccaaaagctgtgggggttattttccaagatgaacatgggaaacagcacgaggctattctgtcaaatgataggcatagtgaagtgattatgtctagtggggcaattgggactcctcaattgctaatgcttagtggaatagggccaaaagcagaactccagaagttgaacatcccagtggtccttgacaacccctttgttgggaaaggaatggtagacaatcccatgaacacaatgtttattccttctaatagaccagttcatcagtcactcatagaaactgttggtatcaccaagatgggtgtgtacattgaggctagcagtgggtttagtcagtccaatgatagcattcactgccaccatggtatcatgtcagctgagattgggcagctgtccacaattcctcctaagaaaagatcaccagaagctgttcaactctttatcaagaacaagaaag

SEQ ID NO: 24127 - DNA, 425 bp, Glycine max
caaaaacctccttgcccttgcggaccattttcatttttcatttttgaattatcaacaaaaaaagacacctcaaaatgaagcacaaacactttttgtaagagaacaaaaacaacagcaaattccactgttcgttttcaccactcaaatgctactactctcacttgctcacaaaacaaaaccccttcaattttctcaggtataggaagaaacaattccaagcgaattgcaactttcacgaactgaatttgtttctgttaattttttcgcgtatttgtgagaagctacgaattttgataccgtgaaaatggcgacatgttatacaccttcgaatgttagaaattcgccgggggtgctggctgtagttggaggaagaacaatttcagagaatcacgtaggtaacagatcatgcttcctgagaattcaag

SEQ ID NO: 24128 - DNA, 575 bp, Glycine max
cactgctcagattagaaccctaacctaacccaaccctctctctctctctcttcaattcatggacgccgtcgactcaaccccaaatccccctcccctccctacctacgatccatcagagtatcacaacccgccgcaacatcaatcggaaaccgggcaaaacggtaacggcaccaacctcggaaaaccatcggagaacggcagtcaggtcgctgccgacaacaacggcttgaatcctcagatttcgaagccattgctatccgaaggactgacgcggagcggcaccgacagggatcaatccggcggcgaggaggagaccaccagcaagcgccgccgccgcagccggtgggacccgcagccggaatcgaacgaccagagcggtggcggcgattcggggaccggaccgaagaagaggaagtctcgttgggccgatgacgacccgaaaccggtgattcagcttcctgatttcatgggcggtattgaattcgatccagagattcaagctttgaatagtaggcttcttgagattagtcgaatgttacagtcaggtttgcccttagatgatcgccctgaaggtg

SEQ ID NO: 24129 - DNA, 415 bp, Glycine max
ttcacaatttgaatttcattctggagtctttgtggtggtgttacttgtttcactgttcagattaaaaccctaaccctatctctctcttccatccatggacgccctcgactcaatcccaaatctccctcccctccctccctacgatccatcggagtatcacaaaccgccgcaacatcaatcggaaaccggagaaaacggtaacggcaccaagaacggcgaaccatcggagaacggccaggtcgccgccgacaacaacggcttgcatcttcagatttcgaagccattgctctccgaaggaatgacgcgcagcggcactgacagggatcaatccggcggcgaggaggagaccaccagcatgcggcgccgccggagccgatgggacccgcagccggaatcgaacgaccagagcggtggc

SEQ ID NO: 24130 - DNA, 340 bp, Glycine max
cagcttttatattttaccctttatctatttgttgatattgttttcatcccttgtgcctttcctttccttggcgattacgaaattggggtttgatctagagagagagagagagaaaggcataaaatttaaggaagaacagagattgattttccataggaaccctaattttctttttcttgttcttttggggttctgcgatttgtggggttttgtgaagcggtgattggaaagtctcgatctttgatcggttttcgtcgatggagggcgagggttgttcagagggagagaataatcggaaaaggggtggctctgatgatgatagcaatgagaataacaacaa

SEQ ID NO: 24131 - DNA, 348 bp, Glycine max
catgcacagccaaatgcatctccttttcaatcaccaacaccatcctcatctaacatcccacaaacatctcaccctgccttaacttcagcaaaccacatgggtacagcaaactcaccagctaatatttccttgcaacaacaacaacaaacatctcttcctgctgaagctgaccctagcgatgcccagagctcggtccagaaaatcattcatgagatgatgatgtcctcccagatgaatggccctggtggaatggctggtgctggttcgcttggaaatgacatgaagaatgtaaacgggattctaccagggagtaacaatacagggctcaacagtggcagtgtcagtggc

SEQ ID NO: 24132 - DNA, 436 bp, Glycine max
tctacgagatgctcgacctcgccggaaagttgagacaattcgacctagcctggcacgtcatcgatctcatgaagtctcgcggcgtcgaaatcaccgtccacacgttctccgccctcgtccgccgctacgtgagggccggattggctgctgaggcagtgcacgcgtttaaccgtatggaggactatggctgcacccctgatatggttgcattttcaattgtaattagtagcttatgtaagaatagaagagcaaatgaggctcaatcgttttttgatagtcttaagcataggtttgagcctgatgttgtggtttacactagcttggttcatgggtggtgtcgtgctggtgacatatctaaggctgaagaggtgtttagtgatatgaagatggctggaattaaacctaatgtttacacttatagcattgtgattgattc

SEQ ID NO: 24133 - DNA, 273 bp, Glycine max
cactactgtatcctgcatgccgtttcatgcatgctgatgtgggtgggtgccttggaagttgctgctggtgaatcagagattaggagctgatagttagttatcactcattaatccctgagaaatctctgcataaacgtcttagacttgcttcacttggtggttgtattatgtaaatgatgctcaccattctgttagatgagcttagcatctgattatcgtctcatgagacctgtagaatggatgaaatttttgttgtaattcattggggtacat

SEQ ID NO: 24134 - DNA, 750 bp, Glycine max
ctctcttttgttgaattccttgaaagatgcaacgatgccgaaccctaaggtctacttcgacatgaccatcggaggccaaccggccggtcgcatagtgatggagctgtacgccgacacgacccctcgcaccgccgagaatttccgcgccctttgcaccggcgagaagggcgtgggccgcagcggcaagcccctccactacaagggctccgccttccaccgcgtcattcccaacttcatgtgccagggcggtgacttcaccgccggaaacggcaccggtggcgagtccatctacggatcgaagttcgcggacgagaacttcataaagaagcacacgggtcccggcattctatcgatggcgaacgcgggacctggcacgaacgggtctcagttcttcatctgcaccgttaagacggagtggctcgacggaaagcacgtggttttcgggcaggtggtggagggccttgacgtcgtgaaggacatcgagaaggtgggttccagctccggtaagacctccaagcccgttgttgttgctgactccggacaactctcctagacatggtgatccacacggtgttggattattggtgggtatggatgatgactgatgatgctgcttctcttctctcagtggaatcctgttgagatctttatgttttctgattttaatttggagtttgtacgctggactcttctcatcataaaaatcatgctagctactgctaccttaaataaagttagtattaataatcc

SEQ ID NO: 24135 - DNA, 547 bp, Glycine max
  unsure (1)..(547): unsure at all n locations
agcaaagatgaagacgaagatgaacaagaaatgttcgacgcgcaacaaggaggatagcatgggagaggaattagacgaggaagatgaagaagagaagaaggtagaagaaacaaaagcggaagtgaatattgtgagtaaaaagagagcaaggggtagtgcactcatggaaggttctaggtgcagtcgtgtgaatgggagagggtggaggtgctgccagcaaacgctggttggttactcgctgtgtgagcatcacttggggaagggaagactcagaagcatgacaagtgttagaagccgttccattattgcatcaactgcaccaaaggaggtgcacgtgcaccacgtgcctcacccttcttcttcttccccttctttttgttctctcgagaagcaaattgagtgtgttgatgatgctgagccccttggggagaaggaggagaagaagccagggataatnaatgacgtcgacgagaagaggatgaagcttggcatggtgaaagcgcgttccattaacagtttgctgtggcaaacaagcaaccacattgct

SEQ ID NO: 24136 - DNA, 377 bp, Glycine max
cggctcgagcccaactcatttccggttcagaaggcttgatgcacaacagccccaaaaggcgaagctagttgggataaaaaggtaatttgaagaaaaagaaaacagaggcttaggcaactaagaaagaaagatgaagctgaaggtatatgcggaccgcatgtcccagccatcccgtgcggttctcatattttgcaaagtgaatggaatagattttgaggagatcaaagtcgatttatccaaacgtcagcagttatctcccgaattccgagcggttaaccctttaaggaaagtccctgctattgttgatggaaggttcaagctatttgagagtcatgctattctcatatatcttgcttctgcatttccaggagttgcag

SEQ ID NO: 24137 - DNA, 1165 bp, Glycine max
cttatgatgaacttcgtctggcaactgaggagttcagccaggaaaacctattaggagttggaagctttggctcagtttataaaggccatctaagtcatggagctactgttgcagtgaaagttcttgacaccctaagaactggctctttgaagagtttctttgcagaatgtgaggctatgaagaactcaaggcatcgaaatttggttaagctgatcacatcatgctctagtgttgacttcaaaaacaatgattttctggctctggtgtatgagtacctgtgcaatggtagcttggaagattggatcaaggggaggagaaatcacgcaaacggaaatgggttgaaccttatggagagactgaacatagctatagatgttgcttgtgcattggattacctgcacaatgatagtgaaatcccagttgtgcattgtgatttgaagcctagcaacattctattggatgaagacatgacagcaaaggttggagactttggattggctaggtcgctgattcaaaactcaacaaatcaagtttccataagctccactcatgtccttaggggctcaattggttacatacctccagagtatggatggggagagaaaccatctgcagctggagatgtatacagttttggtattgtgttactagagctcttctctggtaaaagcccaacagatgagtgtttcacaggaggcctaagtataagaagatgggtgcaatcagcaatgaaaaacaagacagtgcaagtcattgaccctcagttgctgtccctcactttccatgatgacccttctgagggaccaaatctgcaactcaattatttggatgcaactgtaggagttggcatatcttgcactgcagacaacccagatgaacgcattggcattagagatgctgttcgccaactaaaagctgctagagactctcttttgaaactgtctgatgagagtcctagaagagataccgagcgttacttccatgtttcaataaagtgaactctagactctagtcatgtatgtatggtggaaatagaggcatttcgaccaccaacctttaaatagggtattaataaataacaattgtgtttatgtttatgtgtaactctgtctcttgtaaaacttacttatgactataaagaagaatggtggatcatttatggctt

SEQ ID NO: 24138 - DNA, 184 bp, Glycine max
cccagtcattgatgttttctggggtgttagcgtgccatcattcgtcaattgtgtggtgccaaagttcgacaattaaacattctgtaagaattgatttcttgtagcagattgatttatgatggaaggaaaaaaaaaaaggaaaggaagtagtaagaggggggaaagagaagaggaaaaaagagaa

SEQ ID NO: 24139 - DNA, 363 bp, Glycine max
gaacagttcaattgtattaggaatggaaggcctgatgaggattgtcgagaatataagtggaagccaaatggttgcacacttccaaggttgaatgcgcatcgaatgctgcaattgttggagagggaaacgactggtttgtgtaggcgattcgctcaataggaacatgtgggagtcgtggatctgcatattgagaaatgctgtgaaaaataaacacaatgtgtatgaagtaaatggaagagttaatttcagaggcgaagccgcttattcattagttttcgaagattatcacttctccgtggagctttttgtgtctccattcttggttcaagaaggggaaatgactataagaatgggacaaagaag

SEQ ID NO: 24140 - DNA, 264 bp, Glycine max
cccttattttatcttggagttcggattctgtttcacaagacagatacatgagacgccaagtggacgccgaagaccaccagctaagggtgttatacgagctatgttccctcatcattcacactctcaagtttcctccgttaccctacccttttcccacctcgtacccatgttcttcttctcgcgcttcttcgtctttgtcgcattctaggagacatcactggtggacaacgttggctacctcccaggattccccggcagcattcg

SEQ ID NO: 24141 - DNA, 916 bp, Glycine max
gtgataatgatagttttatctcagcttccttcttttcattccctgcgacacatcaacttgtgttcactacttttcgccctgggctacaccatcctggtggttggtgcctgtattcatgcagttacaaccattttgcaggtacatcagaaaatgcccctccaagggactattccttagaacctaagaagtctgcaagggccttcagtgccttcacttccatgtccatacttgcagcaatatttgggaatggcatattgcccgagatacaatttctgggtattgggtatttggaaacaaatccaactcaaacattttgaagagtctgctgccagatagtggacctcctttggctccaacttgggttcttggacttgcaatcatctttgttcttcttcaactctttgccattggtctggtttattctcaagttgcttatgagataatggagaagaaatcagctgatgtgaggcaggggatgttttccaaaagaaatctcattcctcgcataattctccgaacaatttacatgatattctgtggggttttggcagccatgctaccattttttggagacattaacggtgtggttggtgctattggtttcatccctctagatttcattttgcctatgcttctatacaacatggaatacaagcctccaaaatcatccttcacttactggatcaacgtctcaattatggtgatattcacgggtgctggaatgatgggtgcattctcttccataaggaaattggttcttgatgccaaccaatttaagttgtttagtagtgatgttgtggattaacctaatgcatacataaatcatcaatgcagatagataaaagcactgttcccagcattggtgatgtactggagttcatggtgggtttgtgtatacgctctagataggtttaac

SEQ ID NO: 24142 - DNA, 604 bp, Glycine max
ctcacgcgttcgctatgttttgcttttgctgcatattgttcaagagtatacattaatgatttggaatgttaaacattagtgtcaagtaaatggcgttggttaaaatatttcagtttttaaattttaattgtttggttttccttttttatggaagatcatgtactccaatatctcacctcatggacccctcaaattgtaccactttatagcaatggtgacagtgataatgatagttttatctcagcttccttcttttcattccctgcgacacatcaacttgtgttcactacttttcgccctgggctacaccatcctggtggttggtgcctgtattcatgcaggtacatcagaaaatgcccctccaagggactattccttagaacctaagaagtctgcaagggccttcagtgccttcacttccatgtccatacttgcagcaatatttgggaatggcatattgcccgagatacaagtacccactgttcctctttctgtataagacacaaataatttactttatttgtatgttacattgaccatgtatgtcattatgaataacacaggcaactctagcaccccctgccactgggaagatggtaaaagg

SEQ ID NO: 24143 - DNA, 346 bp, Glycine max
ccttagaacctaagaagtctgcaagggccttcagtgccttcacttccatgtccatacttgcagcaatatttgggaatggcatattgcccgagatacaagcaactctagcaccccctgccactgggaagatggtaaaaggcctttttatgtgctattccgttatttttgtaacattctaccctgctgcagtttctgggtattgggtatttggaaacaaatccaactcaaacattttgaagagtctgctgccagatagtggacctcctttggctccaacttgggttcttggacttgcaatcatctttgttcttcttcaactctttgccattggtctggtttattctca

SEQ ID NO: 24144 - DNA, 303 bp, Glycine max
agaggttgggctttcttggctggtctactttgtggctttgggaatggcctccaatttatgggaggtcaagctgcaggatatgcagcagcagatgctgttcaagcacttccactagtgagtaccttttggggcattgttttgtttggagagtaccgcaaatcatcaagaagaacatatgtgctacttgggagcatgttgcttatgtttgttgcggctgttgctgtattaatggcatcatcagggcatcgaaaatgatcataatactgagcaagaggaaacgatagcaaagactgaaaggtgttg

SEQ ID NO: 24145 - DNA, 254 bp, Glycine max
gaacaattaaaagattttgtaatgtgtgttgatacatcttcaatagtattgtaacagagaatgtcatgcgaaacatgttgatgcacaattggataaagtatgagtgtaattttcatgtttaaagatatttactatctaaaaataaaaaaaaaaaggggggccccccgattagtgaccccgccacccggggatttaatccgggccgggaccctgcgggggtacaagtttccccaaaagggggccgtttaaagcct

SEQ ID NO: 24146 - DNA, 448 bp, Glycine max
atcatatacagcattcacgaattgtgagcagataaacatcaatagtgtatcctctattgtctatagtctgtttccatggcaaaaacaactcacatagctattgtttcaagtcctggtttcacccacctggtccctataattgagttcaccaagcgacttgtcaagcttcacccaaattttcatgtcacatgcatcgttccctcacttgggtcacccccagaatcctccaaggcctaccttaaaactcttccttcaaacatagactccatttttctccctccaattagcaaggaaaatgtaccccaaggagcatacgctggactcctaattcaactcactattaccctttctctgccatcaatatatgaggccctgaaatccttgtcctctaaatttcctttatccgcgttggtggcagatgcttttgcatttcaggctctggaatatg

SEQ ID NO: 24147 - DNA, 395 bp, Glycine max
attcgggaatatcaacgaaacatcatcgtgcgtcactttctaccaaaccacaacgctcaaattgttttcttttgctatcactgttaccgaatccctcactttcttcttcatcttcttctcctttgtcacttctcagcaccactcaatctcttcaatttctttcttctactggcaataagcatcagcacactgccacatccagttcccttctgtgtgttcctttcttctactctctccagtccagccaaaacgaagctccttccatcattttcagttttttctgtcaagtgttgttgcttcttctcccaaactcgtccaaacattgctggtaacaagtcccccatgaacttgttgagcagaattgttgggttgggtagcccaagggcagcagagaa

SEQ ID NO: 24148 - DNA, 267 bp, Glycine max
tgcgctttttgttcctcggtctttgaattctctctcacacactcacacagtagtaggactagttagtgtcaaaactctctctttcgtctcatcaatcattcaattcaccgatcgttagagaccaagcgtattcgccgcttgatccgacgcaatggacgcgcgcgagccgctccgcccaccgccgcccaccatcatggcgggccccacatcctacggttccgcacaacatccgctcaccttcctccgccaccgtctccgccaccgcgc

SEQ ID NO: 24149 - DNA, 569 bp, Glycine max
agagagagagagagagagagagagagagagagagagagagagagagagagagagagagagagagagagagagagagagagagagagagagccgccatcaagccctacaggaacttccagaaggagaagaagctcgaggacaacgacttcaccggcgccgttttcgaaggcaagttttacggccccgatgaggttaagaacctcgaatccttgcccacgcgcgctgagatttacgccacccttttgggggctttgaagagccctgcttccgctcttgttggcactcttcagtctcctgctagggaacttgttacggttctcaaggcgcatattaagaaccttgaagaacaacaaggtgttgcgcaatagataccaataggtgtgtagccttgtttatgtgttttctttattgcatttcagttgttctttgtttccttatttgtctatggatgtgtagattattattattatcatgtgttttcttgtgaagaaaaaaaaatgtagaatggtgcctaggaattgggaatgctggaaaatctgttccctttgaatcatgctatttcactattt

SEQ ID NO: 24150 - DNA, 258 bp, Glycine max
ggcttgaacgtgtggctcttcgtccacaccgaggagatcccttccgccatcaagccctacaggaacttccagaaggagaagaagctcgaggacaacgacttcaccggcgccgttttcgaaggcaagttttacggccccgatgaggttaagaacctcgaatccttgcccacgcgcgctgagatttacgccacccttttgggggctttgaagagccctgcttccgctcttgttggcactcttcagtctcctgctagggaa

SEQ ID NO: 24151 - DNA, 669 bp, Glycine max
cgaaatttgatgccactttatacatcaagttgttaagcgcagtttatcttcctagccaaggggttagtgaattaatggaggttcgtggagattcggacacttcaatggtgtctttctctgagtttttagttatgtttgacgatccagattggggttttggcatcatgcctactctggtgaagcttgaaaccggggatagaaacaggcatggtgacacggtatgctcggtttgccgctacccaattattggttctcggtttaaggagataaaatctcattttagtttgtgtaaccaatgctacagtgagggaaaagtgccttcttcatttaagcaggaagagtacagatttaaagagtatggaagtgagggtgaagccatgaaagataagtgtatgtgcttcaacttgcaatcccgtaatgaaaagtagatagcggcattcaattttttgtcttttgatttttttgttctactatcttgtattatcccatcttgtttatcctagcttttcaggtgtgaatgtgattataactagagctcatgagttcagcaggcattttggccccttgtttaataattgtttcaggtggtgcttcactgctctttagtaactgtttatagacattgtaaaacctttaacctccgtgacaaacatttgtgtttatcatgct

SEQ ID NO: 24152 - DNA, 503 bp, Glycine max
ctcattcgttgttactaataaagtcacaccattaaaagctcataggcacaccagcttgcttttcaatccttctttcttccttctctccgtcaaaaacaatttccatctgccaaaaccaatgttttggtctcaaaactcataagttcacatttttttttcttcttttccattcactttgccaatccctcctcttcattcattttcctcttgttttaagattttgcttctgattgattgcctttgagagaaacttgtgaactcagttctttctttgaccctcttggccaagctcagatatttccataaagaaatagattttctccctgaaattctgttaggtgcttgatcttggattttcattgggtccaagatacaagatatcatcgttactatggttttgaaggtttctctcattgtggttctgcttgtgatatgctcctgtgttgtggaagccatttctaggaatcacaataatcacaatcacaacaatatcaacaaaaatg

SEQ ID NO: 24153 - DNA, 544 bp, Glycine max
gtgaagagaaacggtggagcttttcaaccgttccaaagagaggaaaaaagtggtgttgcaaaggctagtattaataatgatgcatcggcaattggtaaagcaccctcttcaccaccagtgcctgctacaagttatacagggccagtgagagtagacagcaaaaaagaggagaaaggagacgctcagagaaagcaacgcaggtgctggtcacaagaattgcacaagagattcttgcatgcacttcaacaacttgggggtgcagattctgccacgcccaaacaaatcagggaattaatgaaggttgatggcctcaccaatgatgaagtcaaaagtcatttacagaaatttcgtcttcacactagaagaagccccataatccacaacaatgcaagttcacaagcaggccctttatttcttgtggggaacatttttgttcagccaccagaatatgctgcagtagcaaccacctcaacagcatctggagaggaattgaccacagttactactactactgctccaactggaatatatgcacctgtggctg

SEQ ID NO: 24154 - DNA, 287 bp, Glycine max
cacttaacctacagcaacacaaatcgtaattgatggctgtgcaagctttctatcacttagggtcaccgctgacgtcacagtcacactttccatcaccccctctccgactcacactcactgcttccgcgcccttcaagccccgacccctcgcttccatcggaatctcgccgctcccggagaggcgccggatgccggtggccggcgccgtggaggaaagccaagagagttccgaaccggaagcggaagcgcatttggcatcggaactgaagaaggcgatggcggagagg

SEQ ID NO: 24155 - DNA, 491 bp, Glycine max
tgagcgacacaagggaattgctactggttggcaccccttaaacccccaactttttgcttcatggccgttaatggtgcgagcgtgatgcggcggtgcagcgtggctgcgaggttgttcatgacggcggacagggtggcgccggcggtgcctcaggtgtgtgggcgcggggacaagaagacgaagaaaggaaagaggttcaagggatcgtacggtaacgctaggccgaagaaagagaagatgatagagcgcatcaaggacaaggtcgaagttcccaggtccactccttggcctctccctttcaagctcatctgattccctattttattctaggctttccgctcactcatatcacatatctactctctcgttaccattttctattcaattcgattttcacttttatgctctctctttggttttatcatcaaaacaaatagtaggattttgcaattataaagttcccataaactatatgtttattcaaaagcttg

SEQ ID NO: 24156 - DNA, 299 bp, Glycine max
cttttagagggtgttgcagttgcagatagtaactgtagattctaagccgcgttaaaatgagggcagtactggtgtcggtgttgccgcttccaccttcccatcgactttccactcaaaaccacaatcccaattcgcacctccgttttccttcttcttcttctgtcacttcctccacatcctccaacagaaccatagtgtttggcgtcaatcccagcgactccaaaaaagacccttccttcttcgacgaaaatggcgccgtcaacgacatggaaggttacctcaaccacctctccctcgaa

SEQ ID NO: 24157 - DNA, 530 bp, Glycine max
aatccatttaacaatgatctcacaaatcggttatgtgcagatggggaagtttcattggacaaagctgcagaggtgtggaagaattatatttgtgaggtttcttcttcagacatttgcaagacacccggtcggatgactccaaccgtttatggccaaatggaagctgcagtgaatgtaagctatggtttatatcattatggcccattcttggttggcctacaagactgcactttcgttcggaaaatattcacagacatcagcaacaatcactgccctggtctgcagagaaacagccaattgatttatattgggttggttttggtatcagctgctgtaatgttgtctttgatcttttgggtcatctatgcaagagaacggcggcaccgcgtttatactaaacagttcattgaaggctaaatgtgttgggacttaaactacattaggtacattatggttctcaggtacatttgtgttatagattgtattccagggttgtgtctcttgttttatgtcatgtagagtttcatctt

SEQ ID NO: 24158 - DNA, 431 bp, Glycine max
tgaagggcaaaatcccaaatggaatgagaaaaaatttctataattagagtctcactctcatactcgttgtatgtatggctacgctctctctcactctcaactgttggagtaccgtggaacttgctcacaccagattttcttctaccttcacctccctcggtcgcaggagtagatatagcatatgttcttttgccaagaagtcattgaagaaatccagaagagatgtaacagaggcagctggagatctcttagatgataagtttgttcagaatgacaacttggacacttctcttaatccagctgccccgaattctaaccctttaccttccaggagtgctgtgcttcaagcttgcataataacttgtggtctcatagctgctttgggaatagtgattcggcaggtgtctcatgttgcgtcagtggaaggattg

SEQ ID NO: 24159 - DNA, 606 bp, Glycine max
ggcaaaatcccaaatggaatgagaaaaaatttctataattagagtctcactctcatactcgttgtatgtatggctacgctctctctcactctcaactgttggagtaccgtggaacttgctcacaccagattttcttctaccttcacctccctcggtcgcagtgtctcatgttgcgtcagtggaaggattgccagtctttgactgctctacagaagtatcatttggctttgaaatgtggcatcttgagttgattacaggacttgtagtattaatatcatcatgtcgctatttgctattgaagacgtggccagattttgccaagtctagcgaagcagccaatcaacaggtccttagctcacttcagcctttggattatattgttgttgcatttttgcctggtattagtgaggaactacttttccgaggagcgattcttccacttttgggaatgaactggaatagtattgggattgctgccttgatttttggtgttttacacctaggcaacggtcgaaagtattcctttgccatctgggcaacctttgttggtcttgcttatggatatgctacaattttatcctctagtgttgcggttcccatggcttc

SEQ ID NO: 24160 - DNA, 304 bp, Glycine max
acgcgtacgcggaatttggctcgaggttttacaagcgtccagacactttcagtcttggtgtatagcaacggatgtcagctaatggctttgttgggatgggtaccgggtccacaagttgggggtgtgcatcgtcctggtggcgacctatcacaaccgaggttcattcataatgagtcagggcggtttgaatgccgttttacaagtgtgaccataaaggactcaccggcaataatgttcaaaggcatggcaggtagtacattgggtatatgggctgctcatggtgagctaagagcttatttccctg

SEQ ID NO: 24161 - DNA, 280 bp, Glycine max
ggtgttggagatttcttctcggtgaaagcgtgttggagcaagagaagaaatccagttccagagattttctctatttgaggtggggagcaattttggctttatgcggtaacccttagctcccttgaaaagtttttttctgcttgcttgtgttgagtgtttaagtgggattgctgcaaaattcccttgctgatttacatcgtgttgtgatgccctaatgatccgtgcatgtgtccctttgtgggttacttgagtcatggagtcggattggggtcaagatttc

SEQ ID NO: 24162 - DNA, 719 bp, Glycine max
gtgtggctgtgaagagcggttgggatgagtatggtatagcttatggaatgccaactaagcagcttgtaattagaagactcacttgtatttctccattcagtgctgtgattgctttagggactgagatgtctggtggattcaggacgtcagagctgaggacattgtagccatcaattcagaatcaggggtcagaatcaaaactgctgtaggaagagggggttatgtcaaggacatatttgttagaagaatgaccatgaaaaccatgaaatgggcattttggatgacaggaaattatgggtctcatgctgatgacaactatgatcctaatgcacttcctgtgattcagaacattaattatcgtgatatggttgctgagaatgtcactatggcagcaaggttggagggtatatctggtgaccctttcactggaatctgcatatccaatgtaaccattcaactggcaaagaaggctaagaaagttccatggacttgcactgatattgctggaatttcaagtgatgtgactcctgctccttgtggtctgttgccagaccagggagaagagaagattggggcatgtaccttcccagaagaaagtttgcccatcgaagatatcaaggttcaaacgtgcacttacagaaggaatttatgaatgtaaaaggaatgaccaagtttaagggaacaatccaaagcaatgtaatacttcaaaaattgtattt

SEQ ID NO: 24163 - DNA, 482 bp, Glycine max
ctcgagcgtttcaatttcaatgtctctctctcagactctcacgataagtgacaacattagacgttgaattgaattttgatggcgcaacaatcgtcacctccacggcggcaaactcctccgccatcgcagtacctggaggtcaactgcagaagctccggcaagatacggcggtttgcggcgggcaccggcgcggggtttgcggtggcgctgatcaatcggaagctgaagggaacggtggtggctgcgtcgcacatagaagcagtgaaggatgggaaagaagaagaaccaatcgcttttggccccacttcgcttctttctaacttcggcgaagggtggaaactccaaactgttaccctcacggatctttcttcagaagtgggggatggacaatttcaacagatggcaatgcagacaccaggactagttccaggtgtcccaggtcctgcaagcaggatatccaatccaatcagctttgtatatct

SEQ ID NO: 24164 - DNA, 260 bp, Glycine max
aaattcgatcatagaaaatcaatttggatttcaatgcctctggctcaccgttgaattgaattttgatggctcaacaaccgtcaccatcgtcatcgcctccacggcggaaaactcctccgccaccgcagtacgtggaggtgaattgcagaagctccggcaagacacggcggtttgcggctggcaccgacgcggggtttgcggtggcgctgatcaatcggaagctgaagggaacgctggtggctgcgtcgcacatagaagca

SEQ ID NO: 24165 - DNA, 272 bp, Glycine max
agcgtaggttctggagccatttacgcagcaactaaagctgctattgatcagcttaccaaatattttgcttgtgaatgggcaaaagacaatataaggagcaacggtgttgcaccctggtataccataacttcacttgtggaacctttgcttgcgaacaaacagcttgttagtgagataatatctcgaacgccgataaagcggatggcagaaacacatgaagtttcatccttggtgactttcctttgcctgccagcagcatcctacatcactgg

SEQ ID NO: 24166 - DNA, 295 bp, Glycine max
aatttcttctcggtagctcatcgaaaatgcaagcgtttcgacgaagaatctcaacagcgacaatctccacggcgaacaattcagcgctcttccgtccattatcgccggcgaagttccggcgacgagacggcggtggtcgagccgcaagtcccggagcggcgaggacgagtggaacgaggcgtgggagacggcgtggcttccggacgacctgacgccgaagacgcgtgctccgtgggagagcgacgtcaacttcccttcctactccgcccctgccgccgaggacggcgacgaggag

SEQ ID NO: 24167 - DNA, 294 bp, Glycine max
ttttccttgaaaatccataccatgcgctagcgttatcctctttggcctccaaaggttgttatagatagaacagaacgcagaacgcagaacgcaggtttgagtttccttaactgaagcgaactaaaatgggtgcgaacgctaacgacttgtccactgagatagattgtactaagaaggtttccaattgttggggaaatggtcaaataccctttgcacttccttttctcacactccccaattccaacttcaccactctcctctcttcaccacctcaactactccacacatcattca

SEQ ID NO: 24168 - DNA, 262 bp, Glycine max
acaatgtcccgggagagttaatggctgacacactggtgtgcatgggaagaaagtgctacttctggacatttgtctggtggggaggaatgtctgtcctaggacttacttctagtgtgttgttgttcttgagaaccaaacacgcgtatgatcgcttcgagagacatcggatttcagcgcaatcagttgtgtcttagactttagcacaggtcatagaattgttgatagttcaaggtggattgtataggagctatgattttttagg

SEQ ID NO: 24169 - DNA, 424 bp, Glycine max
tggcgatgacgtttgttccttcaacatcttccagtttccgaccgacgttgattcgctgcgccaactccaacgagcggcgggcgctgtttagccgcattgctcctgtctatgataacctgaatgatttgctgagccttggccaacaccggatttggaagcgaatggcagtgtcctggactggagcgaaaatgggagaccgtgtgttggatgtgtgctgtggaagtggggacttatcctttctcttgtccgacaaagttggctctcatggcaaggtgattggtcttgatttctcgaaggatcagctattgtttgcctcatctcggcaggaatcactttcaaagaattgcttcacaaatatcgagtgggttgaaggtgatgctcttgacttgccattttctgatggttggtttgatgctatcactat

SEQ ID NO: 24170 - DNA, 354 bp, Glycine max
ctcttctcagctcttatcttaagatggcaaccttgatcggttgccaatactactatctcttgttccttctttggtttatctctagcttaaccttcttattgtttttggactatcatgttatgtttctacgtgtgaaaatactactatttggtaacattcactcctttgacgttaatagaccagtgtcttcatcgctggctcgttgctgggaccagttcagcccagtaatccctcttggcctttatgcagacttgcaaacaacacaaatgcttgctcttgcttttcattcctagttgggggcatatgataccaaaggttgataatgtactggatgttgctcgtggaaactgataa

SEQ ID NO: 24171 - DNA, 271 bp, Glycine max
cgaaggatgagctaaaggatttgaggactcaagacagaatcactgttatggaggattcagagcaaaggaagacaaggctgaaagaacatgcgcgtgcaagctgatcaagctgaagtttctggtggtgtgcaaggttctgtggtgcctggttttctctcaaatcccctgatggaagctccttcaactatgccatcacaggataaatcatatgctgctccaaggtttgactattatactgatccaatgagtgccttctcttctaacagaagga

SEQ ID NO: 24172 - DNA, 512 bp, Glycine max
gacactgaaacattcgcaaaaacaaaatcccagtatcaaaattcttctctttttttcatatttcgcaaagacatggatttcagagtgatgggtttggagtctccactgttccacacgctgcaacacatgatggacatgtcagaggacggtgcaggagacaacaagacacacaatgctccaacatggtcatacgttcgagacgcgaaagcaatggctgcaacacctgcggatgtgaaggagtatccgaattcttacgtgttcgagatcgacatgccgggtttgaaatctggggacataaaggttcaagttgaagacgacaacctgcttctgatatgtggggaacgaaagagggacgaagagaaagaaggggcgaagtatttgagaatggagagaagggttgggaagttaatgcgcaagtttgtgctgcctgagaatgccaacactgatgcaatctctgctgtgtgccaagatggtgtgcttagtgtaaccgtgcagaaattgcctccacctga

SEQ ID NO: 24173 - DNA, 359 bp, Glycine max
caaacaaacaaaccagagtaataaaaatcttcaacttttagcagttttttttttctatattgcagaagccatggatttcagggtgatgggtttggattctccattgttccacacgctgcaacacatgatggacatgtcagaggacgctgcaggggacaacaagacatacagtgctccgacacggtcatacgttcgagacgccaaagcaatggctgcaacacctgcggatgtgaaggaatatcccaactcctacgtattcgagattgacatgccagggttgaaatctggggacataaaggttcaggttgaagacgacaacgtgcttctgattagtggggagagaaagagggatgaagaaa

SEQ ID NO: 24174 - DNA, 277 bp, Glycine max
tcgcaaaagcaaataactattaccaacaaactctactttcggcaaccttcaatttttttgaaagtcatggatttcagagtgatgggtttggagcctccgttgttccacacgctgcaacacatgatggacatgtcagaggacgctgcaggggaaaacaagacgtacagtgctccgacacggtcatacgttcgagacgccaaagcaatggctgcaacacctgcggatgtgaaggaatatcccaactcctacgtgttcgagatcgacatgccgggtttga

SEQ ID NO: 24175 - DNA, 472 bp, Glycine max
tatcgagccgctcgagccgaatcggctcgagaatatattcagcaaaatctgttcggtttaaaatgggtcatactaaagcctctttagatgccaccgatgatgaaatgtttgtatggacctatacttcccctgagtttccaatgtctaaggaaaatcggctacagaaattcaagcttccagaacctgtgctttgtattgggggcttcttgcagattgagcttttgggaaggatacaaagacaagaaatggatggtttattatacatttgtgtttctcatgttcaagttctgggaggttcattgtcacctccattcaatgtggatattctgcagccctctggaatgtttgtgttgaagagggaccagctggctgaccatcaacctgtagtgacatctggaaatgaatctcaagaaatttcggccgagcaaagagaagtgagagatttccagcatattgtgactatattgagtgg

SEQ ID NO: 24176 - DNA, 869 bp, Glycine max
acgagatttatctccccccaaacgccactgttttcaccttcaccccccctctctcactctctctctctctcttcttcacaccaattcacaaatcaccaaaagcaccactgctattgagagagaggattcagaaagacaacatcaaaatcaatcacaccaagatgctgctcggaaagagacctcgtcctccaatgaagagaaccacaagcatgtccgaaatgaccttggatctgaacaccgccgccgccgccgatgccgccgccaaccaacagagatcaggtgttggtcccggtgctgcagcagatcagactacgaggatgttggcaacacccaaaatcctcagaagacattcttcggatttcggagacacgcctcccttccttcgcgcctgctccctctgcaaacgttgtctggtgcccggtcacgacatctacatgtacaggggtgataatgctttttgcagcctggagtgccgccaacagcagatgaaccaggacgagagaaaagagaagtttgtcatggcgtcgaagaaaaaggtcgtggctactccaccgtctgggtctcaagtcgccgtcgcccccgccaccaagggtgaaacaaccgtggtggcgttgtagatgtgaaacccaaaccaaacatgtcaaaaacatgtttatatagctccccctttgtctctctttttgtttttttttttttcgggcgtcttttttttttttaattttttttaccgtggcgcccttttggataatgggagtgcgggttgttttccttgctttcatgggcaaactaggcaagtgttatttttggaacttggaagtaccttgtagcaatcccccttgggatttccaatacatagacaattaccatgg

SEQ ID NO: 24177 - DNA, 416 bp, Glycine max
aataattgataaattaatatgattatttaaaggtgtgaatgagttaaagcgattttatttataggaacaaatgtagtatttataaatagagtttaaaggtcacgaagtaatttgtttggatacaggccgatatatattgaacttacttcattaaggggattgctcttgtagtatcacaattgttgttgacactatccaggtgggtgtcattttgttttatcctataattgttccttggaaatcgcagagggagttagatctatgaccttcaagccgcaatggtggaggatgggatcacacatgaggtggtggataaaggtggggtcacacgcgatggtggtagacgaggttcgggaactgagaaatttacggggaaggggaagggaaaggggtgtaaggatttggtgagtagacaa

SEQ ID NO: 24178 - DNA, 260 bp, Glycine max
ctcgagccgctcgagccgaggaaacgttgtggtgtgatgcgagagagagatggccggtacctaccataaccaccagcggcacgtgctacagctggtgatgtcgtgccggaaaatcaccgcccaggtcacaaacaccaccacatcctccatcatagccatggcttcatcatcggagcaggaattcgtggctcactaccgcgctcagcttaatcgcttccccagatcgcaccgcttctgggacgctaaagtggcctctcgcg

SEQ ID NO: 24179 - DNA, 582 bp, Glycine max
agtgaagataccctagcaaggcctccaacgtgcagatccatcaaaggtgtctttcacacgaatgtgtatcagtctgaactagtgtgcttgtctatgcttaatgaagatagtggatggagaccagctataacagtgaagcaaattcttgtgggcatccaggacctgcttgatcaaccaaatcctgctgaccctgcccagactgagggttatcatctattcatccaggatgcggctgagtacaagagaagggtccgacagcagtcaaagcaatatccacctcttgtctagtgttatatctgctcactttaggaactgttatagtatgttagttgttgtcagttatttcttgttctgtgttaaaactgttatgtgattgttggctgccataatatgcagactccatggttttaacaatttctgcttactctcaggtctggataacgtgttaatatataacaatgtgaaagtccaccaataatacttgttggcaacacttgctatgcctgatgttcgctggtacatttctatatgaatgataaatttactgtgatggattatatgatattatgactccttccctgg

SEQ ID NO: 24180 - DNA, 444 bp, Glycine max
taatcaattcatatggacatatacatcacctgaatttccaatgcttcaagaaaaccgcttgcaaaaattcaagctacctgaacctgttctgtgcattggaggtgtactgctagttgagctgttgggtagagttcaaaagcaagaaatggatgaattattctatatatgcatctctcatgttcaagttatgggacgactgctttttccggaatttgatgtcaaaattcatcattggtcaggaaagtgtaccttgaaatactgccctcaaacagattgttatatgtcttctccaacatcatcaccgagaagcaactcgagtaatccgtcacgcctgcggaccataacctcaagcataatgcagaggggtgtgagacgttgggagcaatttctcttgggtgcaccgcttggtactggtcctgttgtagttgataatgaagatcaatg

SEQ ID NO: 24181 - DNA, 377 bp, Glycine max
atcaccaagcacaactacctcatcctcgacgtcgacgacattccccgcatcgtcgccgaagccttcttcgtcgccacctccggccgccccggcccggtcctcatcgacatccccaaagacgtccaacagcaactcgccgtgcctaattgggacgagcccatcaacctccccgggtacctcgccaggctgcccaggccccccgccgaggcccaattggagcacattgtcagactcatcatggaggcccaaaagcccgtctctctacgtcggcggtggcagtttgaattccagtgctgaattgaggcgctttgttgaactcactggtattcccggtgctagcactttaatgggtcttggaacttttcctattggtgatg

SEQ ID NO: 24182 - DNA, 494 bp, Glycine max
tctataatttacagtgaatatacggctggaaatgaattatgtgccagagaagtttaagctttcaccagctttgacagaagttcttggtattgaggttgatacccgcccgagaattgttgctgcgatctggcactatgtgaaggctaggaaattgcaaaacccaaatgacccttcttactttcactgtgatccgcctcttcagaaagtatttggagaagaaaatatgaagtttacaatggtttctcagaaaatatcatctcatttgttccccccacagcctatacttttggagcataagattaagctctctggaaacagtcctgctggtactgcttgttatgatgtgatggtttgatgttccttttcctattcagagggagttgtctgctttattggctaacgtggaaaagaacaaagatattgagacatgtgatgaagcaatatgtggaatcattagaaaaatccacgagcaccgtaggagacgggcattcttt

SEQ ID NO: 24183 - DNA, 817 bp, Glycine max
taacttcaggaaaacaacactgaagcttgctcctattgcatacttcagtatgtaccgtggatcaatatctcatttaccgactggctacatgtggagtcctcatgttgttccaaaaccaagtgactggggccctttagttgatgttgttggttattgtttcttgagccttgcatcaaagtatcaaccccaggaagattttgttcgatggattcaaaaaggaccacaacctttatattttgggtttgggagcatgcctcttgatgatcctaaaagaactactgatgttatagtggaggcactaaaggatacgggacaacggggaattattgacaggggctggggaaatctagggaacttggcagaagttcctgacaatgttttcgtgctagaggaatgccctcatgactggctgtttccccaatgttctgccttggtgcatcatggtggtgctggaacaacggctacaggactaaaggctgggtgtccaacaaccattgttccattctttggagatcagttcttttggggagatagaataaatcagaaagggctaggaccagctccaattccaatatctcagctcagtcttgagaatttatcaaattccattaaattcatgctccagccagaggtaaaatcacgggcaatggaagtggcaaagttgatcgagaatgaagatggtgttactgctgcagttgattcatttcaccgtcatctacctcctgaactaccactaccaattccatctgcagtggtggatgaccatgcaaatcctttgcagtggttttttctccaactagcaaagttttgcacttta

SEQ ID NO: 24184 - DNA, 562 bp, Glycine max
gacacattggttggttcctccttcctccaaagaaaaaactagagtgaatctcaaaacatgtcaattgtcttctctgctgctgcaaccctttcccctcggtctcggttattattccctccacttagtttttctcacacttaccctacgaaatttcatcgaaatgggtggcatccaagtctctccaaatcgaggacgcagccccttattacaaactctttgctttctgataagtttccaacggtgggttcgctgtcaacgggacccattccatccactcacctcattgaagtggttaaaactgctgcacagactggtgctcaggttgtgatggaagctgttaataagcctcggaatattacatataaaggattaactgacttagtgactgagacagataaaatgagtgaagctgccatattagaagtggtgaaaaagaattttgaagatcatcttattcttggggaagaaggaggagttataggagatgcagcatctgattatctctggtgcattgatcctctagatggaacaacaaactttgctcatggttatcccagctttg

SEQ ID NO: 24185 - DNA, 544 bp, Glycine max
ggctggctcagtggcatcctttgctggtacccctgataggagcacctcacagggttcatattctgtgataagtcatgaagataggcccattttaggggcattgacattggaagagatcaaacagttctcggctacttcgtctccacggaagtcaccaagtaggagtccagatgagatgcctattcattggccctgttggaacctactggaatgctgcaggctctgctgaggatcttggctcagtctcttcctttaaaggaattccgaactcaacaagcaagtacagagaggtaaagatgaggtgaacacttttaagagatactattactcattagttgagggtgaatgattctgatttggacatgcactgctgtgtggtattgcaggataagagagtgaattggcactcaaccccttttgagacaagattagagaaggctttgaatagaggtgcttcttctgcttatgttcctcgtgtattttagaagtttgcaatactgtgttgattcaaggagagtgtgaattgtgcagggaatgtactcgt

SEQ ID NO: 24186 - DNA, 309 bp, Glycine max
aggggagcgagtaattgttgtctctcatggaggattcatcagagccctttacaagtgggcatgcccaaatggtaagcctgggaaggtactcaatacatgtgttagtgtttttcacttgtacggtgaggacaaatggaccttaaaagtgtggggtgatgtcagtcatctgaacgaaactggatttctagagtctggttttggaggtgatagaaattctggttaggccattgtttcctatttaaggtaataaaggtttgattgtttcccatccgaagttaataaaagattagagaaagagcagaaaatgga

SEQ ID NO: 24187 - DNA, 175 bp, Glycine max
gaggtgggtggagcaacagaggagggcttcctaaagcacaatgggccctgggaatcagtcctctgtcttcctaccagaccctgcccttgaaggcctcttataaactctcagactgtgagctatgccatcactgaggatgaaaaaccaggaggtgactagttctagatcgcgagct

SEQ ID NO: 24188 - DNA, 493 bp, Glycine max
ctggttgagtgcccacttcatagacgcgcaataccatataaagaaaccaatactggtggcaggaatgtgggatatcatttaagggttcgaggtcctacgagagggatgaggtgttcaattcagtgtattacaaaatatacgcttctgcaaagagaggaggtgcagcgagtggagcactgttctggcagcttctaacggagggcatggagtctttccaagacggttacggaatcattcttgggcagagttcctctacggccaatctcattgctcgccagtcccgcaagctgtacctgattcggaagatcttcgcaagggtcgcgaacatgcggcgatggcaaagggccagagccagaggattttctggctccggaggtggaaacggaggcagatacattgacaactgagaacatgtttggtttgcagtttcaggattttatctgttaaatttacattgaagcgcgcgtcacagtatttttaactgaaaagcttg

SEQ ID NO: 24189 - DNA, 164 bp, Glycine max
gtattttcttgtgtgatcagatctagtgtggtggatgatagaagttgaacttgctttattgctatgtgttaaaatattttgtttgcattaaaatggcctattgaaatgcttttctgttcctataataaaataacctgatgaaaaagtaaaaaaaaaaaaaagaa

SEQ ID NO: 24190 - DNA, 441 bp, Glycine max
caaaatatcctcacatgattgtattcatcagctcaacataacactttgaaatagcatcacacagatcagatgtcactcctccaactccaactcacttctcatgcattacgctctgtctcttcccataacttcagacccctctattcatctaagcgtgtcagctatgtaagaaccaaaattagagctgttggcacagtccctgatgagaaggactctgattcagacatcaccactgaccccgatgagccaccttatgtcggcctcgtgtttgttagttctgtattgctaccagatggaacaccagatatgcactttcgttctgcttgtggaggccagaggcttaggaagataatgctcgattccaatgttgaactctatggaccctatgccagacctttgttaaattgtggagggggtggaacttgtggcacatgtatgggt

SEQ ID NO: 24191 - DNA, 482 bp, Glycine max
ccggcggagaaaacggtcgtcgtggagttgaagaacgcggaattgcccaaaccgaaacagggtttgatgttgaaattgaattacgacgacgttcggaacgcttggtctgaccgcggaacaccgttctccgacgacagtcccctagccgacgtgccgggaaatgacgtcactgcgcggctgtcgcaaattgctttgttgtgggacaatggaggagtgagagaagctagcgtgctgcgctacaaggagaagcggcgaacgcgcctcttctcgaagaagatcaggtaccaggtcaggaaagtcaacgcagatcgacggcccagaatgaaggtacgagtcagttcacagttgagttgaggacacttgaagaaacttgatttatgtcagattaaaaagaaaaagaaaaagaaaaaggcaaatctgctttttgatttggtgatgataattggataatgaggtgggtgcgtgcgtcacagttttttttt

SEQ ID NO: 24192 - DNA, 785 bp, Glycine max
acgtcccggaaaatgacgtcactgcgcggttgtcgcaaattgatttgttgtgggacaatggaggagtgagagaagctagcgtgctgcgctacaaggagaagcggcgaacgcgcctcttctcgaaaaagatcaggtaccaggtgaggaaagtcaacgcagatcgacggcccagaatgaagggacgatttgttaggaggctcaattctagctcaaatgcacacagatgatagtatctaggagcaggaaagcacatgcttttttgggactcttcttttaagaataaaaaataaaaataagattaaaaggaaaagagagtttatctatatttttgtaacctttactttttgggttcttcttccttccttcactagaagatatgggggaaattgctggatgagataagcgacggaactagtccaagcaaattgcctaagactctattgcacttgattctcttcttcgcgttatggcttcagggagattcttcgtccccatgtggtctatacattctcgtaagcaaagtaatactactaccaaataaaattattaataacgcacgcgttatttcttcccttccactttaattaggaacccgaagtcttcgtgttaatgagttctaagttgaaggcaaaggatagccatggctctgacatccgttatcaagaggacaaaaaaaactagcccacacaaaagttaacggtgattgttgggtattgaactcacccgactttacagatttcttaatgtgaacgacatttatataaaaaaaaaaaaaaaagggcggc

SEQ ID NO: 24193 - DNA, 433 bp, Glycine max
gaaaaggcagaaaagtgcttaagaaaggttgagggtagaattaaaggtcgagatagaataccttttcattatctcctgagtttatatggaagtgttggaaagaaagacgaagtctatcgtgtgtggaatacttacaaatcaatttttccaagaataccaaacttgggataccatgctattatttcttctctggttaaattggatgatatcgagggtgcagaaaaactatatgaggaatggatttcagtaaagtcaagttatgatcctagaattggaaaccttctcatgggctggtatgttaagaaagatgacacagataaagctttgagtttctttgagcagatcaaatgatggctgcattccaaattcaaatacatgggagattctttctgagggccacattgcagataagaggatttctgaagccctgtcc

SEQ ID NO: 24194 - DNA, 238 bp, Glycine max
cattatctcaccttccggtttttctcagcaaggaagcatgggctagtggacgctgtagtgaggaacaattcgtttgataaaactgctgttgttgcccttcctggtgggattggtactttagatgaggtgtttgagatattggcattgatcagctagaacggattggatcaaagtttcctgttcccttcctgtcgatgaactatgattcattttattcaaagctgcttgaatttttaaa

SEQ ID NO: 24195 - DNA, 622 bp, Glycine max
tgcaaagctagtcgaaaggaatgtgcttctttcatggttggtctgccagtttccgtcagatatgagtacctcatggctgaaacaatattctctcagctgctgatgctaccacaaccacctttcaaaccagtatattacacactggttattattgacctttgtaaggctcttcctggagcttttcctgcagttgtagctggagcagttcgtactctctttgagaggattgctgatttggatatggagtgtcggacacgtctgatcctttggttctcacaccatttatcaaacctccagttcatctggccttggggagagtgggcctatgtcctagacctcccaaggtgggcccctcaacgcgtctttgttcaagaggttttggagagggaagttcgcttgtcatattgggacaaagttaagcagagtattgaaaatgcacctggtttagaagaattgcttcctccaaagggtgggccgaactttagttttggtgcagaagatgataaagaaagcaatgaacatgtactgtctggaagctcaacaacatggttaaaggaaaggcacctgtccgtgaaataatctcatggattgatgaaagtgtgcttccaaataatggtctaga

SEQ ID NO: 24196 - DNA, 255 bp, Glycine max
ggagactagcaggtgacactgtgataagttcagcactgtctggctgtaccggattgctctatcatggaccgcagcttctagacgattcttggtgctaggtatctatttcatcatgtatgggtttacagagacaggtgacttggggtttcaaaattgcaaatgctagttcatattctggagtacattgaacacttccatattatgagaaatgagatcagcaacttgtaacctgggtatgtatggtctttagtgtaa

SEQ ID NO: 24197 - DNA, 583 bp, Glycine max
tataaacaccacaatcgttcagggaagatatgccttattttatcaattctgtccaacaggaatgaatcagaggggaagaatccctgttggacagaattgataaaataaggcatataaacaccacaatcgttcagggaagatatgatgtttgctgtcctatgatgtcagcctgggatcttcataaagcttggccagccgcagattttagggtggttcctgatgcagggcattcagccaatgaaccaggcataactgctgaactagtggctgcaaatgagaaattgaaaaacataatcaagaacaaaggggactgaagtgagtggacaggcaaacaggaacaaaggctgcagtttggagaccgactaatcaaatggtgcaacattcatctacaagcaaaatactgcaatgtccatgtatttaaaaacactagcataccgtgaactcaaagattgtcttcatcattgtcttaataaaaacactagaataatggaaatgatcattgttgcacaaaaatcatgaatgggatgattttgctgtttctgtcaacttccatggttatccaataaaaggtttcccagtatgt

SEQ ID NO: 24198 - DNA, 442 bp, Glycine max
acgagcaagaggaaagtgaagggagacctatacaggccagccaatttacacaaggagataccgttggtatcaatcggcgatcttctactttcactgatggtagctttgttgagatccctgaattcttaaagaagaaggggcgctcacgttatccgagagcttaatactcttctccccaactccttaatccctccttgatttctttacaaagtaatttttagggatacaaatctcatcagtctaggtattagatcccgttttgccccttttttttttcatttttaggttcgcattgggcatactgttgttcaagaaagcaaagtactttcaaaaccgttgtttactgagtcgaggcttgttggcaggtttttaataagtttattagcttgtattttttgtacagggagtgtatcagtaatggtcagggcttgttatagataaa

SEQ ID NO: 24199 - DNA, 411 bp, Glycine max
caacatctttgtctaacaaaaaaaatggcatctgctctaccatatgtgggtttccatgcccgcacttcatctggcagaatgaacaaattttccaatgtcaaattgctaccagtgtcaagcacaaggaatagaactttctgctgcagtgtaaaggctatggcaggaggtgaagcgagtttgcagaagtcaaatcagcaccagcagcaagtgcagccaaagatgaaggtgccacaaggttcacctaaagtgctgctgaaccagtttcctgtagcaaggactgtgcagcaaatgatggatacaatggagaggatgggggaggatctcttggtttatggtagaacttcacctgtgatagttgcgggagatgatgaatacagtaaggggaagattccttgggcaataaaggaaggc

SEQ ID NO: 24200 - DNA, 264 bp, Glycine max
ggctcgagccaaaaaagaatctgccaattagatgaatcaaacatcagcttaggcttttgtcatccgtggccatgtattattattctttatgtcaaattcgttgtgaaaaatccgcatctgccgatgcatgttatgatgagagtcggagtatgagcactgctagtctataacttatcttagagtatttgtagtattctttaccgtattacattacattacattacacttacattggcatttcagagaaagtactcttcgtgatgt

SEQ ID NO: 24201 - DNA, 281 bp, Glycine max
aaagaacaatcagcttaggcttttgtcatccgtggccatgtattattattctttatgtcatattcgttgtgaaaaatccgcatctgccgatgcatgttatgagagtaggagtatgaggcactgctagtctataacttatcttttagagtatttgtagtattctttaccatattacattacaaaaagtgaatcaaaaaaaaaggggggccccccctaaaaggaccccgtgccccggggattaatttcggggcgggaccctggggggtaaccatttcccccaa

SEQ ID NO: 24202 - DNA, 238 bp, Glycine max
gagggctcctacgttattaagtggcaggtgagcctggtgagggcagaagcagatcttcggccgctttgatgttaagtcagttataaggaacatctacacactcttctctctgaagtgagattccaatagcaggtgataatcaggaaatcatggatttgtatgacccaactactcccctgccaccatggttctctgaggaagacctggcaaccgatgcatcactatacgaaaaatctgg

SEQ ID NO: 24203 - DNA, 1002 bp, Glycine max
  unsure (1)..(1002): unsure at all n locations
caaatacaaagatgacagtcacactgactcagtacttggtcttgcttggaacaaggagtacaggaatatactagcaagtgccggtgctgacaagcgagtgaagatttgggatgtggttgccgggaagtgtgatattacaatggagcatcactcggacaaggttcaagcagttgcttggaatcatcatgcaccacaggttcttcttagtggttcatttgatcatactgttgtcttgaaggatggaaggatgccatcacattctggctacaagtggtcagtcacagctgatgtagagagcttggcatgggatccgcacactgagcactcgtttgtggtgagtcttgaagatggtattgtcaagggttttgatatacggactgccaactctgattcctcgtcagatccgagttctacttttacacttcatgcacatgacaaagctgttacctcagtatcctataatccatcggcacccaatctccttgccactggatccatggacaaaacggtaaaactttgggatttgtcgaacaaccaaccctcttgtgtagcatctaaatctccgagagcaggggttatctttaaaatttctttctcagaggacaaccccttcttgttggctataggaggctcaaagggaaaattgcaagtttgggataccttatctgatgctggcatttctcgaagatatgggaattacaacaagaatagatcgcaatctgggtcttgaagttgtagtcttccttcccgtactgctcaagttgtgttgcataaatcaaaattttgggattccctgcaaaaatatgttcttgatttattctttttttgcatcctaataacctttatttgaaatagcataaatttgaattggttgaacgtaaattgttgtgattccaatttccaaccctttatagtttagtttggacatcttttgggggggcaaggcccaatgaaaacttcnnnnnnnnnnnnnnnnnnnnnnnnnnnnnnnnnnnnnnnnnn

SEQ ID NO: 24204 - DNA, 303 bp, Glycine max
cggctcgagtgcatgaaaatcgaaaaattccccaaacttcacaccgtacaaaaaccctagcccaatttcacccttccccaagttcaattccctcaaatcccttccctaataatcgccattttgcttcgtgcaatctctctgcgatcccaatagccatggacgacatggaagacgacgcaaggtaccctcccaagtccttctccctcaaccgccagaacccctcccaccgccacagacaccccatacgcgccgtcccctaccaccgtccaatgcacacgcgctaccatgaactcgacgacgatg

SEQ ID NO: 24205 - DNA, 346 bp, Glycine max
gtccaaggttggtaccgtgtgtttcggagtagctgcaagccaaggagcacttctccttgctggaggagagaagggaatgcgctacgcgatgccaaatgctcgcataatgatacatcaaccacagagtggatgtgggggtcatgttgaggatgtcagacgccaagtgaatgaagctgttcaatctcgccataaaattgacaagatgtatagtgtttttactggacagccattagagaaggtgcaacagtacacagagagggaccgttttctgtctgtttctgaggctttggagtttggtcttattgatggtgtcctggaaactgagtattgaatacagtttatttgc

SEQ ID NO: 24206 - DNA, 1247 bp, Glycine max
actcgagccgaatcggctcggcattcacttcacttgtggttcctcactctctctctctccacaccacactgaggagggagacagtggaaggaaggaacactcaaatcactgaaccagccatggctaccttctccaaggaacgcgagaactttgtatacgttgccaagttagctgaacaagctgaacgctatgatgaaatggtggaggccatgaagaaggtggcgaagctggacgttgagttgagtgtggaagagaggaacctgttctctgttgggtacaagaatgtggtggggtcacggagagcttcatggagaatcttgtcatcgatagagcagaaagaggattccaaagggaatgagttgcatgttaagcatatcagggattacaggaacaaggtggagttggagctgtccaacatttgcagtgacattatgataattttagatgagcatcttattccatccactaatattgcggagtccacagtgttttattataagatgaaaggagactattaccggtatttggcagaatttaaagctggcaatgaaaagaaagaggtggcagatcagtcacttaaagcatatcagacagcttctaccactgctgagagtgaactacaacctacacatcctattcgtttgggtctggctctaaatttctcagtgttttattatgagatattgaattcacctgaaagggcctgccatcttgcaaagcaagcctttgatgatgctgtctcggagctggataccctgaatgaggattcttacaaggacagtaccttgattatgcagctgttgagggataaccttactttatggacttctgatatccccgaagagggtgaggacctaaaaatggaaagcgcagccagggttgatcaaggagaagatgagttaggccgctaacccatcattctgtcatatgtctaagatttgatgcattaatttttctcaatcatattttctccattgtagtgaagcctctatctgaatggtgcactgcacctcatcaactttgagtcattcttatttttgagtgatggcctatttgagtcatctacttcatttttatgctattgttgagtagttttattcatgtgtttgtgacacaaaaacaccattggtttgcaatgcataatttccctatttgtatcctgttatggttaagatctgttcttgggttggcctttcaagaactgatcccatgtgagcccctgtaatattgcaatatatagacttttg

SEQ ID NO: 24207 - DNA, 787 bp, Glycine max
gtgcccggaatgggcgtgccgaggggcattccgaggggagccgcgaagggcggaggcgctgccaccggaggagcggaggtgaaggcggcggaaaagacggcgttcgatgtgaagctcgagggttttgacgcggcggcgaagatcaaggtgatcaaggaggtgaggacgtttacgagcttggggttgaaggaggccaaggatttggtggagaaggtccccgcggtgttgaagaaaggggtcacgaaagaagaggctgagagtatcattgccaagatgaaggaggttggcgctaaggtttccatggaataataaggataagacaggatgacaaacaaaacatggcgtagagttttttcttctttgatcaagtgtagcagcttattcctcacactcaagttatctgcaggtgatggaactcaaggaatgccttgccataattcaaagctgttaacctttcttgtatttgaaaactttgctgagcacactatgaaattattgttatttctcccttacataaggctctttttgccttgaattttcttgatcatttcttaaccaatgttgtaaaattggtttttgatggtggaatcatttttgaactaacatacacatgttactagctgctaaagttctagatccaattggttgtccactgaactactatgaccacacaatcatgtgccatggacaactagaattgaagttaagccccaaatactgctcctcactttatcttctcttggatgtgtacagtttgtgttattgacttcattttcttaaaaaaaaa

SEQ ID NO: 24208 - DNA, 300 bp, Glycine max
tatggaatccttcttcatgataacaccatttcaaaaccacacattccaccagcatgtttccttcacgggaacggatttgtcatggatggtggagtttctgaagggcatggtgaagcccgtggctgccaccgccgtcgtgcttctggccgtgctcttgtcctttatgcagaaactgggactcgagggtgagatggtgtatgccatgttcagagcatttcttcagctttctattattgggtttgtgtcgcagttcatattcaaccaaggcaacgctggctggatcattctagcttacctttt

SEQ ID NO: 24209 - DNA, 261 bp, Glycine max
ctctctctctctctgcaacgctccgaatggccaacaacaccgaagagcaacaacacaactcaattcgatcatcgatcatggagtggaagcagatgcgcgcactccaccaaagcgcggaaacccccacccacaagctcctcctgaagcagtggctcaaagaagaagaactcatcaacaaccgcatagcgtttacggagacccaaatagattacaacccgctaagagatcaccacactctacatcttcttcttcctctgccac

SEQ ID NO: 24210 - DNA, 414 bp, Glycine max
aggctgcatgtttataggctcctggttagcatccacaaaggtgttgaacaaatatctgagaaaattctggcaactgatagaattagaagagaagtagctgaatatgaaacaagactggcagccacggcttccagaagcttagatgtgagcgaactaaaagctaatcttgatgccattattagagaaaaagaatagcctgaataacatttgcagttaagtgaatttcaggaactcatttgaaactggcaaccccaatttccagaagcttagatgttatcaatctaagctgatcttgagattggtattggggaaaatgaatactcccctcaatcatttaaacaataagaaacaaataaataatgtgttcctatatggaactttgcaacacaaaaacatgaagaatggtaattgact

SEQ ID NO: 24211 - DNA, 333 bp, Glycine max
ggagccgaagtggcagttcaggtggcaaaacagaacctctcttatcttctttgtaagaactacgacgaagtaacaacaatggtggcgggaactgcaaccttgaagcttagcctctccgctttttcttctccaatgtcaaatttcagcgcttcctcttcattcccctctcgtctcccaatgcgaaccccttcttcttctaaacctcgatttctcaggatttacgccttgaccagcaacgacatcaaggtcggcaccaacctcgaagtcgatggtgctccttggcgtgtgttagagtttcttcacgttaagccgggtaaaggcgcggcgtttgtc

SEQ ID NO: 24212 - DNA, 271 bp, Glycine max
ctccagcttctgacccaagtgggggcttcagagtgatagaacagctttcgggcttgctgggttggactgtagctgccatctgcgggcctgcccgctccaagttgggagttgagcctcgagtcttgagcgaaggcccaagtttcgtggctcctagacttgagggcacagcgtgaggctggtttaacagagcagcgaacacctcaggctcccaacagtggagggataacaggttgctgcaacagcagtccacaatggcctggtgagcccattt

SEQ ID NO: 24213 - DNA, 251 bp, Glycine max
tgaggacactgattagctaataaagttaaatggtcacgagcttgttaataaagaagaggcaagaactttcatcttccatctctgaagtgtacttgccagtccactaccctgcctccctagagagaatttcggcggtcttaattgggaaaataagtccccacctcccgcaggagggctctgttattccaacaagaggggaagttcttcaagagctaatgatcttctcctgtacttctctcttcattcgccag

SEQ ID NO: 24214 - DNA, 269 bp, Glycine max
ccacgtgcccctgcagcttcaacccttggatgatttatctcgtgtcaccaaatcaagctttgttacctcccactatttggatgaacctgatgcaggaccgggtctcaattcctagctgccaccctcactttttctgaagccccaacaaacatcaaattatttatcaatcatatgctcacatatccatcttccactgtttggttttgcctcagaaccttgaggacaaggttctatgtgaacttggcggcaatgttaggatgggcctaggg

SEQ ID NO: 24215 - DNA, 251 bp, Glycine max
  unsure (1)..(251): unsure at all n locations
cctgcccagaaatgaagcccggcccacacccgacaccagccctgctgcttcctaacttattgcctgggcagtgcccaccatgcacccctgatgttcgccgtctggcgagcccttagccttgctgtagagacttccgtcacccttggtagagtttattttttcgatggctaagatactgctgatgctgaaataaactagggttttggcctgccnnnnnnnnnnnnnnnnnnnnnnnnnnnnnnnnnnnnnnn

SEQ ID NO: 24216 - DNA, 511 bp, Glycine max
gggtagctgcccagagtgtctggtaccacttgtacaatcaagtctcatacatgtctcttgatcagatttctcccttaacattcagcattggaaacacaatgaagaggatttcggtcattgtttcttccatccttatctttcacacgcctgttcagcccatcaatgctcttggtgctgccattgcaattcttggcaccttcctctattcacaggctaaacagtaaggtggttattttgaagcttttatgtaacacaaggaaacgatgactcatggttggagctcaaagtgtcactgatgaggactatggcattaattagctagtatgttttgttgtcaataggaatttaagtttatttcttttgggccatagcagcagcatttctaatcacgtttcgatctgtgtaaattagctttagaaggatggaatgcactaaactgtacttaatcttgaggctgaaagtctatgaagaatttcttgaaaaataatcatgtagagcagtacttattatt

SEQ ID NO: 24217 - DNA, 245 bp, Glycine max
cagcagtcataagaaaacagctcagcatttgtgtttggaaacagatttttgctatccttgtttacttgtactatagtttgaattatatttacttagcattcacaaatttttcgaaaaaggctgtaatttagataaagggtgaagatcaagttgttagaatttctcaatgtatcatactaagttataaattcgaagtgcaaggaaaaaaattttcgagggcgctaagcaaaaaaaaaggggggggc

SEQ ID NO: 24218 - DNA, 472 bp, Glycine max
cggcgcgcggggagagaagggccccaacgagtctgaagattccgagtacgcggcgccccaagtgcatacctaatccgtcatcccccacttcaaattccacttataccctcatcgtttcctgtccctgtaaacccatcatcattccctttcaacatcacattattcccaacgagttgacaccgattccactcacccaaccatgggccgattcaggcgatttgagctcatcgaacagccacctttcttcccctcatgctactcttctcccttcctcgtccaagactcactttctctcgacctcgacctgttgccacttcccagccccttcgacgctttcgcagatctgctccacgcgccgtcgttggcttaccggcgcctggagaggcagctcgataatgagttgcgcttgcagagcctctctgaccgcgtcgccgagctggaatcgcggttccaccgtgtgctcggcggagat

SEQ ID NO: 24219 - DNA, 276 bp, Glycine max
aggtgacctgcacaagctttttgttgatgtagctgggaatttgcttggtatcaataaagttgacactaatatggaacaagacatggctgctgaagactttgcgttttatcaagaggtcatacctggctactacttcacgcttggaatgaagaatgcttcgtcatttgaaccggttgcgccattacactcaccctatcttgtaatcaatgaagatggacttccttatggggctgcacttcatgcatcattggccactgggtatcttacaaaatatca

SEQ ID NO: 24220 - DNA, 276 bp, Glycine max
aggtgcctctattttcccctgatttgttgccattggcatgaaggaggatggtttcgcaatactgatgcagtcttccaaattgtaaaatattaatatggggtagatttaatgaacttgactaatgtaagctagagttctctccttctcatggaaggacaaattgagatacggcacttcatttgatagagtcagagatactcaaaatcctccattcctgagtgtaatttaacttgtggtttcgtttcctgctgcatcgcatgactatttcactggctt

SEQ ID NO: 24221 - DNA, 688 bp, Glycine max
caattccgggcccacaagagtcctatttcagctttatgctttgatcctagtgggaccatattgctgactgcttctgttcagggacacaacattaatgtttttaagataatccctggatatgagagagtgtcagcatctgatgctgacccttctgatgttcatctctacaggctgcaacgtggcttgacaaatgcagttactcaagagatcagtcctagtgctgatagcaggcggattatgataagttcctcaaggggcactagccatctatgggctataaatcctcaaggaggacctgtaaatattctgtcatgtgacaatagtttaacagaaaaaaatggtggattggatgtcatgaataatcaagcagttcgttggcctcatagttcagccttagaaatttgtaaaccacagagcctctgtgctgctggtcctcctatcacactttctgtcgttagcagaattaggaatggatctaatggctggagaagcacggtaactggtgctgctgcagctgcaacaaataggatgagttccctttctggggctattgcttcatctttccgtaactttgaaggcaacagtaccttgtatgttaatgggaactattccaaggaaaagcgtcatctgttggtattttcaccaccggttctatgatacaatatgctctgcagacaattaacagtca

SEQ ID NO: 24222 - DNA, 246 bp, Glycine max
ctcatcctcaaataagccacatgtacccgtctggcagagctgtgtaaagtattagaatctgatgctctagagagatcctagttgcctttgtgtatatttactgcctgcttgtgtgtttctatgtgtgggttttccctgtatcttgtagaaatgttggggtgttttcctctgccatatggctcgtggcctgcgagcgaactatttcaagtgtagtttaccttcatttttgatgaggtgatttaaatt

SEQ ID NO: 24223 - DNA, 545 bp, Glycine max
ctagatcgcaagcaaagaacaattttacgttacgagaaagcagcggtgacatgtctggcgccaaggacaagaggaagcaaggcgaagacgacgccgtttcggggagccagcagcagaagaaggcgcgtgaggatgaggctgtgacggatgaggaggtggaggagttctgcgccattctccgccgaataaacacggcggtgaagtacttcaagagccacggcgaggacgtggcagcgttggagaaagatatcatgcaggatgtgaaggaggcaaccagaatgagtaaagagggtcacgtccaaggcaacttgagtttggatctaaatgccactccccaaaacccgacctgatctataaataaataaaatgcatccgcaactccttgagttttagactttgtgttcaattattcttattttaaaagcatatcccttccccaaggagagatcatgctaatttgttttcaattcctttgtggaagataagtgtaatgataattggatgataaaaatatttaataacatatacttaatgtttttttttac

SEQ ID NO: 24224 - DNA, 530 bp, Glycine max
cagctgtttttccaagaattaatgtgagggacccatataaacgacttggaataagcaaggaagcttctgaagatgaaattcaaggagcaaggaacttcctgattcaaaaatatgcaggacacaagccaagtgtggatgctattgagtcagcacatgacaaaataatcatgcaaaagttctatgaacggaaaaacccaaaaattgacattaagaaaaaaatgagggaagtcaatcaatccaaatttgtgcaggctgccagaggcagcctgcagatttcaaactccatctacaaaattcattataaaaacttcaatagcattcttggtacttggagttttgactgtcctctttccaactgaagaagggccaactcttcaggtagcaatatctctgatcgccacaatatattttatccatgaacggctgaagagcaacatacgagcctcgctatatggggttggagcatttggtatttcgtggctgctgggaaccttcttgatggtgtcagtaattcctcctattaccatact

SEQ ID NO: 24225 - DNA, 272 bp, Glycine max
gaaaatgttggagttagaaggccacccagtgatgatgttataatccagggcgttgctaatccaaatgcgtttaggcaggctgttatgatgcgtctatcgaacatgagaaatgagatttggtcaagacaggtctctacattagaagatgttccacatcatctgatgaggtctccatcaatgtcattgagacatgatcctaatccttctggggagctgctactaatgcagaaactagaggtagttggaagctctgtcaagagaattcaatcttt

SEQ ID NO: 24226 - DNA, 151 bp, Glycine max
cgtgcgaaggagtctcatgcttttatgtagagcaaacttatattatgtgtttgcatatttctcaagtaaccgtcacaaatcaatacttcacggcgtcgacggcgcggccctcgcgggttgcatctccgccggagtagtctcatattccatt

SEQ ID NO: 24227 - DNA, 532 bp, Glycine max
ctcgagccgatgaaatggatctcactcttgtggatttagaagggcttttaccctcggctattattatggttgtctctgttacagcatcaactacaactggcaagcctcttccagaagaagtgcttagcaagacagttgaggcctgcgatcagctcttgatcttgactcagcaaagaagaaagttcttgatttcgttgagagtaggatgggctacattgcacccaatctttctgctatagttgggagtgctgttgcagccaaactcatggggacagctggtggtctagcatctcttgcaaagatgcctgcttgtaatgttcagcttcttggtgccaagaaaaagaatcttgctgggttctccacagcaacatctcaatttcgtgtaggttaccttgagcaaacaggaatatgtcagactactcctccttctctaaggatgcgagcatgccgactcctggctgcaaagtctaaacttgcagcccgagtagattcaatacgtcgggatccatctggacagactggaagggctttc

SEQ ID NO: 24228 - DNA, 259 bp, Glycine max
attggtacaaaacaaaatgctgctgctgtttggctgatgatgcgtccaaggactgatccatccgctcaataattctagatattgccgccagcaactgctttttttgttagatctcaaagactgagttagaggaagagttactttggttggaaaagctttaacatcatgtgcaaaagaaagagtccaggctcagaattgaggccgccgagcaggcccacatcgcctgagttatcatcgtcgacatcatcaggtgagtggc

SEQ ID NO: 24229 - DNA, 244 bp, Glycine max
ctcctgcaccgcccgggacatccaggccgccgcagccaaggccgcccacatgatgatggtccaggctgcctccgccgactcgccggacaaaagcagcagcattacctccgactgcgacggcagcggtggtgacgacttctggggcgaaattgagctgccagaactgctcaacggcaagtggtgggcctccgaccgccacgtaacgccgtggccggagactgagcttccgccccagctgcccttc

SEQ ID NO: 24230 - DNA, 256 bp, Glycine max
caaaaagattcaacaaagagcaaaagtataagctccgaagagtgcagaattttccatcacggaatcctatcaaactggtaaattctgcactcttaggtgcttatacttttgataggattccgtgatggaaaattgcattataagtatgattagttcttcgctttataggttgcaatatgtgtaaaacttaagcgatgcgaaattggcttaattttgtaacattccagagatagatatagcttttaagatggtttat

SEQ ID NO: 24231 - DNA, 267 bp, Glycine max
gtcctcaagcattttctgcctcctccaggcttggaagtggtggtgcaaggagaggtccattcacaccaacttagagtgagtgtgcatggaggttcttcagtggctacccggcccatcccaattacatggcgaatacagagtcttctagagccaaggttaggtcacatagtgctccatggcactgaatggagtttgagagatatggtcattccacaagaaggtctcttcagggtctttgggaagcagagcctagttcagatagggatt

SEQ ID NO: 24232 - DNA, 431 bp, Glycine max
ggtgactcagagaaatctattgaagaaaacaatgtgaatgaattgagaacaagcaacaaagcagaaatgacaagtgattcagtacagcaatctagtgagaattgttgtgctgacaaagatggtgctgaaccagctattagtattgttgaggacaagaatatcaaaataggtgagtgtcaggaaaatgctttgcagggccatttttcaaatctgtcctgcaaaacatttttaggcagcaattttgacacggattccaatattgaatgctcagtgatgtatgatgaaacagctccttttgggacttttgcaaagtctgcaagctgaatcggcagttgaacgacaatagatgtttagagagacggtgtgatgctcataacagacttgtagggtatcttaggacttagggaaactaactgcaaaatatggaagca

SEQ ID NO: 24233 - DNA, 1583 bp, Glycine max
ggctcacaaagtgaggcctctcaaaaaacaaacaaaagtgacatcaaaatccccttctccttcctcttattctcttataccccacccccacttcttagcttcatccctctctctctctctccttctcaacaattacttgcaagtcttgagttttctcctccctgttctctggttttggaattgagacaggctttatttataattttaaaaacttgtttccctccctcccttatttttgggttttctcaacttgttcttgtcatcttgtaaaacatgggaactgctatagacatgtacaacagcagcaacatcgtagcggatttcctagatccgtatagtgaagagctgatgaaagcacttaagccttttatgaaaagtgattatttctctgcctcttcttcttcttcactcgaatcacagccttgttctttttcatctaattctctccccacttcgtatccctcttccaaccaaatcaagctcaaccaactcaccccagaccaaattgttcagattcaggcccaaatccacattcagcagcagcagcagcacgtggcccaaacccaaacccacctgggcccaaaacgcgtccccatgaagcacgctggcacggccgcgaaacccacgaagctctaccgcggggtgcggcaacggcattggggcaagtgggtcgctgaaatcagactcccaaagaaccgcacgcgcctctggctaggaacattcgacaccgcagaggaagcagcattagcgtacgacaacgcagcgtttaagctcagaggcgagttcgcgcgtctcaattttcctcatctaagacaccacggagccttcgttttcggcgagttcggagattacaagcctctaccttcttccgtggattccaaactgcaagctatttgcgaaagcttagcgaaacaagaggaaaagccgtgttgctccgtcgaagacgtgaagcccgtgatacacgctgctgagctggcagaggtcgagtctgacgtggcaaaatcgaacgctgaatatgtttatcccgagttcgaggattttaaggtcgagcacgagaacccaatgttttctggtgaatcttcttcgcctgaatccagtgttactttcttggatttctcggacttctcggattctaataatcagtgggatgaaatggagaattttgggttggagaagttcccttctgtggagattgattgggaagctatatgatgactcggtgaattttcgttatgtcaaatggttggtttggttttgctctgcttttgggttttagtatgtacttattatgttttgtaattttttaggtttatgtttcgctagtgtctttggctgcttctgcaatggattttttgacatttgcggatgttttgctgagacacgagggttgcaaattttaggcagtgaaatcagagggtcgtagtgatctttttgtggtctgctcgtgttttttgttacttgcatgaccttgggggcttctacttgtgtcttggctagctacttcttgttcaactgtaattaaagtgcccttccaatatatgaaaaatttacatgttcttgtaaaaaaaaaaaaaaaacaaaaa

SEQ ID NO: 24234 - DNA, 303 bp, Glycine max
gacaaaggttgtcttctccatgggcagcttggaatgggaacgatgaagctagcgccggttagcaaaggaattagcagctgatgtaaatgttaggcgtagatccaaagggctccttccccgtgcggttcgagctggaatagttggataccctaatgttggaaagtcatctttggtcaaccgtttgttaaagcgaagaatgtgcccagcagctcccaggccaggagtcacaagagaattgaggtgggttcgttttgggaaagatcttgaactgctggactctcctgggatactcccaatgcgaat

SEQ ID NO: 24235 - DNA, 254 bp, Glycine max
tagggattggtgcatgcatgatttgatcagtagtgtaaagttgtcttcgtatacttttgtataaattttttggtagcaggctatctagatctttcgggtcatattgcattctttaggtattagtgttccatgaaaatggagaaaattgcaattctaccggattaagataatattttctttctggggaatttgatcgaattgtggccttagaatttagtggctgttgggaaccttcttgctggtgtccgtattct

SEQ ID NO: 24236 - DNA, 351 bp, Glycine max
caatattcttttttctttttttctggctccttgggcctctgttctgtgttcagtcttcaaccacctcaacacatagacgacgcgccacttgtttttgctccaaaccgccctctgattcccgaacccaatgacttctccgctggtggcggagggcgccgccgtcacggcgttccgatcggtgatgctccgggtgcagcaggcggcggagagatccgggtccaaacccgaccgggtccgggtcgtggcggtttccaagacgaaacccgtcactctgattcaacaactctacgacgccggccaccgatactttggcgagaactacgtccaagaaatcatcgaaaaagctcctca

SEQ ID NO: 24237 - DNA, 213 bp, Glycine max
caaccacctcaacatagagacgagacacctcactcgataacgcgcgcgccaccttgtttttcgctccgtcccataatccaaaccaccctctgattcccgaacccaatgacttctccgctggtggcggagggcgccgccatgacggcgttccggtcggtgatgctccgggtgcatcaggcagcggagagatccgggtccaaacccgagcgggtc

SEQ ID NO: 24238 - DNA, 186 bp, Glycine max
atttgattataggatcggtgtagttaattagattaattacgtggtcctccatgtctttgattattactagtttcaaatccatctagtatctgtataaccattggaatatgttaggtggtaattctgccaatgaacttggatgtataaccgtatgagaagatatggccatcaatttgaatagtaaaa

SEQ ID NO: 24239 - DNA, 263 bp, Glycine max
gtaagctgaaccaaagaagcgaagctcagcgcctccatcatccaagcgccataacgactctaggtcttcatatagctgtggtggatatggagatacttacgatggatttggtggcagctttggaatggggggtgggtataggtcaggtggtgcttatggtggtggtaggggtggtgcttatggtggctttggaagtgaatttggtgggtatggaggatatgctggtgagatggggccgtatagaggagatctctccctcgggt

SEQ ID NO: 24240 - DNA, 394 bp, Glycine max
tggcaatggagggaaaatccattggtttatcttgattcgcttaaagagatatctctctatcaccttgaaggcatgaaaaatgtggatgctatgcaaatatatcccaaagagtatacaatctggagagaagatccagccaattttctcatgaatggtagatatccggtacgagatctctggaaagctgcaaaagattgttggaaggagatgttgttgtcacctggagaaagctttctggttgtgactcacaaatccatattgagggcattaacttgcactgctttaggcctgggcccagagaggtttcgttctattgatattaacaatggtgggatatgtgtgttcaacttcaatgtcagaggagaagcaatgcttgaggctttaaatatgacgg

SEQ ID NO: 24241 - DNA, 1276 bp, Glycine max
ggatactggttctgctggttaaaataacaaaatctgaatgaggggtatcaaataaattgatgagttggggaattggcctttaattgcgcccttaccatcgtatggaagaggaagggagctccctggaggaaggtatatgagttttatccatggagatggacttagtgatgtagtaattacaggtgagaatgggacaattgatgggcaaggagatgtgtggtggaacatgtggaggcagagaacacttcaatttacaagaccaaaccttgtagaatttgtgaattcgcaagatattattatttcaaatgtgattttcaagaattctcccttctggaatatacacccagtttattgtagcaatgttgtggttcgatatgtcacaattttggctcctcgtgactctcctaatactgatggaattgatccagattcaagttcaaatgtctgcatagaggactcatacatatctaccggagatgatcttgtggctgtaaagagtgggtgggatgagtatggtattgcgtacggtcgccctagctacggtatcaccatccggcgtgtaacagggtcatctccatttgccggtattgcaattggcagtgaaacctctggaggggtggagaatgtgctagcagaacacatcaacctcttcaacatgggagttggtatccacatcaagaccaacagtggcaggggagggcttatcaagaacataacagtggctcatgtgtatgtggagaatgcaaggcagggaataaaaattgcaggtgatgtaggggggcacccagatgaaaaatttaacccgaatgctctccctgttgtgaagggcatcacaattaagaatgtttggggagtgaaggttaaccaggcaggtttgatacatggattgagaaattcccccttcactgatgtttgtctgtctgatatcaattttcatggcatggaaggaccaagatctccctcttggaagtgttctgatgtgtttggatttgctcatcaggttagcccttggccatgttctcagctgagcagccaagagcctggatcatgtgctatttagatattttcactctcttcaagtattgtagtaattgagtgcttctttcattgatttcttatacttaaagccattgaatcaccactttagaattgtatgatatcatgtgaaattaaatttagtcaaacatgttgaggatcatgtgtcaaacatacattgtgagagccaatttatataaacaatttaattaagtacttatttaaaaaaaaaaaagaaaaa

SEQ ID NO: 24242 - DNA, 148 bp, Glycine max
gcctttcaaaagcttgcttgttggtgctgaattgtttctccctgtggctgtgtctaggttcccctttataattcagcctataattgtgttcctgagtcttgttagatgcaaaacaaaggacatgggaattttcaggacttttgtactg

SEQ ID NO: 24243 - DNA, 580 bp, Glycine max
cttccctccatcctcttctcatctccgtcactctctgtaagactaatccagtgcctgttgtcaatgtcaattgcttcacactgtctgaccatactgcatagttttatagtcatagctgctgatttagtaacatttttcaatacataattgccatagaaagaaaaaaaaatattgctttttgtaccataactagaattccaaattaaattttgatgctttaggtctacccatcatcattggaaccttaaaaatgtcacttgtaatcccctcatcctgtgcagcgcccttgcatttttctcaacgggagattaagagtttgagttcccaccaaaaatttgcctcttattattccatcaccccttttcaccataaagtggctttgagttgtaaaacgaggcatataaggactcacttgagaaatgaactaaatcttcttcataagtatgcagttaggtctaaggggcatgattttgagtcaattaatgatgagtccttgggttaggatgatgatgaagaagtcgaagatatggggtcgccttgggaaggtgcagttatatacaaaagaaatgcaacaatttta

SEQ ID NO: 24244 - DNA, 267 bp, Glycine max
catttctgctgctgaggttttgggaaggcataatgatactattatcaaaagagccaccgagtatcagtctaaacttcctccgacaaaagttgctcagagatggttccattatggaatggccagaagattttgtggacccagatgtacatcatcgacatgtttcacacctgtttggactgtttccggggcacacaattagtgttgagaacactccagacctctgtaaagctgtggaagttagtctaattaaaagaggagatgacggtc

SEQ ID NO: 24245 - DNA, 449 bp, Glycine max
gtcattagtgctgctgtttttgcccttgcacatctcactcctggagaatttccccaattgtttgttctagggactgctttggggttttcatatgctcaaactcacaaccttctcactcccatcactatccattctttttggaactcaggagttatattatttcttacttttctgcagcttcaagggtacgatatcagagaattattgcaggcaacttgatggaaaaaatttctcctttgcatggatgtggagcatcatgtacagtatataatacaaatccatttctttgcttatctgcgctcctttccgtgctgtaaaacataatcagattgttctttggaacagtgaagtaggtaataataatttaccatgacagttaaaatatgctatgcacttaaaaattttcagaggccctggttgacaagaaatagggcttcgtttgaatatcc

SEQ ID NO: 24246 - DNA, 517 bp, Glycine max
tattgatggtgttttattccaaagagataagggtgttggggcatggaccaaagactgcaagcaagcttcaagggtcaacaccccatgatcagcttctgatccaaacctcagattccttctctggcttgctgttgttcacaataggcttccttgtgttcatggttgcttgtgttaaggactgggagttccagagtttctttgccaaagggtgtgtgcttcttcacatctctatggctgtgtggagattctactttgaggggaagcttgaggatcttgcgcatgactggcctaggcatgctgttggggacattgcattggccacttcctggctcttctttcttgtgtacatgtggagggagaagtatgattagttagttattgttgtaaagtagtataaatgttggggtctcacatctgaagaaaattctttggttttgtgttgtgatatgcttgtttgaatcatttatgtacattttgtagagttttcaatgtaagtttacccatatttgatctcaat

SEQ ID NO: 24247 - DNA, 554 bp, Glycine max
tccattgccaaaagacattgagctaatatcttactggcttctaaatgaacaatttgcagatagctttaaaagaatagatgaaatgaagacaaggaaacggttggccctgattgatattgtcagagaagtgacattgtttgttcttaagattaagatgccttcagctgtgcgagtacagttgatgaatgatttggcagatatagagtacagattaagttttgggtgcaacgataagcttcagcttggatcggttattgcttcttttacacgtgctagatctgcactggttgcagctgctacatagcctacttctgaaaaattactttcacatactactagggcctggcttgtttgatgtcctgggcatgtcactacggataatgggattggaaggatcttaatctgtgtaaagatagtaactgtgtcaatcttttttaacttaagatgagttttaaagtttcaagtacctttccaaaattctgaagtagatatcttctgttttaaattttaaaaaaaaaagacgagggcggccgccgacgtagtgtcgacccggg

SEQ ID NO: 24248 - DNA, 543 bp, Glycine max
atcacaatcacaataacaatcatcaccctctcttctttcctttctttctttctttcttcccatggatatccaacaacaactgttgaagttcaggtaccacatcggaggggcactcctcgtgtccctttcgatcttctcagtgctttttctcgctccgaggttcctcaacatcctcgcctatttctggccactgttcctctccaccgcgctttttctcgccctcgttctcttcttcgccaagacgcaaacttcgcccaactccgacgcttccattcccaaacccgccgaggagctcctcgacttcgtcgccggccaccatcacaacccgccactcgacgcccacaagtccgattagagaccccattcagagagagaatgtctgtctatgtgattattgtgaagagaagatggtgttagcatagcatagcataggccagagtagatcacagatatcatgtaactgaggatgctgctcaactatagataaagggattaaaagactaacattagtatatcatagccagcacagttgtgttgtggact

SEQ ID NO: 24249 - DNA, 323 bp, Glycine max
gaacaatgttggtggacggcagtattgttttattttgtcggggactgcgcaggattgtactattgttgcccatatttctttaccatcaaacataaagggaatcatgttgctgatatgaaatttgtgatcggggagaatgttacatccaaaagacattgctaggttcaggtaaaaagttgatttccacctgtatgttttctttgtgatttttgctgtacgatcccaaaggaacgataatttttgtagctggcaaaatgaagaaacctttttgtctgaatttgtgatactagataccatgcagttttaattctacgccgtgaaat

SEQ ID NO: 24250 - DNA, 423 bp, Glycine max
gaattgctcaagcagaagctatggctcgtgctgatatgcttagattccagccagagagtggattaactctcagcggtgaaggaatcttaggaccactaacttcagacttgcctccagagggagtggatctgagtgaggtacccccagctgaagattcgtgattgagagaattgagaactgagtcctcttttcctcccctcccccccttttttttctttcttttatctattttttctttttacaccttactccaaatattgttgtagaaagatgaactaatgtagcggttctttttagcaactcagttttgtagtaaaggcaattgtataactctttattttctgtccaaattattgtgagaggttgtccctgttatctttagtcagattgacaatagtgaaaccagttcaaaaccagatttat

SEQ ID NO: 24251 - DNA, 488 bp, Glycine max
ctcatctgctaccaatttcaccattctcatcctccaaagttgaaccataatttcaaatccaaccaagagacaccatgtcatcaagtggaaccatttggagctatgaggaagaaaaagcatttgagaatgccatagctatgcattggattgaggaatcctcaaaagagcaatgggagaaaattgcttcagcagttcccagcaaaagcatggaagatgtgaagcaacattaccaggttcttgtagaggatgtaagtgcaatagaggcaggtcacatatcattcccaaactatgctgcttctgaggaaatcacatcttcaaataaggactttcatggctcttccaaggccacaagctcagataaaagatcaaattgtaattatggacgtggtttttctgggttaggacatgactccaccactcatagtagtgggtaaggaggcttgtcaaggtcatcagaacaagaaagaagacaaggaatcccatggact

SEQ ID NO: 24252 - DNA, 531 bp, Glycine max
gttgcacagtttaaggttttctctattcatggcatccaaacatcgaattgcagggaccaacattcagagctccccaaagagggcaagatccatggccacgtcatccacagccattgaacccgcattgaaggaggctttttccagatatactcagtgtctcaatgacctcaatgacaaacgtgaaagagtggtcaaagcaagtcgtgatgtaacaatgaatagtaagaaagtcatatttcaagtgcacaggatgagtaaatacaataaagtggaaatacttgagaaagctgaaaaggatttagcagctgtgacagatcagtacatgtcacgactagtcaaagaattgcagggaactgatttttggaagttaagacgagcatactcacctgggatacaggagtatgttgaagctgctacattctatggtttctgtaaaagtggaactcttttgaagcttgatgagataaacaaaacattgctaccacttagtgatccatctcttgatcctctgcagataaatatccttgacta

SEQ ID NO: 24253 - DNA, 343 bp, Glycine max
gctaaagagagatggtgatggcgtggaaatggattgtgcgaagaacccgcgaatcgaaacccttcttccttgcattcgccaccgtatgcggcgtcgttcctggcgtcataggctatggtgtcatgcaactcactaacacccgcaacgagaagctcgagtcccatcttcgcacaaatgcccgtcccgaatcattgatgatggggcaagtcaataaagagaggctggcagagtacctgggagagctacagcggaaggaggataccaatgatcgctatgttgctgctctaagaggagaaactttaaccagaaaaccttatgtgagaatccaccgattccagaacaa

SEQ ID NO: 24254 - DNA, 481 bp, Glycine max
actgtgactccgctcagtttttttattttcttcattttctgtatttcatattgatatttcagcatgatcattttaagcctacatctataaccaacttgattggtctttggattggaatacaagagcagtttatctgagaacttaccaactttttaagttgaatttaacagccaagtttacacttgtttctttgaggtgattttctttctttggtgaaagtcctaataatctagttgctttaattatgtatcagatgatggggcaagtcaataaagagagactggcagagtacctgggagagctacagcgtaaagaggatacgaatgaccgctatgttgctgctctaagaggagaaactttaaccagaaaaccttatgtgagaatccaaccgattccagaacaaactgacaccaaggcaaacaaggagcagaaaaaaatgaattagttgcagatctccggttattgtgaacgcacgcgtggg

SEQ ID NO: 24255 - DNA, 318 bp, Glycine max
attcccacccaagtcctattcgcaacccacacatctctctctcttcagaacatggcttagcagatgaagtacaagttatcagaattgttggttctgtggtagttatctgtgtactttggtgacactagttttgtccacaatggactttcttggcaaaatcccttggtttaatgctcaagtgaacacagatttggcgactaattcaattcctatcgaaacattcactgaacaacctaaacaagaacttgggaatgatcccaaattgcccttcctttcattgtttccttgggggaaatcgtgctggagagaaattcaaag

SEQ ID NO: 24256 - DNA, 265 bp, Glycine max
tgaggagctcacctacgactacaagttccccatcgaggatgccagcaacaagctgccctgcaactgtggcgccaagcgctgccgtcggttccttaactgaggccgtggctgcccaccacgacccctcacacctcctgctgccgtcgctgcacatcttgcccctagcctgggggctccctagcccctcccagagcatcgcacccccaccctcatgttcagggtggatgtgggcatgcaggtgacaaggccctgcctccacccctcc

SEQ ID NO: 24257 - DNA, 325 bp, Glycine max
gtcttatcagagtcattgaagaattttatgatctaagtgctatttgttatgatcgggaaaagtgatgagggcatgatagccgcatgttgactttgttgctgttgatgctgtttctattcattgatgattggtcgtgaatttgatgctggttgcaagagtacgctggttttagaactgattgttttaccagtgtgctgattagacagacaattagttgagttggtttttttcctgaatgatctgatcattggtaagctcttttggtttacattcttgtttcttctgagatccctcataaccattgagatttctgatctttgatctc

SEQ ID NO: 24258 - DNA, 325 bp, Glycine max
atagagggcaagatccttcgcctcaagcaacaatatactttatgttctgcttctctacaagacatcattgctcgttttgagagaagatcaggagcaaatgttaattgggaagagtttcccgagaaggttgcagtgcagatgaatgatactcacccaacgttgtgcatcccagagctcatgagaattttaatagatgtaaagggcttaaattggaaggatgcttggaatattacacaaaggactgtagcatatacaaaccacactgttcttccagagagcttagcagcatggagcttggatcttatgcagaaactgcttccacaca

SEQ ID NO: 24259 - DNA, 160 bp, Glycine max
gaaaaaggacaagaagcccagaatcaccgcgaacccaacaagcctgcggtggttctggtacacggcttcgcagccgaggggatcatgacatggcagttccaagtaggcgcacttacaaaaaagtacgctgtttatgttccagatcttctcttctttggag

SEQ ID NO: 24260 - DNA, 288 bp, Glycine max
ctcgagccgcgccgccactccccactcacaatgcaaccccttcaccgtctcacatcctgcacgcgccgcgtcgccacatcgtcgctccgtcacgactgccgccttccccgagccccttcaggaatcctctccttctccaccgacgcgcccgccggaggaggaggctccttcgacgcggcatgggcgagcgcctcctcgtggtccacgggcctcgccggcgaccacttcaacggacaggccccgtccgaggtcctcgcgtacctccaggacacggaggacaggctccgc

SEQ ID NO: 24261 - DNA, 640 bp, Glycine max
cttcagaacgtcgaaattcgcctctgggttcaaccctctgcaacggaagcctttggatttgggccggatatggtccacggcggaggatttgggccgtaacagggcccgggtgctgtcgctgtaccggcaaatactgcggggcctgaactcgccggagttgcggctgggcttcgcggcgaggctggcgaagaaggcggaggcgcgggcaatgttctgggtgggttctgatgaacgctcgttgcacaacattgcggatctcattgatgctgcagagtactctctctcctttctcagaaaaggacaactccctcctcgttacatcaactgatcaacgttgttttccatcaacgacccttctcagaaaattaacaaaccttattaccttaaggattttgttagcaagtagtggagcaagcaagggctgtcctggcaggaggtagtgcgccaaggatccctctgtcggctgagcagtacaattccgttgggattgcttttcactttttgtaattttgctttttgttttttcctccaaggcaatatgccaaagcaccattagcgaagtgttagcagaaaagcttgtatatagcaaacaatgtactcaaatggaagcaagcaatataatcagaatttcctctccttt

SEQ ID NO: 24262 - DNA, 512 bp, Glycine max
gcacgagccgcaacagggcccgcgtgctgtctctgtaccggcaaatactgcggggtctgaactcgccggagttgcggctgggcttcgcggcgaggctggcgaagaaggcggaggcgcgtgcaatgttctgggtgggctccgatgaacgctcgttgcacaatattgcggatctcattgatgctgcagagtactctctctcctttctcagaaaggtcaactccctcctcgtcacatcaactaatcaacaatcttcacatgcttattgtttttcaatgtatatacattttttttctagagaaaaaaacatgaagtggagtgtgtgtcttataaggatatttagtaaacattctattagagttagttactgctaaatggattgttatggttagttacttgttgtggccactagtcagtgctcaatgctgaatataaattagagcattgtgtatattttctgcatcttttcaatcattcagtatgatttcttgtgagattgcatctatgttctactc

SEQ ID NO: 24263 - DNA, 479 bp, Glycine max
ctccttcgccggaatttctcgtcatccatcgcaaagaggttctccgcggtggtcgggaatggggtgtcaattgaagtgcagggagaggctcttgacaagatcaccagcggagtgtggttaggccaaaccaccattgcatgaatggatggacaaagcgttggttcccagtttccaccaactgaaaaagaatttgaattcaaccacacatgaccataactcttcgatgctgtttaggctcgaagatgatggctactccgatcgctggggctcccaagagtggttacctgctactgtgagagtggtgggggaatagtatattattcaaacagtggtggtgaatggtgatatccgtttttttttgtggtagaaatgtaaatagaacactttggcatgtataagtcaaagacgcgtagtagaaccaaggaaaaaccgttacaaggctcttgtcgggggtgtcaattttttttcccttagaaaaa

SEQ ID NO: 24264 - DNA, 731 bp, Glycine max
ttcctttaatgatgaaggtgcaaaagaagatcatgaccacagccatgaccatgagcatgagcaccatgaccatgatcatcaccaccatgaccatgatcattcccatgaccacaagcatggtacctattattttgcctcgagtcagagctgtttgaatgccattttgttcttgtttgtagcacgagtcacaatgcactggttgcttctcaattcattctgttgttgggaataaaaattattgttttgtgtacagaacaccatgatcaccactctcatgatcatagtcacgatcctggtgtttcatctgtcagcatagtttgtgaaggaagcttagaccttgagaaggctaacatgtggcttggcaccttgttgcttgatcgtagtgaagacatttataggatgaagggccttctgtctgttcaaggaatgaacgagagatttgtctttcagggagttcatgacatgtttcaaggttcacctgaaaggttgtgggggccagatgaaccaagggtaaacaaaattgtattcatagggaaaaacttggatgctaaggaattgcaaaagggattcaaggcctgttttctatgatactaagaagttcactacagtgctttaattatatctctttcggccaatgaaacccgttgaagatatacgagtgtgcctatattccatgtagaactctaaactgatcgcctgcatatttagtggaaaaaatgttccatttctag

SEQ ID NO: 24265 - DNA, 437 bp, Glycine max
catgtctctcttttgggtcctgaagcaattaatggagctctcaatcaggaagacgatgaagaacctaaaagtaagaagccaaagaccgaagatagtgtcacttcttagttcacaaatgaggttttgaaattaattttcatcaatctagaggtcatggaattccatgcttgtggttactaaagaacccatttgtcttcactaaattttgcagagtggcgagtaaaagtagaaaatgtgcttgtttctcaattaacaactaggcaaattgctgagggaagattaaggcactttgcatcaaattagatatcagaatctggcattttattttttgggattatggaaattgtatcgtgtggaataatatttattttcggtgactttgtatttggtgtttcttataatcgaagttccaatttctgagcaaaaagtcagacaat

SEQ ID NO: 24266 - DNA, 247 bp, Glycine max
caaaacttagggcaggacgtcaaattacaagcaagcatgtctctcttttgggtcctgctgcaattaatggagctctcaatcaggaagacgatgaagaacctaaaaagtggcgagtaaaagtagaaaatgtgcttgtttctcaattaacaactaggcaaattgctgagggaagattaaggcactttgcatcaaattagatatcagaatctggcattttatttttggggatatggacttgtatctgtgg

SEQ ID NO: 24267 - DNA, 350 bp, Glycine max
ttcgtcctttcaggctttccctgatgctttgtttcaccaattgctcctggcgatggctcatcctgaccatgaaacacgagttggagcacacagcatcttttctttagtgcttatgccatctccattttctccccagttagaccaaaaaacaaaggggtatcagaaggtaccaagcgaaagcttctccattcagcatgaaagctttttaggagcagaacagatcaatgggaaacctatggaaggaaaggcagtagttggtgttagtgggaaatatgcagttcatccatatcatggtcacatcttttctggtgctctaactgatggaaaacatgagctaagttcttttcggt

SEQ ID NO: 24268 - DNA, 490 bp, Glycine max
gcgaggccaaggcaacattcatccgaagttctgcatcaaacactgcttgaactttgaatttctattgcagaaggacgtgtcaacgtaagcgtgtacgaattgcaatgttgagctcttttgtcacttttgtgacttgaacagctacgcaatatttcattcgtagtctgttccatggtctcgttgtgccattcctttttgttcatttttttttattaacgttgcttcttctggtgaactctcccttattattccatggtggttgttctagtttccgaagcatatataaattaattcgtctcgaataaccggttttaaacagcgtggtgtaatcttctctaagctaccctatgctacctgtcttctgaaatggaaacgccaaatgtaacgatacctaaagttggacctaaaccgtcgaggaaagtgaagcttccgacgccgaaggagctgatatcacactatgaatctaagggtatggactcgcaagatgcgt

SEQ ID NO: 24269 - DNA, 355 bp, Glycine max
ggcaattggttatggggccgttaagtatgctgatttgaagatcaacagattaacaaattacacattcaactttgatcagatgcttaatgataaggggaatactgctgtttatttgctgtatgcacatgctaggatctgtgccattatcaggaaatctggtaaagacatagaagaagtaaagagaaacgggaaaatagtgttggatcatgaagatgaacgtgcattggggcttcatttgctacaatttcctgaggtttatgaggaggcatgcacctatttgttgcccaatttcttgtgtgaatacctttacaatttggcagaaatctttacaaaaaaattttatgctaattgtcag

SEQ ID NO: 24270 - DNA, 308 bp, Glycine max
gatgaagctgctttcttgttggatttggcttctatagagggagaatgggatgagtatttggagcggattgccaaatgttacgaggaagcaggacttcaagatgtcgctaaattcatactttatagagattaatattagcagatttctttccaccaacaggcttctgtacatttccatttcggcatttccagtacttcatagttcatatgaagttttgaaaataattagaggaaaattatacgatttattccgcagcttggatatttttccttgagttctcgtttgttggcaatcaatttaacctgaat

SEQ ID NO: 24271 - DNA, 451 bp, Glycine max
gctgtaagcaatgttctaccccttgttgcaacagcttttcggccaccgagtggagtgaagcttagatgtccacatgcaattgttgctgcaagggctgcccttgcccgtacaacctttgtgaaaaacatggccctcagcctcttcctgcaaaaatgcttgttattgcagcgttaggcatggcggttaatgtgccctttggcatgtggaaggagcataccaagaaattttcattatcttggtttgtagccgtgcatgctgctgttccctttatagccatgcttcggaagtcagtggtgatgcctaaatcagcaatggcactgaccattgcagcttctatacttggacaagttattggctcaagagctgagcgaatccggctgaaaacaatagctgttgagatgggaaaagtgaaaacagagacagtatgcagcatggaaagctaaatagtccc

SEQ ID NO: 24272 - DNA, 320 bp, Glycine max
cagaagcctctgctcccccgcctattcagggaatgggctcaactgggaacttggcagacatttactgcaggaggcaatgggatacgcccacatcatggactttatcatatgtggaacagctccaatttgcaacagcaaactccatcaagtaccatgctttggcagaaatcaccatcatttgttaatgatgcttcttctccgggccttccacagatgtcaagctttgctagaacaccgcctcatatgctgagaacaccacatatgacggaccatcatgttggatcagcaccagttgttacagcctcaccatgggaaaggaa

SEQ ID NO: 24273 - DNA, 323 bp, Glycine max
gatgtggtgttctgtccgaggcatcacttaattgtcctctcttgacatctttggatgcttccttttgcagccaactcactgatgaatgcttgtctgcaacaacggcctcctgcccattgattgagtcattaatattgatgtcatgcccatcgattggtttagatggactttgttctttgcgttggctccctaatttaaccctgctggatttatcgtacacttttttggtcaatttgcagcctgtttttgagtcttgttcacagctaaaggaatgtaaccagtatactcctcttatatgacatgtgcaatcctcctcccttaag

SEQ ID NO: 24274 - DNA, 272 bp, Glycine max
gcttagctcgagctagggaggttgcagatcctcacgcttgcactccaggtcgcgaagagttgaacgtgctctttgttagggttcgtgcggtttcggtgcttagtgttgttggtgttgttgttggggtggttgttgctgtgggttccaaatggagctgattttttttagtctatgtttggtattctgttgcaaaaatcattctgtcaacagatccacatcttgtctatgccctttggattaaaacctttacaaacaagttaaacttctatgtc

SEQ ID NO: 24275 - DNA, 571 bp, Glycine max
ctgcaagtagggataaaatattgatgctgcggttctcctgggcttcccttctaataattattacagcttcaactttggcttgccaccagcttgttgtgtctctatctgaagcttacttgggcaaaatatttgatgctcccaagagatatgcagtcagtgtatgaaattttctcaaaacattcacttttctcagcagaaagagagcattcttatccaacgacaattttccaaaaggaaaaagaaaaagaaaggtttatttctatggatgacagagtgaaagttcgttgtttactgctaacaaaagcatttgtgtttgtagcttaagttgggtgtgttagatttggagcaaatctggtgtcaggcaggtgaaatataggcataggattgcaacgtgttttggttacagtttatgtatggggaaacactgtacgcggtactgatgctgctatcaacatctaaataccctacaagtatgtacagtgtcatgtaaagtgttaaattttcttcaaagaataaaaatgtctttcccttacagattagtaaccaaaagacatttttattactaatctgt

SEQ ID NO: 24276 - DNA, 238 bp, Glycine max
gtcaggccggaccagctcacaggctagtgcctttttttataaaaaaaattatggactctgaaatggctcaaacgtttgcagtccaaatagtccaaacgcatgcaagctagacaagaccctcacagcctcttgacttgaatctcatttctcattctcttgaatctcttctctcgagccctctctctcaagacccttacccttgacctcgagccctcacccttctctttcgatttcaaac

SEQ ID NO: 24277 - DNA, 242 bp, Glycine max
atgacagttaaaaaaaattataatctacgcaatcccaatctttttcattgattgtttaccaccccaatactaatttagtaattagaactttgatgtcatcaggtgcatatcactttattccgttaactagttttatgattctggattatgtacgtactagtgtatgtgtaacctgttatttcactacatatgaaggttggtatgtagtggggagatactaatatacgtaaatataaatatag

SEQ ID NO: 24278 - DNA, 684 bp, Glycine max
attcaaccttcccaccaacaacaacaacaacaataacatgaacaacatagagtcctaccctccggttctccgccacctagaccaccaccaactaccaccaccaccaaaccctgacccggataaagacccgacccaacaagactcggatccaatacccatcatagatttttcatgcttaaaccatgacaagagcaagttggacgaagcttgcaaggattggggtttttttcgtttggtaaaccatgggattcccatgacccttttgaagaagcttcaagaggtggccaaggaactcttctctttgtcctttgaagcaaaagaaggtgcatgcagtggcagcccagtgtcctacttttggggcacccctgccctaacgccatctgggaggacactaacaacgagaggcccccaaaacatgaattgggttgaaggctttgatgtgccgttgagtcaactcccacacttcaaccctcatcagcttcccacgctcgagtccatcagacttccgataaaggactacaaaactcatctgtcaagaattgccacaactgtatttgaagctatggcgaagaaccttgacctgagtctaaaaccctcagagccgtacctggcagaaaacactggaatggtgcgtgtctatcgctacccaaattgctctgatgcaaatgttggttggggcatgga

SEQ ID NO: 24279 - DNA, 239 bp, Glycine max
gcaaatattgaggatactgagaatcagcttcctacaaatggaaactatgaactgactcatcaggattcacttccaagaactggttagaattaagtaaatggaataccgagtaatggtttatggatacttgcatagtgtatacactcaatcaacacccttcatttatccctaatctccattgtccttatcagctcatatgtcttactacatctacacttttcgctcttgtatctctgact

SEQ ID NO: 24280 - DNA, 474 bp, Glycine max
atgcgggccagagccttccctggtggaaaggctggagaaaaaggtagaggaaggagaagagaccattgtaagggaagttgaacagttagaagaagaggtggagaaggtggggaaaacggaggccaccttgtttcagaaattggcagaagggttcaaagtattccaagaagatgaggagaatttcttaagagggttatcaaaagaagaaatggagattcttgatgggcttaaaatggaagccggtgaagtagaaaagctctttggacgtgccttgccgattaggaaactaagataagtctgagaaccatgtccaagataacttgacatcataatccatttgatcatcttaaattgatctttgcatagattcattgactatatagaatgcatggctttaaaaatctttcctccctaatcattgcttttatgctgacatactaataattattcaaatattacgtaacagcttttatc

SEQ ID NO: 24281 - DNA, 718 bp, Glycine max
agtcttttgagatgtaaagtagcctagacatttatacgttatgattgcgcgtgattgtttgtgttatcggtgctcttttcacagcgagggaacaaagtaaagagagaacgagaaagatgagtagggcgcgctaatataatgttagatggaacgatgaggttactgcagaggacatggaggcatacaggatgaagaaagtacatcatgatgatccaatgaaggattttctgcactgagcttggaaaggataaaaaggcctgcatctctttggttgcaagtcaacgagcctctctgttgttacttactgccagctgctggattggccagaataggttatcagtttggcatccttgatcctttgacccgtagtgagaaggaggggctagggtgaaactatcaatgtttgtacagcttttgtgtgcttcatataatcgcgtttgacttagatcaccttgaaaatgtttgccctaaatagcagttttacattctgtcgttcgtttccttttttttttttgggggggggtgatgtgtaaaagaaacagtaactttaaggggttagattgaaaaatgttatattgctgtggatgtgtagaataaatagtaacaggtgctaaagttatgtttgggggaaaaaaaaaaaggtgaaatatgggtgtggatgtttaattacccagattattaaaaacaaagacggcctctgcaatttcagaaaaaaaaa

SEQ ID NO: 24282 - DNA, 1419 bp, Glycine max
ggttgatgctagcaaacatatggactttgcaaaggttgagcagcgtgtgcgtacaacaggtggtgggagtacaggaactgtgaggaatctacgtatccgagaggatactgccaaatatctccttaatcttgatgtcaattctgcacactatgatcccaagaccagatccatgcgtgaggatccacttccagatgcagatccgaatgaaaagttttatttgggtgataaccaatatagaaatagtgggcaagctttagaattcaaggaattaaacatccatgcttgggaagcatttgacaagggacaagatgtccacatgcaagcagctccatcccaggctgagttactctataagaatttcaaggtcatgaaggagaagttgaagtatcaaacaaaggaaaccattatcgagaagtatggcaatgcagccgatgaggacaaacttccaagagaacttctgctgggccaaagtgaaaggcaagttgagtatgatcgtgcaggtagaattattaagggccaggaagcagctctccccaggagcaagtatgaagaagatgtttacattaacaaccacacgactgtttggggctcatggtggaaggatcatcaatggggctataagtgctgcaagcagacaatacgcaatagctattgcactggtgctgctggtattgaggctgctgaggctgcaagtgatcttatgaaagctaatattgcccgtaaggaggctgctacagatgatcctgcacctgtggaggagaaaaagcttgctacatggggtactgatgtccccgatgatctagttctagatgaaaaattgcttgctgaatcactcaagaaggaggaacaaagaaagagagaagagaaagatgagaggaaacgcaagtataatgttagatggaacgatgaggttactgcagaggacatggaggcatacaggatgaagaaagtacatcatgatgatccaatgaaggattttctgcattaagcttggaaaggataaaatggcctgcatctctttccttagaattaaagggcaatctttctttgctagtccacgagcctttctgttatgttactgccagcagctggattgggcagaatggattatcagtttggcatccttgatcctttgacctgtagtgagaaggaggaactagggtggaactatcaaaaatgtttgtacagcttttgtgtgcttcatttaatcacttttgacttggttcaacttgaaaatgtttgctttaatagcaagtttacattttctcgacccttaaacgaggttagtttccttttgtgaggggtgatgtgtataagaaacagcaactttaaggggttagattgaaaaatgttaactcgctgtggatgatgttagaataaatagtattagattattgtaatagagttgcaattattcag

SEQ ID NO: 24283 - DNA, 452 bp, Glycine max
ctccaatgttccccgtggagaaatttgtctgagaggaaataccttgttctccggttatcacaagcgtgaagatcttaccaaagaagttatggttgatggctggtttcatacaggtgatattggagaatggcaatcaaatggagccatgaaaattattgataggaagaagaatatctttaaattgtcccaaggagaatatattgctgtggagaatattgaaaacaagtatttgcaatgcccacttatagcatcgatatgggtgtatggaaacagctttgagtcattcttggtagctgttgtgatccctgaaagaacggtcattgaggattgggcaaaagagcacaatgtgacagatgattttaaatctttatgtgataatcttaaagcaagaaagtacattttggatgagctcaacagcactggtcagaaacaccaacttagaggttttgagc

SEQ ID NO: 24284 - DNA, 641 bp, Glycine max
gtcaacccctttttcatttgaagggcgaagaagggcagttcagacacaagaaggaattgctgcattaagagataatgttgatacactgatagttattccaaatgacaaactgctgactgcagtttctcaatctacccctgtaactgaagcattcaatctggctgatgctattcttagacaaggtgttcgtggtatatctgatattattacgataccaggattggtgaacgtagactttgctgatgttcgagctataatggccaatgcagggtcttcacttatggggataggaactgcaactgggaaaacaagggcaagggatgctgcattaaatgctatccagtcacctttactggatattggtatagaaagggctactggaattgtatggaacataactggtggaagtgatttgaccttgtttgaggtaaatgttgcagcagaagttatatatgaccttgtggaccccactgctaatttaatatttggggcagtaatagatccatcgctcagtgggcaagtaagcgtaacattgatcgcaactggattcaagcgtcaagaggaaagtgaagggagacctatgcaggccagtcaactcacacaaggagataccgttggtatcaatcggcgatcttctactt

SEQ ID NO: 24285 - DNA, 340 bp, Glycine max
aatcttccaagaattgtgcaatatgtcttcctcaacgagtcagtcctgcgacgttgagcttaattcttgattattgtcattttcatcaagtaccaggtcgctcaaacaaggaacgaaagtcttatgatgagaaattcattaggatggacacaaagcggctatgtgagttgacatctgctgcagacagccttcagttaaagccattggttgatcttacaagtcgtgcacttgctcggataattgaaggaaaatctccagaggagatacgcgagatatttcatctgcctgatgatcttactgaggaagagaatgtggagcccttgataaacacaactgatga

SEQ ID NO: 24286 - DNA, 245 bp, Glycine max
caacatcaacatgaagtatttagattttttatcaggaaagggagggcagcaagcaaaccatgtctattcgaggcattaaaattattgtaaaaaatatatatttattcaacatgaagtttgagcttctgtctattattattttcttgatccactctgttttccatgtgggatctgtagctattggtggtgaaatcatcctaattttttatcccagttgattaatgaagtttgtgttttaagatcaa

SEQ ID NO: 24287 - DNA, 373 bp, Glycine max
tgggtagcaaaaactataaatgatttgatgaattaatgatgataaatatttgccagtatagtttctttctgactatggcgtaaaattttactattttgcttttattgtctaattcattgcctattcttctgcaatataattcaggaccttctaaagcttgaaaaaatccaggaggatcttgacagaaagatttggcgagtcagcccacgtttgctcaatgggcagcagtggcaggggtagatcagaaaacacttaggaaacgtttaaattatggtatattttgcaaagacaaaatgattaaaagcaatatacgacttgtcatatccattgctaagaattatcagggatctgggatgaatctgcaagatcttgt

SEQ ID NO: 24288 - DNA, 766 bp, Glycine max
tctgtggtttcactttgtgggaagagtcgtcggggaagaggggaaagacaggaaaggagaataatgagcggctcgagaaaccctctctaggagacccagagtctgcagcatccctagggcagtggacatcacacggagcggacgtcacagtcgttttccaacaatcgtcacggcggcttcagctctcgctcttcgtctcagacaactgggctgaaaaaccagagttttattgaaatgatgaagtctgcaagggatagtgcacagaatgaagtgctagaaagcgaggaaacattttttctcaagaaagaaccctcctcgaacacccaaagagcagaactgcttgtgaaagtggatgggaagagtactgatcaaaagccaaacacaccaagatcaaaacactctgcaacagaacagcggagaaggagcaaaattaatgacagattccaaatgctaagagagcttattccacacagtgaccaaaacagggacaaagcatcttttttattggaggtcgttgagtatattcattttttacaagagaaggtgcacaagtatgaaggttcatttcaagggtggagtaacgagccagaaagattgatgccatggagaaataatgacaagccagcagaaagttttcaacctcgtggcaccgataatgggtcaagtccatcaccaacaattcctgggagtacccagaatgtagaatctggcttgagcacagcaactacctccaagacaatggatcatcaggctggaaaaatgaaca

SEQ ID NO: 24289 - DNA, 271 bp, Glycine max
catcatccaaatctggtttcacaggtaaatcacaatccccagttcatggcaaccaaaccaaaagttctggagctaactgttttgtccgcggagggtctccacgtaaggggtaaaccggcgaacaagaacgtgttcacggtggttcgcgcggagtcgttaacgagccacacgacggcgatggcaaacgggaacgagaacgggttccacacgtggaacgagaagttcagggtggagttggggccgcaagcgaggtgcttgacgattgaagtga

SEQ ID NO: 24290 - DNA, 280 bp, Glycine max
ctcgcattcgcggcgggactctgcctccgccgcggaggtgctggcgacggcgaacgctcgtgacatgatcggcgagatcgagaaccgttcgactcacttgcttggcgataaaaacagatgtagcaacacaaggagactttatcagatacctgatcaaagaggtggagagtgcagcattcacggacattgaagatgtggtaccttgtgtcaaatggcttgacgacgaactctcttatttggtggatgaaagggcagtactgaaacacttcgattggccaga

SEQ ID NO: 24291 - DNA, 259 bp, Glycine max
gcgggaactaaaactgcagtgatcgaggagttatttatacctgggactgtttactatcttaagaggaacctgggatcccaaattgatgctggaaaggattttttcaccctttacaagagggagcctggtgagcatttccagaaggtaatctttgcggggaattttatcacagaccacagatgtgatagccattattatgctttgagagatgtccttaaaggtgtgccatggtgtgggaaggaaggtatatttaaataga

SEQ ID NO: 24292 - DNA, 676 bp, Glycine max
cattttcctcacagctgcaagcatgtctttgattttccatggctatgcataggattcttcaaaggggtcgtcgattcttcaatcctccaccgcaacttgttactgctttctcaggttctgctgcttttcacgcatttccctctcatggggttgaatctcctcatgttcgggaaattcacaaacacaagagaagttaagaatgactttgacaaataccatgtaaagggtttatctcgatgcctgaactggacttcaaggtcaaatgccaatagtcaagcatcctgctatgtggtaaatcgtcattttgcatctgattgcaatgatatatgctcaaaggagttctcaagtaaggtgcagttgatcttaagtatatcatttttcctgtttgctatgtattttaactcgaatatgttgttaagcaaggaagataatgcatgcttaacttagtacatcattatagctgtcatgttgagcctataatttacatttcatgaaaagcccaagtctattatttttcattttgatttcatacattcaacactaaagaaagtgcagaaagcaatagctgaacaagtctcagggccaggcctgacttctaactagtgatttattcggatttcggacagaacaacatgcaccatggaatgaataaaaattgaaaataaacgaagcatgc

SEQ ID NO: 24293 - DNA, 258 bp, Glycine max
ggccatcatgttcaacatccgcatgacggtcactcagccctccaccgccgccggcgtgtcggaacctgcgaggaaactgccatatcggaacccagcaagtagaggttttgccttctccgtttacaagaccgaggaagggttttgaagttgtagagtcttctgggtttgtccaaaatttgtagctggtttatgtggattttgaaattttgtatgctctctctttggttcaccatgtttcagctgattgccataaacatt

SEQ ID NO: 24294 - DNA, 242 bp, Glycine max
ctgctgtctcactgactgcctgctcacgtaaagacgacaagtttggggttgctcagctttctgggagtaatgctgcagtggtttcaacacttctatcctgtcttcttgctgttgagagtttcatgggaaagaaaacaaacctgcaatccccaaatcagttattgggacctgctggtatcaaatgggcgactgtgaatagtggaagagtagatgttgctgctggtaaaagaagaagtgggcca

SEQ ID NO: 24295 - DNA, 243 bp, Glycine max
cgaggatctcttcctcgacgagggcggcacgaaccagcccgccgggttcctgtccatcctccgcgctgctgtcgccgttcctccctcgcccgcgccacccgcccccggcgtccgcggctgattcaccattcccttgtctcatcaaggtttccgccaccgtaatttggacggtaacatcaatgtttttttttagtgtctgtgattacaattattaggaccatattgcaggctgcatttgcccac

SEQ ID NO: 24296 - DNA, 487 bp, Glycine max
cgcgtccggagaaatagacttgggaatcattgctgatgttgttgaggcactaattggtgcctttattagcacagaagatgaaaaggctgctttatcgtttattaattggattggtatcaatgttgacaccaacattatgccgtatgagaatgagaggcacattagcattattgccccagaggagcttgtaaaagccaaacttttaaaatcccggctgaactactcgtttaaagacccttatcttttagtagaggctctcacccatagttctggcaaacggccagaaattcggacatgttatgagcgactagagtttcttggggacgcagtgttggactatgtcatcactatgcatttctacaaggaatattctaatgacaaattctcagcagaatttttcactaacatgaggtctatttctgtgaacaatgagtgttacgcactgtcagccattaaagccaagctggatgaacacatactctgtgac

SEQ ID NO: 24297 - DNA, 354 bp, Glycine max
gcgtcggcggtgcctccggcaccagaccctgccggaaacagttatttacaaccgcagaaagttccgttaggaatgccggtcggcgttcgcggcggcgcgaatcagtttaaccatcctcataaacagccacaaccggttccgttgaagaaacaaaaagattcagttccggcgccgcggtcctccggtggagtccgattcggaggagcgagacgcgtcgtcgccggcgtcgagcgacagttttccgccggagagtttcgagaggaagaggccgcggttgatgagttcaaacaccacgaaaggaagcggataaagactgaaggcgaatggttggggaagcgcggtgagggaactgac

SEQ ID NO: 24298 - DNA, 740 bp, Glycine max
cttcaatgtcaaaatttgatgcttccaatgaacgtatgagaaacctttatcaccgtagaaatgaagcaaacaccaacaatgttgataaaaaactgtatgagcttgatttaggtcgcatattgcgtggggaagacagccgaactacacttatgataaaaaatattcccaacaagtatacttcaaagatgcttcttgctgcactagacgagcaatgtaagggaacttatgattttctgtatttaccgattgatttcaagaataaatgtaatgttggctatgcattcataaacatgattgatcctggtcaaattattcctttccaccaggcttttgatgtgaaaaaatgggagaagtttaatagtgaaaaagtagcctcacttgcctatgcccgaattcaaggaaaagcttctcttattgctcattttcagaactcaagcctgatgaacgaagacaaacgttgccgtcctattctcttccatacagatggcccaaatgctggtgatccggagccttttcccatgggtgccaatattagactgagacctggaaaatctcgcactgctggcaatgaggagaatcgaagccaagggagcccttcaactttgtcaagtggagaagagtctgctaatggcctagactcttcaaaaatctcttaactgatttagccttccttgggcactaactgttcaacattgcaccataatgtcatgtcaacccccaagtctgtatattgacatttt

SEQ ID NO: 24299 - DNA, 286 bp, Glycine max
gttgaggttgtgagaggtgcttcgtgtccgtgctaataatgtcttcttctctttcaattccgattccatttccgatcgcaatggattctgcgtcgtctttgacggtgacacagatagcgcttttcaaacctctgaagcagaagcatcatttcgtcagaggcagagtcagtgttattagaccacttcatcgccgcctcaactccgtttcgcctccgcggtgctcttccgccggtgacgacgccgtcattactctccatgttgaaggaatgatgtgcgagggatgtac

SEQ ID NO: 24300 - DNA, 319 bp, Glycine max
ctgggagcaagaagcctacagtttttaaagaggatgtaccaattgattgtcctcttattgctaaagatcctgtcataggcaactatgtactcgagggtaacaaggggacaagtaattgggtgggtaatagcattcacatgcttgggggtgtttgtcctcacatttgcagcttcaaataaaactatgatcagttctgttcgttttgcattatgtggagttggtggctgtcttcttctgtctggttttgtcttcctaacctgtatggatcaagatgatgcaaggcacaactttgggcactctggaggtttacttgcccatt

SEQ ID NO: 24301 - DNA, 1250 bp, Glycine max
cccaaggcgtatagatatacagatacgtcgaggtacctcaacaacctcatccatttccaatcaagaagaacgcattgcgacacaatctgcctcagtacaaagaaattcaggtgaaagttctgttaatcaggcaacctctaggcgtccagatgcatccattgctggggagccaggagtaaggttagtgccaattagaaccatggttgcagcagcagtgccaggcaccttagggcgtctgccttcagaatcatctggtaattctatagggctttactatccaattcttgggagatttcaacatgtttcttctggacattcaaatagtgaacaaggatctcaacaatcaagtcagcatcacactgtgttaccgtcgactcctgaatccatattgcaaaggcaaaacacagaagattctgccaggaatggatccttatcaactccaagcacaaggcaagagccttcaagttctcgtgttgtaaatatcaatattctggctgctagtggaccccaaaacaaccaagaatctgagagacaaataccaagcagtgtacttcagtttttaaggacattctttcctggtggagaaattcacgtggaagattcaagtgtacaaggaacaactgcaggttctgccttagatcatgctgcaacatcaaggggtgctgccccagttcctgaagcacaacctaatgtcagtgagaaggaatatttttgtctaatatactccgtgaaatcatgccagtgatctctcaacaagtagggtctgagggaaatccttcagaagatcatatggctcaagattcttcaacccaggttgaaactgatgtcgggacatcacgcagacagagtgattctgatccaagccccccaaatgcaaaacgtcaaaagatggagtgatatagaggataatgttaagtttgcggtcgtggaagattgtgatcgtaagaaacagaattcggggtggatctcatgatgtcaatttggtattatgtgcttacgtagttttctatatcaagcgtgatttcattttctcctgctgtagacaacccttaagaagactgctctccgaatgtgacattttgtacatcattggcattggaattgagcttcccttaagttcagtttatgcttggaattggtaatagaattcaacattacagtggagattagccatcttataaacttaatttggcgtccgtgaagttgaaccagaactaaatcaaacatttgtgaatttttaatcaggaagc

SEQ ID NO: 24302 - DNA, 825 bp, Glycine max
ctcatattccagaatgcaatttaactgaatcagaggaagatataagcaagaacagtgccatttactttgacattttgggaatgtatatggttgtataccgtcaaaagtttgctaatatgctgcacaattcagtaataatgcagtcacttctaatatgggttacatcattggttatgggtggtataccagctgcagcttcattggccttgtcgtgttcgagtgttctcctcatgtgggtctttgccttaagtttctccttccttggttcatttctcctacctttgatatcttcatctccagtaccatatgtttcaagcccaatgttggtggttggattatttggtgcaccagcttttctcggagcattgactggtcaacattttggttttcttctacttcaaaaatatctttcgaatacactatcaaagggaaggcaattgacccccattattaaagcggctgttgtcaagatggaggctgaaagatggctctataaagctggatcctttcaatggcttatacttctcattttgggaaactattttaaaattggctcttcttacttggctcttgtttggttagtttctccggcattcgcatatggtttttttgaagcaacacttaccccagccaggctaccaaagccactcaaactggcaaccataattctggggttagccactccgattttattttctgcaggcatatttattcggctggctgctacacttatagggggtatggttcgatttgataggaatcctggtggtactcctgaatggctaggaaattttgtgattgctgcttttattgcttctcttttat

SEQ ID NO: 24303 - DNA, 277 bp, Glycine max
aataagtgcacaaattagcagatctcgggaaagtgaaagtgaggtgagtccaagcaaggacagtgagcttatttcccatattgcccctgaacttgtttcaatttcaagcatcatatgacaagaagaatcacttttcttagtggtaatttaatgtaggttgatctgcaatttgttgacaatttgtaattgtatttagacttttggttttggttagtatgaaaaaatttaaaaattgaagaatgttctaattaatttccatttatttactactttgtga

SEQ ID NO: 24304 - DNA, 306 bp, Glycine max
ggcctatgaccttttcacctcagaagggtaccccacagtgacacagccacctgctccttggaacaaccctagaggccaattcagtgcagaacaaggggtcacggaatggaacaaaactttaggggtgcccttaaacaaactgaatctgggtttgcccttttatggttacaagtggagtttgtcagattctaataaaaatggactctttgcaccggccaagcagggacttggggcagtgaagtacaaggatatcaagaatgttgcggcgcaggttgtgtttgattccacttatgttaccaattactg

SEQ ID NO: 24305 - DNA, 909 bp, Glycine max
ggcgtctgccaaaaccaaaaggtcagactgttggatctttccggaagggacttaccatgttgcctgatgcaatttctgccagactaggcaacaaagtaaagttatcttggaagctttcaagtattagtaaactggatagtggagagtacagtttgacatatgaaacaccagaaggagtggtttctttgcagtgcaaaactgttgtcctgaccattccttcctatgttgctagtacattgctgcgtcctctgtctgctgctgctgcagatgcactttcaaagttttattaccctccagttgctgcagtttccatatcctatccaaaagaagctattagatcagaatgcttgatagatggtgagttgaaggggtttggtcaattgcatccacgtagccaaggagtggaaacattaggaactatatacagctcatcactattccccaaccgagcaccacctggaagggttctactcttgaattacattggaggagcaactaatactggaattttatcgaagacggacagtgaacttgtggaaacagttgatcgagatttgaggaaaatccttataaacccaaatgcccaggatccatttgtagtgggggtgagactgtggcctcaagctattccacagttcttagttggccatcttgatcttctagatgttgctaaagcttctatcagaaatactgggtttgaagggctcttccttgggggtaattatgtgtctggtgttgccttgggacgatgcgttgagggagcctatgaggtagcagctgaagtaaacgattttctcacaaatagagtgtacaaatagtagcagtttttgtttttgtggtggaatgggtgatgggactctcgtgttccattgaattataataatgtgaaagtttctcaaattcgttcgg

SEQ ID NO: 24306 - DNA, 292 bp, Glycine max
cgcgcgacccggaacccgctatgcgtccctacattttagaagtgtccggcggaaacgacgtcgtcgacgccatcgcgcagttcagtcaccgcaagaacatgggaatctgcgtcctcacgggttctggaaccgtcgctaacgtcacgctccgtcaaccttccaccacgcccggcaccaccgttacttttcacggccgtttcgacatcctttctgtttccgccaccttccttccgcagcagtccggcgcttctccggcggctcccaacggattcgctctctcgctcgccggacc

SEQ ID NO: 24307 - DNA, 423 bp, Glycine max
ggcagcacaatcaatactaaaacaggattacaaggatgatatcacaagagaagaagcagtgcaacttgcattgaaggttttgagtaaaaccatggacagcacaagtctaacctcggaaaagcttgaacttgcagaggttttcctttcaccctctggaaaagtcaagtatgaagtttgctccccagaggccctgactaagatgttggtgaagtctggtgtaacccaacctgcgtcagacaccgcctagtttgctattccatgcttattgcactttgattatgcctatcttattcatttgtggtgcttttggcattagatggcagatattggctcaaacatttttcaagttataacacattgcatgttggtaatgctaatggctttgtattagagatattgatggtatgtgcgttccatttgatt

SEQ ID NO: 24308 - DNA, 331 bp, Glycine max
cggaaggggaagaagaaaacgaatcggaacaacaacaacaacaacagcaacaacaacaacaaccacaaccaccacgcgaacggcgaggacaacgtgctgataacgccggtgccgcggttcccggacaagagcgacgacacggaggacatgaagatttgcctctcgaaggtgtacaaagcggagaaggtggaattgagcgaggacagaatgagcgcggggagcaccaagggttacagaatggttagggccacgcgcggggtggtggaaggcgcgtggtactttgagattagggttgtgaagttgggagagagtgggcacacgcgcctcgggt

SEQ ID NO: 24309 - DNA, 877 bp, Glycine max
gaccctataaaccaaattcgcaatcccgtgttatctacacttcccttcccattcctttcaatttggagaggaattcatttgaattagggttactctttttcttcgtttcatcatggacgctcagagagctctactcgacgaactcatgggtgcagcgcgcaacttgacggaggaagagaggaaggggtacaaggaagtgagttgggacgataaggaagtgtgtggattctacatggtgcgcttttgccctcacgatctctttgtcaacacgcgcagtgatctcggaccttgccccagaatacatgacccgaagttgaaagaaagttttgagaaatctccaagacatgatgcatatgtaccgaaatttgaagctgaactttctcaattttgtgagaaattggcgatggacttggatagaagagtaagacgtgggagagaacgtcttgctcaagaggtagagccaacaccaccaccaccactgacagccgaaaaatctgaacagctatctgtgctggaggagaaaattaagaaccttctggaacaagttgaatctcttggtgaagcggggaaagttgatgaagctgaagctcttatgagaaaggtggagacacttaatgctgagaagacagccttaacgcaacctcaaaatgataaggtgttgatgcttggtcaggagaagaagatggcactctgtgaaatatgtggttcgtttcttgtggcaaatgatgctgcagaaaggactcagtctcatgtcacaggaaagcagcatgttggttatggaatggttcgcgacttcataaatgagtttaagactgctaaggagaaagctaatgaagaggaaagattagctcgggaaagagaggcagaagaacggagg

SEQ ID NO: 24310 - DNA, 442 bp, Glycine max
  unsure (1)..(442): unsure at all n locations
tccatttcttacaccgtcaacacatcgcaattctgaaagggaatggaaggagatattaagcttttggatggagatgacactcacaaaaagaaagaaagttctctggtgaagataaaagtattgtttttcgccagagcccgtgatctcactggcctgagtgagttgccactggaggtgtcatctggaagtactactcatgattgtttgaaaaagctttttgtcaagtttccaagtttggaagaaataagaggctgcatggttttggctctgaatgaggagtatacaactgagtcaaccattgttaaagacactgatgagttggccataattcctccaataagtggtggctgaatcacttaatatcactgcatggtacttctacttttgtaatctaatactgattgataagttaatatctcatgtagggtaaattttatntgtg

SEQ ID NO: 24311 - DNA, 301 bp, Glycine max
gatacatggcactgttttctctccaaaacaacctctttccacttccattgccaactactccttcctcaacggagagctttccctctgttgcgacgcgtcgagccacaatctttggggccagcctcgttcttctctactcaacaccactcacacttgcacagcagctgccaaatgatcatgatgagcttcagcaacaagaagaccaccttgtgcaactctttcaggatgcttcactgtcggttgctttcatgtaaagaccttgaattggctaaagttcccaagtctgctgctaagggtgtca

SEQ ID NO: 24312 - DNA, 292 bp, Glycine max
gttgcttccctgcattggcaagaagattccctattggtttctgccacagtcttcaacacagctacgaattcgatcaatctgggcctccctccattaagatggctgcagaaggctacacttttgggccttacaagatacaccacactgaagtgttctactccaccaatctctcttacgccatggttaacctgcgtcctcttctccctgtttttacatgtgctcatctgttcgaagcgcgaagttaagcgtttcggtgatctcactgctgatgagacttctgatttatggctca

SEQ ID NO: 24313 - DNA, 407 bp, Glycine max
gtaatttggagagggaaaaacgcaacctagcggcagcgtaagggtggcgcgtgagagagatggaggaaggtaaagaatggagcgtgaaagagaagaacgaaactacgacgcgaccatccctaaaatcggatgttccattcaacaaatatgaactatggaaacacaagttgagggacaattgctacaaaagggtgcgagaggacagaactcgcttactctggaaatttagatacaaccaacaggaggaggaggacatcgtcaagtgtgcattccaggatattgtatctgatgaattcaacaacatcatacgcacggatgagctgttatgggagtatgaaggtcctcccgatactacttaccagggtgaatgccaagacattttgttagaaatgcaaagaatcttttat

SEQ ID NO: 24314 - DNA, 478 bp, Glycine max
aaaatgaagacatgactatcaagaagtctccgatgcttacagaactagatatgcaagctataaaagttactgaaaaggaatttggagaggatagtgatacagattgtgaaggacagatggtggatggaattctgtcttctgtttctaaagtaccttatgaacttccttctcaagaggagctcattcggcaagcttttgctggggatgatgtagatgatgattttgaaaaggataagcaggagatcctcaacgaagaaaatcctgagccagagaagcctctattacttcctggctggggccagtggacacatgtacagcaaaagaaaggtttaccatcttggatgctgaaaaaacatgaagatgcccagaaaaaaagggcagaagccctcaaacagaggaaggatgctcagctaaataatgtgattatatctgagaagatagacaagaaggctgagaaactacatactaaatcattgcc

SEQ ID NO: 24315 - DNA, 317 bp, Glycine max
tctcgagccgaatcggctcgaggaaaatttcaagtccaacgacactcacttcgtgcaggggtggtgctactagtttgttgaaagagcatcttttttcaacctcttgatttcatgagtcactattttgactgaacaaagagatgaggtttatgcccctttccagattaatttgccgtctccctcggcattatacacgtgggcctttgcaatctcgtgccttacagactgattctgttcctaaagatccacaggctaagccaataaagtacagaatccctcaattctatgatccctatggccccagacctccaccctca

SEQ ID NO: 24316 - DNA, 404 bp, Glycine max
aggttgatctgatggatgatgagatggtgcctgaggttgccttgaggtcaatgagctccatgagacgagggacgcgatcgcacataatcttctgcatcatggtttggctggcacttcttttctttaaactgaaagggttgtgtttggtaatggtgtataccattttgctgcttgagataatgatgattcttttgcttgtttattattattacatggtattgaagtaagtcactggtcattgtttgttgaagagtctttgtatgtaaaagatgtattggccctttcaacagatatatgattatagtctgcacagggttagatcctgaatttgtaacccccaattccatactttaattgccaaataagatattgaataataaaattagaacattcttttgtagcat

SEQ ID NO: 24317 - DNA, 553 bp, Glycine max
ccatcgttaaggcacatccaaatgcaacagggaaagaaacaacaaagcctttcgcacagtccaaagactacaacagctggattttccatccctacctgtcaaggctcgccgtccgaaacaaccggtgtgagtcgctggttcaagcctgaggtggaaacaccgtcctcaattcgttctattcaaattgaggaaaaggctatgaaagatctcaagcgcttctatagcagggccaagattgtcagaaagcaatcttgatgccatttaataatttatctaataaagtagcaagagggctctttcctgttctcctctaccttgagcattaccattttttctcatccttttttcactttccttattagtacaatgactgaattaatctgtacagatagttgcagtgtacatcctttctttccatatcaaaattgtagttttagtttcttagcatctgggtcttttccattttctgtgtttcccaactagcactgtatatgacccaagatttttttatgtactcatttttaaccgtctcaactcaaagttagagactggt

SEQ ID NO: 24318 - DNA, 573 bp, Glycine max
  unsure (1)..(573): unsure at all n locations
gaacggtctctcactacaacaatcactatgatgactcgggctttttctggttccggtttttgtgtgggcttttggtgtttttattggggatggggattaatgtatgggctgatagggttttgttgcggctcaagagcgagggaaagggctacgtggtgccgcgcggtgggttgttcgagctcgtggcgtgtccgaattactttggggagattgtcgagtggctcggctgggccgtgatgacttggtcatgggccgggctgggcttttttgtttacacttttgcgaatttgggtccaagggcccgggccaaccgtaggtggtatttggagaagtttggggaggattatccaaaggagagaaaggctgttattccttacttgtattgagtttttttttaatgattttcttttattggatttggaattgggaatgtgggtaaaatgatgaataattgaatgtggtgatgaatgatgcaatgcagctcaacttgcttaatgtgaggtcaaggatttttttcttcttcttaattatcaatttggtttctaaattnnnnnnnnnnnnnnnnnnnnnnnn

SEQ ID NO: 24319 - DNA, 413 bp, Glycine max
gatgaagttggggagcgtggtggagcaccagttgtctgcattgaagatgcctccaaacgctgttttgagttttcaagtggcttagctgcttggacacctctacttttattggttcctttggttcttggacttgataaagtcaatcctaggtatattccattattgcgctcaacttttaaatttccccaaagccttggcatcatgggtggcaaaccaggtgcttcaacatacattattggtgctcagaatgagaaggcattctaccttgatccccatgatgttcagcaggttgttaatatcagtggggatactcaagagcctactagtacttcgtcataccattgcaatattatgaggcacatacccctagattcaattgatccatccttagctattggcatttactgccgaga

SEQ ID NO: 24320 - DNA, 409 bp, Glycine max
ggtgacagtttggggcagcctgagcaggaagaaaagtggtggaaacggacagcttctagacgcttccaatattatggagttggttgaaaaccagcaagtttttaccaccttggtggaccataagtttcacagacaaagatgccaaactctctgtcaaacacctgcaacctgctgctctcactccactaatcctcattctcatcacatctatttcgaggaaaaagtgagcaagagtgagctcaaagaggttctctcagacattctattgggtatggtgctggactgaagcgtgaccctattgtgatacttcgcattaatggggaagatcttctggagtttgttaacggttcaggttatgaagctgaaatggtacccatattctctcaaattcccctgacagatcacttca

SEQ ID NO: 24321 - DNA, 541 bp, Glycine max
caaataggttttatttttcaattatcccagctccacattcaggtctatagcacacattgcaccaattgtctgtgttcatataatctttttgtggccatccctttgatcttgaataaaccatggccaaccttgagaattttagcaacccatacacgcaccttgcttttgaataacttcgaaagaatctgcaactccattatgcacatgtccattcacatctccaattttcgtagtttgttgtgcttatctatgcttcaatctttttttatatgagaaaatttctgcccggagtttcattgaccatgtgtaatctctcttcacctgaaccctttttttgcaagtgggaataatctcttcttctgcctggaaggtcctgtttgccactgattcccaacttatctaaggtttgaagtgaagagaagtaatcaggagactacaatgaggcttcacattgctatcttttgtgattttagatacacggtgatgttgtgacaagtgaaatgcttgacttggtactttattacacaatacatatatgaag

SEQ ID NO: 24322 - DNA, 1109 bp, Glycine max
gcgcatacaccaccatatatcacatacagagtaatttcaaaggatggttatatgcatgatcctgtacccataacagtatcagatcccatcacaatgcacgactttgccatcacagagaattatgcaatatttttggatcttcctttgatttttaggccaaaggaaatggtgaagaataagacactgatattctcatttgattcaaccaagaaagctcgttttggtgtgctacctcggtatgctaaggatgaaaagcttattagatggtttgagttacccaactgcttcatattccacaatgccaatgcttgggaggaggaagatgaagttgttctgatcacatgccgccttcagaatccaaatttggatttggtcggtgggactgccaaggaaaagcttgaaaatttctcaaatgagctgtatgaaatgagatttaacatgaaaacgggtgaagcttctcaaaagaaactatcagcatctgctgtagattttcctagggtgaatgagagctacactggaaggaagcagcgatatgtatacggaaccacattagacagcattgcaaaagttactggcattattaaatttgatttgcatgctgaaccggataatggaaaaacaaaacttgaagtaggaggaaatgttcagggtctctatgacttgggaccagggaagtatggctcggaagctgtttatgtccctcgtgtccctggtaccgattctgaagaagatgatggatacttgatttgttttgtacacgatgaaaataccggaaaatcatttgtgcatgtcatcaatgcaaaaacaatgtcagcagatcctgttgcagttgtcgaattgccgcatagagttccatatggtttccatgccttctttgtgacagaggaacaactgcaagagcagggtaaactgtgataattttggcagcctcactgtaccgtcctgcctcagtctttgtatacaacaaataatcgattgtaccatatatatccagtatctcattaaaccaatgtttttaaaaccggattggtagttgagtcaatggaggtattggttgaataacagtgattgaatcaataatgattaaatattatttttgtttttaatat

SEQ ID NO: 24323 - DNA, 730 bp, Glycine max
ggattattaagtagttatcctccaagttggcttagggcaaagcctgtttcaaagacaatcagtgaacctacgagggaaatttctggaattgaccgagaattgttggagactttgcagaatgacttggatcgtatgcaactgccagacactattcgagtggcatatccaggctgcaatgcccatactcatcccctctatgcggtgctctttatcctgccagccaccatctatttccaattccgctcttgtttgccttcaacccagcattacaaatcctgggtctaactccagtagttcaactattcctcagaggaacccagttctatcaagggttgcttctaatgcatcagggaaatcaaaacaacaggacaatgatttggaaatagatccttggacactcttagaagatggtactggatcttactcttcggcaggtaatactgctagcataggaagtggtgaccatgctaatattcgagccaccagctggcttaaaggggctgtaagggtgagacggacggacctcacatatgttggtgctgtggatgacgatggttgattaacaaaattttgttggtttggcctttggagtatacaaagccttcagctgacagccagtgcaattgcggttttgttatttatatttgatgcatgaatggcatgaagataccattttgtgcttgtccttcttgtgttgaagtttaaaggaagctggaggggcattgttttg

SEQ ID NO: 24324 - DNA, 283 bp, Glycine max
gttacatggacatggatgatttatcccaacctcctcctttggttccaaattcttacacctggcctgctgcttccccaattactccaccaccccttatggctgaaaaccccaatttcgtgcttccaaatcagactttaggattgaatctcaatttacaagatttcaacaacttagatgctacccttcacctcaataactcatcatcatcatcctcttactcatctgcaacctcatcttctcctccacaggaacttccttccgttggaatatcacagggagaggg

SEQ ID NO: 24325 - DNA, 286 bp, Glycine max
gagcgtgaaaaggttagggtttggatttaggggggtgtctcttcttttcgttctctaatgcctagtgagtgactattctggacgtagagagtccacggtagctcgtgctgtccttctgcagggccaggaaggggtcctcaggtgcttttcagagcttgagacccagcgacccccgcccaggaggctttctccttcaccatggccgaactgatccaaaagaagctgcagggagaggtagagaaatatcaacagctgcagaaggacttgagtaaatccatgtcaggga

SEQ ID NO: 24326 - DNA, 283 bp, Glycine max
cttctctgctgatttctggtttgaagatcaatctcactgcaatgggaaaacatatcttgctgctcccactgggcctgtctttgctcatgagctccctgctagctttgcagtgcttcagatgtattagcttcgattctacaggattttgttatgttggaagacatatatgtcagacttatcctgatgagatttgtgcctgggttgtagtaaccactcgagatggaaaatttgtatatggaaaccagagctgtgctgagtgcaagctacgactgttgagcatgga

SEQ ID NO: 24327 - DNA, 338 bp, Glycine max
agcagataaagaagcaaacggctctcgctgagctggtgaaacacaagcccaaggccacagaagatcagctgaagacggtgatgggtgacttcgcacaattcgtggacaagtgttgcaaggctgccgacaaggataactgcttcgccactgaggggccaaaccttgttgctagaagcaaagaagccttagcctaaacacatcacaaccatctcaggctaccctgagaaaaaaagacatgaagactcaggactcatctcttctgttggtgtaaaaccaacaccctaaggaacacaaatttctttgaacatttgacttcttttctctgtgccgcaattaat

SEQ ID NO: 24328 - DNA, 287 bp, Glycine max
aagagatcagagagtgaaagatagatggcgggggattcaagcctgctggctgcagtctcccttctctctgcctgtcagcaaagttattttgctttgcaagtcggacgagtaagattaaaatacaagatcgcacctccagcagtcacgggccctctggagtttgagagactatttcgcgcacagcaaaactctttggagttttattccgtattcatcatatcgctgtggatggctggatgctatttcaatcaagtttttgcaacctgtctgggtctcctgtacatata

SEQ ID NO: 24329 - DNA, 200 bp, Glycine max
cttggtcttggctacagcctgagtgaagaatttcctactgaatgtaccaagttccagtttttaaggggggaaaagtttcaaacagggaaaaatggaaaaaaaaaagaaaaaaaatcactaaaaactcccataaatcttgtttctggcactttagaaaaactgcaaaaaatacataataaagaatatatatatatatctac

SEQ ID NO: 24330 - DNA, 281 bp, Glycine max
cttccttaccaggctgctcatccacatgggtctgctcaagagtgaagacaagatcaaggccattcctagcctgcatggccccctgatggtgttgaaccacgtggtacagcaggactatttccccaagacccttgcaccgctgctgctggcgtttgtgacaaagcccaatggtgcatctggaatcctgctcctttgcccgccacagtctgctgcagacgctgtacagcatctagatctaaaaccagctgcttcttgtccctcaccctgccccagtgactggg

SEQ ID NO: 24331 - DNA, 290 bp, Glycine max
gttgtggtcagctgtggaaaggaaacctcattgccaccatgaacttctccggcaagtaccaagtgcagagccaagagaactttgagcccttcatgaaggcgatgggtctgcctgaggacctcatccagaaagggaaggacatcaagggggtgtcagaaatcgtgcatgaagggaagaaagtcaaactcaccatcacctatgggtccaaggtgatccacaatgagttcaccttgggggaggagtgcgaactggagaccatgactggggaaaaggtcaaggcagtggttaag

SEQ ID NO: 24332 - DNA, 279 bp, Glycine max
gcaactgcgggtcctgaagcgcgggctgcagcaggtcaccggccacggcggcctgcggggcctcccacgggttttcttcagggcaaatgatataaggctcggtaccttggtgggggaagacaaatacggaaacaaatactacgaagacaacaagcagttttttggccgtcaccgctgggtcatatacaccaccgaaatgaatggcaaaaacacattctgggatgtggatggaagcatggtgcctcctgaatggcaccgctggcttcactgcatgactga

SEQ ID NO: 24333 - DNA, 573 bp, Glycine max
attgaattcttttcccccaattgaatccgtcattcatgactccatttaatcagagcattgatgtttgatgctttgaaattcaaagatatttcaaagaaatcccgggagttatatgttgtttgatttaaacaggatttcgaaacgacaaagcttcctttcataatgggagatccattactgcggctgccatatcattgcagggaactcttatgtttgcttgggtgaactcccgtcaaattaggttcgaacttctgtcgattgattatcaagggaagcaccccttcaattatatgaggccctgagtttctcattaaacagctagctgactagtcattttgtcaccgacgagctaattctgtgctagttttcaaaatctactattgtagcaaaagtttaatctgtgtaacagaagaaactgataggttaagaataaataccgtggaaaatagagtaatggttgtggaatagcaactttggattttcgatattgaaagctcctacacggttcataattatctatgaacggtagttcaagttttgccatgaaattgcaacttcatagttagtttttgg

SEQ ID NO: 24334 - DNA, 294 bp, Glycine max
ggctccggctcgaggtggaatctagtgtggccttgatcccgctgaagatgcttcaaagctttattaagaaggtctgggtccccatgaaaccctactatacccaggtttaccaggaaatttgggtaggagtggggttgatgtccctcatcgtttataaaatcaggagtgctgataaaagaagtaaagctctgaaaggctgcagtcctgcgcatgcccatggccatcactaactgctcccccagtccactcaggatgaatacgtcagctgaacttaagcaagctgtgtagatggga

SEQ ID NO: 24335 - DNA, 280 bp, Glycine max
cagtccttgaatggttgttgaccccggacacctaactgtccctgatgatcctggtgctgcccgaattcccttgggcgccaagctccctcgccaggcagccagtccctccgtcaccagcctttgcatctggctagggaaatcggggttggagacatacagtctgctttgtgttgaaacccagatttgtaccctgtgtttacactgtgctgcctgctctcggggacagtgggaaggaagtgcagccgaggtggcagacccctctgattcattgcctggtcgg

SEQ ID NO: 24336 - DNA, 268 bp, Glycine max
tgggaagacttcacttgtgtttcctggctctaagaaagagaggtggcttctgagaacatttctagaatagtttgataagctatcccatcattctcctgtggtctcactgttctagagggtacaactaacccgtgtggtggaggacattttcagatttgtatagaagatgcccagaaagttccatcccaagaagcctcagaaggcttcagctagtgtctgttagacaaaggcaggatgagccctgagcgacaaattctgcagctctgct

SEQ ID NO: 24337 - DNA, 278 bp, Glycine max
gagagacagagatagacagagatagacagagagacagatacagacatagagacagacagagacagagagagaggagtcagagagctgttagtaccatgtctacccgttaccatggaccgcaatgtctagtaaggaaatgaaaggtaaacagttatctacagtcctaggaaccatgcctgtctcctaaccacctactgccttaggctatggcctggtctgtgcccctaaacactacattagacagtgacacccagaggttctcttaggagggtgtctgg

SEQ ID NO: 24338 - DNA, 277 bp, Glycine max
atggacctcaatctagacctagacttggacttgggcagggagtcagacctagaccctgggtctgagctgggttccgagatccacgcccaacccgaactggcgtcagagcttgagatagatgtccagacagagcctgagacagaggaagagtcagaaagggagaggaagtcacagccaaggaccaggacaagggctcagagcccctggcagagctacttggctgcttatcgctttggttctacaagctcccagtccgcagggccgcctcagacgcctc

SEQ ID NO: 24339 - DNA, 210 bp, Glycine max
caaatgttatctcctttcctggtttcccctccagaaacccactatctccccctgcttctatgagggtgctcacctacccatccactccctcccatctccccaccttgacattcccctacactggggcatcaagccttgacaggaccaagggcttctactcccattgacgccagacaatgccagccgcatatgtagcaggttctagatcgc

SEQ ID NO: 24340 - DNA, 270 bp, Glycine max
gataatctgtactgtagccaatcaattctattctccattcttgcttaattgtattagccataaaggagttcaggttcataggactcagtttctctattaaaccgtcattgattatggaaatactgtcttaagcactatgcagattaacaccatacttttcttccattacatctttcaagacagtcactcacaactcagaagactgatacagcattagatgataaaaacaagattcacagatatatgtagtgacactcaaactaggagtct

SEQ ID NO: 24341 - DNA, 242 bp, Glycine max
gtgtgtatgtgtgtgtgtgtggcagtctttatcttaggtcattcagtaagacgctttgtcagttcgtgtgaggaaagtgtttgacaacgaggtcccacttaaatgactcatgcagctacttacctctactccagctgcagccaggagccaccggatgggctccattctccccctgccatcgaagtagtgacggactggcttccccggcatggcagcaattgcttgagctctcctgttataaa

SEQ ID NO: 24342 - DNA, 264 bp, Glycine max
ggcccgcgctaccgagaactggccaaaaactggatccccacagccggcatgtggggcactgtgggcgccgtgggactggtgtgggtctcggactggaccgctgatcctggactgggtgccgtacatcaatggcaagtttaagaaggacgattaggcagccccctcccccaccacaggcctcgatggtagcatgcgctgaggcctcagaaacagcttagtcctgtggaggacacggaggaagaagtctgcatcgatctggggagc

SEQ ID NO: 24343 - DNA, 210 bp, Glycine max
ccagcatggctgccttagggacctggctatccataggtgtccggaggttgcacagtagtgcagtggcgcgggccggcagccagtggcgactccagcaagggctggctgccaatccttccggctatgggcccctcacggagcttcctgactggtctttcgcggatggccgctctgctcccccaatgaaaggccaacttcgaagagaagctc

SEQ ID NO: 24344 - DNA, 255 bp, Glycine max
gtgaagtgagagaccgaccatggtggctcgagtgtggtcgctaatgaggttcctcatcaagggaagtgtggccggaggagcagtctaccttgtttatgaccaggagctgctggggcctagtgactagagcgaggctgtcctgcggaaggccgaggaagttgtgccaccagcaatgtaccacttctgccaatctgtgtgccagcagacgggtctggagatgtcacagctcccagcccctccaaaattaactttccg

SEQ ID NO: 24345 - DNA, 251 bp, Glycine max
tattaaggctttttctagattctgtacaacttttctataacaagttctattttgtgtgcacatctcccctgtatgtatttatagcaacccaagcctctcaaattccaggtccctcttgtgccaccttttccccttagccttgactgtcactctcttctgctcaccgaggtagcctcgggggctacttctagccaccatgacagccagacagcaggaacttgtttttgtcagctgtggtcgttgatacagga

SEQ ID NO: 24346 - DNA, 263 bp, Glycine max
gagacagagacagagacagagacagagacagagagaggaaaatgggaattgtttctgcatttgaagcatggggcaaaacaactgggaacaattccctcagctaattctggtagtgtcatttacaacttcggggttttcttcgttgtttttattcaaactttgtaataagacagagacaatttcagttttgtaaataaaacgttaaccttttaaaacttattcacatacatcctattattattgcttaaggttaaaaaaagata

SEQ ID NO: 24347 - DNA, 261 bp, Glycine max
gtgtggagaagaagtaccccaatcgggggaacacctgtctggagaatggctcgttcttactgaactttgcaggctgcgccgtgtgcagtaagcgggactttatgctgatcacaaacagatccctgaaagaggaagatggagaagaaatagttacctatgaccatttgtgtaagaattgtcatcatgtcatagccagacatgagtatacattcagcatcatggttgatttccaggaatataccatgctggtctgttgtgtgg

SEQ ID NO: 24348 - DNA, 258 bp, Glycine max
cccagatccaaatcaagcctggcctgaaccccaaagtctttcacagaagtaaaagagtagaggccatgtcctcgggcaggggtggaggtgagagaatatatttttaaaattatatgggaaacacatgtgaatattaatgataacatttttattgacaaagatttataaactttatgaccattttcattttcatacagtaataaaatctttctgtaataaagtgttttttaaaaggtaaaacaaaaacaaaaagggcgg

SEQ ID NO: 24349 - DNA, 254 bp, Glycine max
aatttaaacccatttgagtcactttttttttcccaaaaatactgccagatgctgatgttcagtgtgatcctttgcctgttgagttacagaaagtggtcttcagttgtagaatgtattgtacctttaacacctgatgtgtgcattcatgtaacggaaagggcaacaataaaatagcgatcctaaagaaagagtatggcagaaagacctctgtaagcacagccttattttcctctgttgtccagaatacttacaat

SEQ ID NO: 24350 - DNA, 257 bp, Glycine max
atagatgcatagagaatatgccattgttcatctacgtgatactgatagagccgtggtattttcacagtgtaagcaaattgcatatattcgatgcctcataaaccatcgctgacatgcccacgggagcacacgtattcccttctgaaaatcaggagaagctgtgttttaagaaagtgatttgggtaactccttctgtatttacacattattcaatcatattaaaacatgtttgtatttacattctatcagttttgatt

SEQ ID NO: 24351 - DNA, 254 bp, Glycine max
gggaatgtactttgtgtcctctgtactgctgatccgcatgagtatgcccccagaataccgcaccataatcacagaggtcctcggagagcttcagttcaacttctatcaccgctggtttgacgtcatcttcctggtcagtgccctctccagcatattgttcctctatctggctcacaagcaggcgccagagaagcatatggccccttgaactcaggccgcctgccaacttcaggaaagaagacacagtggggatg

SEQ ID NO: 24352 - DNA, 419 bp, Glycine max
tgtattccttgcgttgtgcggcagaggagaagtgcctggccagcacagcctatgctcctgaggccaccgactatgacctccgagtgctgttacgattcccccagcgtgtgaaaaaccagggcacggcggacttcctccccaaccggccacgccacacctgggagtggcatagctgtcaccaacattaccacagcatggacgagttcagccactatgacctacttgatgcatccacgggcaacgaagttgccgagggacacaaggccagcttttgcctggaggacagcacctgtgacttcggcaacctcaagcgctatgcgtgcacctcacacacgcaggggctgagtccaggctgctatgacacctacaatgcggacatcgacttgcagtggatcgacataacagatgtgcagcctggg

SEQ ID NO: 24353 - DNA, 240 bp, Glycine max
ccgcgctgtccaggtcaactgctcgggtagaacatcctttcagttccttaactcgccttctcctgcgccctcaactgagtggctaatactacattccttttgtgaattcaacggtggggtttgtttacctacgtggtttcagcttattttgaacaaagatctttgtctctttctactggaatgtgcacacagtgaatgtttgttagaacttcacaataaagacactgttttccttttctc

SEQ ID NO: 24354 - DNA, 663 bp, Glycine max
ctgtgcttgcctggaaaagtggattgggcatcaatgcagttgttactttatttccaaagaagaaaagtcctggaaaggaagcagagagttttgtgcttctcagaattccagtcttcttcagctccaaaccagaaatgaattgagttttatgagctccagtcaagcctttttctggattggaatccactataatgaagaaagaagtgcctggctatgggaggatggcacatttccctcaaaagatttatttccagagttctcaaagttcaggcaagaccactgcattggttatagtataagcagagaaatttcttctgaatcctgtgaaaataaataccgttttatctgtaagcaactgcctacttaaatgtttcttaaggcaaagggtatgaacaagaaaggtccagggttactaaaagtagtaacagctctcagtgttaccacgtttttatcttgcatctgcgggatttctgttccctaacatatcattttcatacatttggacctaagtaatttatgcttgattactttttcccccttgtttatgaaattccggtggataaaaattggggttttataaatattttggtttggggaatataatttttttcccatatttctgtaaagttttcttggaaacattaaataaaatttattccaaac

SEQ ID NO: 24355 - DNA, 839 bp, Glycine max
gacagagcggccgaggcccaacaccttcatcatccgctgcctgcagtggaccacggtcattgagcgcaccttccatgtggaaacgcctgaggagcgggaagagtggaccaccgccattcagactgtggctgatggactcaaacggcaggaggaggagacgatggacttccggtcaggttcacccagtgacaactcaggtgctgaggagatggaggtggccctggccaagcccaagcaccgtgtgaccatgaacgagtttgagtacctgaagctactgggcaagggcacctttgggaaggtgatcctggtgaaggagaaggccacaggtcgctactatgccatgaagatcctcaagaaggaggtcatcgttgccaaggatgaggttgcccacacgcttactgagaaccgtgtcctgcagaactctaggcatcccttccttacagccctcaagtactcattccagacccacgaccgcctctgctttgtcatggagtacgccaatgggggcgagctcttcttccacctgtctcgtgagcgcgtgttttcagaggaccgggcccgcttctacggtgcggagattgtgtccgccctggactacttgcactccgagaagaacgtggtgtaccgggacctcaagctggagaacctcatgctggacaaggacgggcacatcaagataacggacttcgggctgtgcaaggagggtatcaaggacggtgccaccatgaagacgttctgcgggacacccgagtacctggcccctgaggtgctggaggacaacgactatggccgtgcagtggactggtgggggctgggcgtggtcatgtacgagatgatgt

SEQ ID NO: 24356 - DNA, 254 bp, Glycine max
cggctcgagtgtaacatttataagtgctgcttacatcactcaacaacaacaaaacatggtaatggagtagctgttgcccttctccggttgtgtgtacagtatgtgtggaattaaaaagggaaactgttttcacaagcggttctgtgtgtcataattggatcagtccgtggctgcccatattgcactgagcttgccagtggggactgccagggacgtcctcggtcggatccacgtgagtagtggttgttgcagaa

SEQ ID NO: 24357 - DNA, 258 bp, Glycine max
attgatggcatttatcccatggtttaacatgttaattatactgtaataaacatggctttaatattaaactttttccttattatccaaagtcaccacagtccatttcagtaaatataaaaatatatgcttaatactttgtacaatactggtttttggtccaaacaaaactggatcagaaaagccaattaattcatctttaagaatccccaatttttttttaaagatttccaaatggatttaggcaactttgaataatgg

SEQ ID NO: 24358 - DNA, 259 bp, Glycine max
cgaacttctgaaagaatctgggagccagagtattaagaattactaggaatttttacgaccaacacaaagttgaaaaatgaacactattgccatttgcagcaagtatggccatggtacgaaggatgtggggggtcagcccagcccactctttgcctccacccctgcctagttgtggcctggcctgggcgggccttggtctttgttctcttctccagcttggagacagggctgcagctggtgtctggctgtcacccagctg

SEQ ID NO: 24359 - DNA, 241 bp, Glycine max
acggaaaggtttgtgtcccagccttccttcgagtgtattggtaccatttgtttctattcatctgaccactacatgacaataatgaaaacaggacatgtgtgttagctcctgaagttgcctcttcttggagagctggtgattaacaagtgtttataaataatcgtgtcataaagttattgatgacttactagaattaaaaacaaaacatagaccatgaaaaaaaaaaaaaaaaaggggcgcc

SEQ ID NO: 24360 - DNA, 197 bp, Glycine max
attcaaggaagctttctccctatttgataaagatggggacggcaccatcacaacaaaggagctggggactgtcatgcggtcactgggtcagaacccaacagaggctgaactgcaggatatgatcaacgaggtggatgccgacgggaatggcaccattgacttcccagagttcttgactatgatggctagaaaattga

SEQ ID NO: 24361 - DNA, 252 bp, Glycine max
cgatctctcgttgatctccaactgccgcctccattcgccatggaccccaactgctcctgtgccacagatggatcctgctcctgcgctggctcctgcaaatgcaaacaatgcaaatgcacctcctgcaagaaaagctgctgttcctgctgccccgtgggctgtgcgaagtgctcccagggctgcatctgcaaagaggcttcggacaagtgcagctgctgcgcctgaagtgggggcgtcctcacaatggtgtaa

SEQ ID NO: 24362 - DNA, 231 bp, Glycine max
tataggtcctgaagagtgaagatttaaattcaaggtcatggctaaacatctgaagttcattgccaggactgtgatggttcacgatgggaacgtggaaggtgcctacaggaccctgaacagaatcctcaccaccgacgggcttattgacgccatagagcgacgacgctactatgagaagccttgccgccgccgccagagggagagctatgaaacatgccggaggatctacaa

SEQ ID NO: 24363 - DNA, 257 bp, Glycine max
attggattgcccccaacttgtgaggctgaagactgttgaagacctttggatgctggaagactgttgccgagaagcaggggcaggactgggaagccctgagggtgaggggagggaagtggtgtgatcagagccccaggcatgactgtgatggtggaactgttgccttaatgacatcctctaccttatgtaacttggtgccattttgaaacttgaatatagaaggtttccagagaggaaaaaaaaaggagaaaagaaac

SEQ ID NO: 24364 - DNA, 224 bp, Glycine max
aaaggactcgatgacatgatttatagacaaaagcagtgggagaaaatactaaagccccactgagctgccagccaggtgtctgtgactacaggtcttttatctgctacatatatatttttacaaaaatgaaatccatattgttcgctattttgctgtctgctttgctcccgtatcaacatgacttgcacgtcttttcccatcaataaatgtgccatgatattttt

SEQ ID NO: 24365 - DNA, 248 bp, Glycine max
ctctccagcccctgctcccagccaggggctaaggaaggggagaaagacaggggagaaagactctgtaaatactatggcatttggctccacccatatcctctccgtcggaaggtttttgttgaagagccaaggcccttggaccacccctgctgggctccagagctgcaggggcttcctgcactaggaacagggtggggctgtcgccttagatcccaccgaaaccctccatcctcctccagcagctgtgt

SEQ ID NO: 24366 - DNA, 249 bp, Glycine max
cctgagtttaccagcctgttcattgaaagctcttactctgtgcacaaatattaaagtcaccaaaaaagtgaactgttaatcattcttattttttaaactccattagattgactggtatcattagctctgctgcaagggcacatttttcaattcaatctggtgatatatttgctaagtctacagaaatcatgctgtcataaactcaagctggctcttctgtctttgtgtgaatgactgggatgctgccac

SEQ ID NO: 24367 - DNA, 245 bp, Glycine max
ttcaaggaagtggacgggaagtctcgagattctttacgtgctttcacgagaacgttcattgctgttcctgccaccaattcagggctatgtattgtaaatgacgaattatttgtgcggaacgccagccctgaagaaatccaaagagccttcgccatgcctgcacccacaccttcttccagcccagtacccacactctcccaagaacagcaggatatgttacaagcattttctacccagtctggcat

SEQ ID NO: 24368 - DNA, 245 bp, Glycine max
gtctcccttcttcttgttcctttggctgtgccagagaccacaccaggctccatctcatcttcttcctccctgatctcggtaggtggatcatctaggcaacggatctcattgtccacaccatccccattaaccaactccagtgggctgcctttgctagagatggctacacctccatgcaaaagcttgactttctccagtacctcctggcaggccttctgggccacctcagggtcaatcactgacag

SEQ ID NO: 24369 - DNA, 243 bp, Glycine max
tgtagagacaactttctggaaaggaaaatcataaagttcatttcatacactcactgtctgaattaaaacagacactcaaaagccagtttctaagttacattctaacttttctctctcaaacaaccctatcaactgtctaaatgtaggtcagagggatgtcttccaaagtctctaaagatcaagtccaaccagtaagttctataaatgcgaggcatctcttcatgctgctgttcagaatgggaa

SEQ ID NO: 24370 - DNA, 245 bp, Glycine max
ggaaacatttcgttatctttaaggtcatacagaccatagggaaaaccggctagctgtgttttaggagccttctgctgggcctctcaccctgggcttttaggttaccgtgcagctgggcagaagctctggggaggcagtgtaccttgaaagcatccacacgggagagaccatattgctcacctctgttctttcatacaagttttaaaatggtgactccatgttcttcccccaagcccagtcagttc

SEQ ID NO: 24371 - DNA, 243 bp, Glycine max
gcgactggcaaagaagaaagctgacctttatgatgaggagcaagaccaggacgttacactcgcacaagacttagaagatatgtgggagcaggaattcctccagttcagacctggagctcgggaaacagaagccgataaaaaaaatgacagaacctcattgcatcgtaagctagacagaaacctcattctcttagtcagagagaaacttggagaccaagatctttggatgcttcctcaagtcga

SEQ ID NO: 24372 - DNA, 236 bp, Glycine max
caagactttcacaaccatccagttgtcaacgaagttatgcctcctaaggatcaactttttgcctatttcaaggctcgggctcaaagcttcgttgctaaaagacagaattaatatagtgagactcagaatttccatcgaggtttcagtattgtatgcaatgtgaagctacttgtctatgtttcgatattgcggttgtattgtcatttttcaatgaattatgtgatataggatttctc

SEQ ID NO: 24373 - DNA, 244 bp, Glycine max
gggaaatacgcacagaggaagaaaggagacttggtgaggatccactttctaggaaggactctcgttggggagatagagattcagaaggcacctggagaaaaggaccagaagctgactctgagtggagaagaggcccaccagaaaaggagtggagacgagtacatcgggatgatgagaggcctcacaggagagatgaggatcggctgaggcgctggggggggacgatgaagagagagagtcgtct

SEQ ID NO: 24374 - DNA, 254 bp, Glycine max
ggccaccagagctgagagacaccatcaggcaggaacacacagagacagtactcttgaagatgctctccggctctagaaaggagaccatcaagctgccctgagcttcccgaaggactcctgatgcgactgacagctatgaaggagactgcacagcaggctctgagatcccctggctgatgaagatgtagaactcagctcctccagccccttgcctgcctgaatgctgagatgctgccatgatcccgccttgatga

SEQ ID NO: 24375 - DNA, 230 bp, Glycine max
attacaattgtgggagcccaaattgaaccctagcaggtccggtgccgccatggccctttaagaagtctcctctccagggcttcaaatacgatttgcccttggagcttcctcgcatcaccccccaagcccgcagccccatcagacctctccctcccatcctgtgcctacaccctctcacccaaaatccctcacacaaatcataaaaaactccttctccttcctataaatcg

SEQ ID NO: 24376 - DNA, 396 bp, Glycine max
aaataatgttttgttgatagcagtccagtccacaactcttaacccaagaggattaccaaaagactgtgttagaagaagaagagctcaaagatactaacaaatcagcaaattcagaaggaaacacagattctgcagataaaacatatagctagcatcaataagtcttgcttgccatggctgaggagtttcaagctgctatttgtggtgaaagttggtggaatattattaatccaacaagaagtgtgtttcctcttatgccatcaacttgttctgtggcagcagctgatgcaggaaactacaacacttggcaaagttttcttgatgccgggaagccacaccagagtggaactggtagcatcttcatcgatttcaccttacaaatgatgggttttggca

SEQ ID NO: 24377 - DNA, 533 bp, Glycine max
cattaccaaacttctctacaaaacaaaaccaacccccccctccttaaggccttaacttttgagtcaaaatttatcatttcaaagcactctccaatagagataagtttgattcatccatcccagttggttggttgtaacccggctctggcactgttaaaggtttcaatctctcattgttgccagcttttgtgtacatgccagtttatagcaacctttaccacttcttttaaaccaaaacaataagcttttttcccttcattgttgtctcagaaaaaaaatggccccttctggaaggacaacaacagcatcaacaaggacaacctcaaagacgacaacaacaacaagaagaacaagacagcagagaagaacaacagcaacaacaacaaacttcaagaagaagcagcacaacacaaagagcaacaacaaaaaacaacaagaacaggttcttgttccaactgttttgccctctagctgcagctcctcctccataagctcacaagactcttctaattcaaaggaagtgaacaacaaca

SEQ ID NO: 24378 - DNA, 287 bp, Glycine max
aataatttatatcatgatggtacatcttctgatcttcagaccttaaaaagtatcacattacaaagagaaagcataagtagtcccaacagtgcagctttatactcgttttgtatggagaatagggaacacttttctttctttgtgttgtataaatggaggaatgtaaatgaagaatgtattgcattctttccagataccttctcaattttcactctactatttttcagctttccactgtcattcttgccagcacactcaatgctggtttccttaaaaaaatgttgaaa

SEQ ID NO: 24379 - DNA, 285 bp, Glycine max
ggtaaccactgatctgattgttggcaacataggcaaatgccttcctataatggggatttcttgctaaatgaaaaggcagccctgaagagtaaaacatcttagcaatttcatgatcaagtgtctctctagcttgcaaattaaagacattttctacagatgatgtctttctcttttttggatcaacaccaagagtgtttgtatccatttggtgttgagtagaaaccagaggtaatgacacaaattttgtttttgacctctccaccctcaatgtagcctcattgtcta

SEQ ID NO: 24380 - DNA, 359 bp, Glycine max
gggaatttgaatgaagaaccccgtcacactggaaacataacacctcctgtgcatcattctaggaatagaaactcactaacacatgaagagccattaaagcaaaatggacaggttgtcgagggtggatttgttacaacggagcaacaactatttgaaactggaacggtaaaccatgataattctgaattacagtactgtgctccgtttatgaattcttggtcagacccatgcctagaatttgcatttaagactcttacaggcgtgataccagtagaggaaaatttaacacttcaaggatgtttccaggaacctgttaactatcatgaacgaagggatggtggctcaatgttgccagattt

SEQ ID NO: 24381 - DNA, 616 bp, Glycine max
accaccggcgccggcgacgagccacctccaccaccaccacaacaacaagaagaagaaatcgacgatcgccgtgaaaaagttcggcggaggttgagggccttgtctacgattccggcggcgctaatagtgtttttgttcggcttagtgttgtgttttattcgtgacccttcgattttcggagatcttaggtttgggccttcgaggatttctttgattaagattacatgggaggatttgaagattgggtttgtcagcgccgcaattccgcaaataccgttatccgttttgaattccgttatcgcggtatgtaagctgtccggggatttgtttcccgaacgtgaggcttcggcgatgcatgtttcggtgagtgtggggcttatgaattttgtagggtgttggttcggagccatgccttgttgccacggggctggtggtttggcgggacagtacaggttcgggggtaggagtggtgcttcggtggtgttccttgggattgcaaagttggtgcttgctttggtgtttggaaactctcttggcagaattttgggtcagtttcctattgggattctgggagtgcttttgttgtttgcgggaattgagttggctatggctgcta

SEQ ID NO: 24382 - DNA, 332 bp, Glycine max
agcaaaccgtagggtaaggaaagaatggcagaaaccctgaaaacggcgtccttgataacctaactaaccgttttagattcgtttgaaccttccgtaacacccaactgtctcggatagcttcctgagcaactccgatgggccagggccatgaaccccccaaatcccctgcggctgcgccaccgttgctccgccgcatccacaacctcgacaacgcaatctccctctacatccacaccctgacccgccccatcgctccacgtcccctcctccgcttcctagagcttttggcggacttccgcttcttcttccccgtctccctctccctctacctt

SEQ ID NO: 24383 - DNA, 1026 bp, Glycine max
ggtgtgaggtagaggaggacgtggtagagcccattctggccgtggaccaagtggcgctcttaatggtggaagaatggctggtgctgttagtagtagaagaatggctggtgctagtaatggtggaagaacaactggtgctgttcgtagaggtcctcttatggttaacactcggccgtcatcgtatgctattgccaagtctattcgcagagctaggccctttccatggcagcatgatttgtttgaagatagcttaagagctgctgggattcaaggagtagaagttggcaccaagttgtatgtttccaatttggaccatggagtgaccaatgaagacataagggaacttttctctgagcttggagagttgaagcgttttgctgttcattatgacaaaaatggacatccaagtggttcagctgaagtcgtttatactagaagaagtgatgcatttgctgctcttaaacgatataataatgtacttttggatggaaagcccatgaagattgagattgttggttccaattcagaattgcccataagtgctcgggtaaatgtcactggggtgaatggacgtaggaagaggactgttgtaatgacgtctagaggtggacaagctggaggtggtcctgctatgcctacacgtggtgctggttggggacgtcgaggtggcccaaggagtggcagtggacgtggtggagctggaggtcgaggtcgtggtcgcggcaggggtggagctggaggtagaggtcgtgggagaaaggacgctgttgagaagtcagcggaggaacttgacaaggagctggagacctatcatgctgaggccatgaacatctcttgatctcggaagccccagtttattttgtaatattacttaagattggcttccttgtacaaaagctcgtttccttggcgtttactttgaatctcttactgcttggtgcttttaaacatgccatcctatttgaccgcatttaagtcttgttggaggctgaatgatcaacttagggatttttgaagttcagagat

SEQ ID NO: 24384 - DNA, 489 bp, Glycine max
gttaccatggtcagatctacttcgttaatagcgtgttttgttttgttttttttttatggggattttcctgctgactgatgttgaagaatggtgaatatcttttttctggtcataatctgatgttttgccactttggaaactgtcctgttctttggccagtctattcgcagagctaggccttttccatggcagcatgatttgtttgaagatagcctaagagctgcagggattcaaggagtagaagttggcaccaagttgtatgtttccaatttggaccatggagtgaccaatgaagacataagggtatatactatgttgtatcatcatatggttcttttagtcactgtttctacccaatctatctggaagttctcttgaaacttgatttgcaactcaggaacttttctctgagcttggagagttgaagcgttttgctgttcattatgacaaaaatggacatccaagtggttcagctgaagtcgtttatac

SEQ ID NO: 24385 - DNA, 251 bp, Glycine max
gagctctgcaactatcaagatcgttcctcgtacgataagcattggacgacacttaagtattccagattcaaatttatgagctgagtggataaatttgataaaggattcagaaactgttacatgtatttgcttgtttatgtcgttttggttctgtattatagaagttcgcgctgcagtctgataagatactattctatgattatgggccatccttctgtaaatgtggatttttatttttcataatcaaagtt

SEQ ID NO: 24386 - DNA, 281 bp, Glycine max
  unsure (1)..(281): unsure at all n locations
cccaaaccttgacttggctcgccactccacacgccattgcaagtcccgtgctctctcgctccttcaccttctactccccaaactcgaaaccccacttactgaactttgttaaagttcataaatttcacaaaatttttcgaccttctttgcttcaaaatctacttccttcaaaatctacttcctctcctatcactaaccgtttcaattttgatttttgggctccatagcttggaaggcagaagaagatggagaagcttaacttgngccttgtgtcttcccca

SEQ ID NO: 24387 - DNA, 937 bp, Glycine max
cgggtttctgtgtctacaaaggtgacacctatcttgtgtacgagttcgcggagaatgattctcttgaggattggcttcacagtggtagcaagaagtacgagaattctacatctctgagttgggtgcagagggttcatattgctcatgatgttgctgacgcacttaactaccttcataactatactagtcctcctcacgtacacaagaatttgaagagtgggaacgtgcttttggatggcaattttagggctaaagtttcgaatttgggattggcaagagctgtggaggatcacggggatgatggggggtttcaattgacaaggcatgtggtggggactcatgggtacatggcacctgagtacattgagaatggtttgattactccaaagatggatgtttttgcgtttggggttgtgcttttggagcttctttcggggagagaagctgttgttggtggagaccagaatggatctggggagaagatgctgtcggcaactgtgaatcacgtgcttgaaggagagaatgttagagagaaacttagaggtttcatggatccaaatttgagagatgaatatcccttggaactggcttattccatggccgaacttgccaaactctgtgttgctcgtgacctcaatgcaaggccacagatttctgaagctttcatgattttgtctaagattcaatcctccacgttggattgggatccgtctgacgagcttgaacggtctagatctgttggccaaatctctgatagcagcagatagatagatgatgagcttggcattatgctttttggtgccagatgcatccagatgcacaacaaaacgtccttttggggttctgttccaacacatgattcgtgacttcaatttttatttgtttgacgtctacggagttctgaacttttggctttgaatgtcaattgagcttccag

SEQ ID NO: 24388 - DNA, 378 bp, Glycine max
atggatatgtccctcacataattcttccatccgattcactttgtcagctttgttttttaatgttttgctgatcattgtaggatggaatatctttatgtttgaattcctatgatatgtgtttgttattattttgcatcagattagtccacatatgttgtaatattttcctccgtgatacattgtttgttgtctgtgatgatatcttttaaggctgtttctcaaaacattcgcagtggccgcccaagagctttcgccttcgccaggcttgagagctagtgctgcttttatccttccttggatgtctgagacattatacctggaattatttgtgttatgtcttctatgtttgtaatccttaagtaaatttgtcacagtttt

SEQ ID NO: 24389 - DNA, 447 bp, Glycine max
gctcgggggcgctttacgcaatcccattacactctctttctctccatttccttctattctctattattatatccttttctatttttatttctctcattgcattctctaatctttaatctctattctctacccattcatattcatccccggtttttctctgtcactgtcgcataacactctttgaaccaccgcaactaaagtaacaaccccatgtcctgaacctcacttttcttctcgccaaagcttccaattttcgatttttcccttgttttcagagaaatatcaacaccccagaaaataaaattgagagaatagaagaaaaccttttctgggttaatttggtaatttcctttttcttctttcatgggtaacataggaagcagcggctccaacagccgccggagacacggcggcggcggcggcagcggtaggcggattcacccgcct

SEQ ID NO: 24390 - DNA, 336 bp, Glycine max
tccacgcgtacgcccacgcgtccgtcctcattacaacaatatcgttcgatatccccaaagacactgcttcgaaaccctaattcagaaaccaatggaaccagaaaccaattgcatagagctgaaactaatttcctgcaaggacataagcgccttcaacttcttccaaaaactcaccctttacgcgctcgtcttcatcgagagcgaggatcccaatacggatctaacggcggaacagaggcagatgcagagaacgttaacggaccgagaccccgacggcgatggcagcaacccagagtggaatcaccacgcgcgtttcgatttgtggtggctttcgca

SEQ ID NO: 24391 - DNA, 274 bp, Glycine max
gagcagcaacctattgttagtagcactgatccaggtaatccagaagctgtagcagaccttagtcatcaatcagtttctgatatttagagccctgattcgattcttttttgaaaagacattctaactttttgtcttcagagtggactggtggttatgttaacctttccgcttttgtttaagtttggcttggctttaaatagtgattaccttgtggcaagaggttcattcaggggtattggtgtaagaaatttgagtgaacattctaatatgatat

SEQ ID NO: 24392 - DNA, 604 bp, Glycine max
gtttcatcgggcaatgaaagctgcagatgcaataaggaaagagattagaatgattctaaagaaaaggaaagtggatttggaggagaagagggtatcacctactcaggaccttctatcacacatgcttgttacatctgaccccagtggaaggtttacgactgaaatggagattattgataacatacttcttctactttttgccggtcacgatacttctagatcagtgttatcattggtcatgaagtatcttggacaattgcctcatgtttttgaacatgtcttgaaagaacaacttgaaattagtcaagggaaagaggcagggcagttgttgcaattggaagatgttcagaaaatgaaatactcttggaatgttgcatctgaagtcatgaggctatccccacctgtgagtggtgcttacagagaagctaaagaggatttcacctatgctgattataacatccctaaagggtggaagctgcattggaacactggttcatcacacaaggacccaacgctcttctcgaatccggaaacttttgatgcttcaaggtttgaaggggcagggcctacacccttttcatatgttccatttggaggtggcccc

SEQ ID NO: 24393 - DNA, 562 bp, Glycine max
ttggtatcgtggctgctactgggatttcttttatacagtttgcaaataccaattccataagaaatatctatgttctgggcctaaccttgttccttgcgatatcaataccacaatattttgtcatgaacactgcaccggatggtcatggtccagttagaacaggtggtggatggtttaatgacattttgaacaccatattctcttctgccccaactgtggctataattgttgggactcttgttgacaacacacttgaaggcaaacaaacagctgtggacagaggacttccatggtggggtcctttccagaataggaagggagatgttagaaatgatgagttttaccgtcttcctctccggataaatgagtacatgcccaccagatttctctaaagtactctaatatatgctacctgtacttaaccccttctgcgaacttaattaaattctcatgtacaatgaaatgaccctgtaaaatatggatagacaaattttcatcattggccagccagcagccaaattttaccttgtataaatggattgacatagtaattctttggatg

SEQ ID NO: 24394 - DNA, 290 bp, Glycine max
catcagccttcttcagattatgtcgccttatgactaagtgccgccaggcatgtgaatcgctaggcttagctgacttcccaacctctgagaggctgcagtggcatggtcattttcctggaaagccagactggtctgaaaccagccgttttgtggcttgtaccatggtagattcagtgacgggagctatatacattgctttcactatgagtcatttacctttcacagttaccttgccggagcgtcctggatacaagatgggaactcttgtagacaccagcaagcctacacca

SEQ ID NO: 24395 - DNA, 263 bp, Glycine max
gattgctgcaaacaggctttttgatttagagccagacaatgaacataattttgtacttcttctgaggatttatgaaaatgcaggcagattagatgacatggagagagttagaatgatgctggttgacagaggattggattattagaaagctgtacatccaaagacttgtcaccacaagtacaacccatttgttttctcttgatttcattcagtttccattttgtcccacaaaatgtgattacgatgaacattctttgttgtaa

SEQ ID NO: 24396 - DNA, 205 bp, Glycine max
caagtttgagtactgttgtgttggattgtctgtttgatgatgtttgttacaatttgtactagtggatgtatttgtacttgggtatctagtttcttagttttggtttgaagacatgcacgtagatactactatatcacttattattcacggcctagttggtcgatttatctttgtatttccaaaaaaaaaaaaaaaaaggggggcc

SEQ ID NO: 24397 - DNA, 217 bp, Glycine max
gagcgcgaatttgattttgctaattttggaagtatagggataggttgtatgaatctatgatgtaaatggacgagcctgatttatagtgacgatgaatcttcttgcccttgatgagaataagagagattagttgactggaacatatggagaaaatagtgattagaaaaattcccccaaaaaaaaaaaagggggggcccccggattaggaccccctccc

SEQ ID NO: 24398 - DNA, 335 bp, Glycine max
tctttggcaccgacggaaacctactagccaagcaccgcaagatacatctttttgatattgacatccctgggaagattacttttattgaatcaaaaactcttactgctggggagactccgacaattgtggacacagaggttggacgcattggcataggcatctgttctgacattcgatttccagaactagctatgctatatgctgctagaggtgctcacttactctgctaccctggggcatttaacatgacaactggaccattacattgggagttattgcagagggcaagggctacagataatcagttatatgtggctacctgttcacctgcccgg

SEQ ID NO: 24399 - DNA, 264 bp, Glycine max
agcatatttttatccggaacgaaaatggagacctctctgcgatacggagaagattccaaagctttacgaatccatgcgaagcaaaaactccgaatcgactccaacacctactttcagttgcgcggagagcttgatacaagacttggacaaccaagttcgtccagtgccctcatcagacatttctatccaagtttatcagcaacccttggcgtaggagtgcgttatgataagcgtgacaagttgcgttacactgtgagtgcaaag

SEQ ID NO: 24400 - DNA, 955 bp, Glycine max
gaaagcttggactgaaagatgaggaaatgattcaaaaggtcgataagagcctaagagaggtttacttcagagccgccacgttgctagcagtggcagtgctaaggttagcttgagcactacctctgaggacatgatcgcgttgagtttgaagagcggtaagcgtcgcaaggccacacattggaacatccattgtacctgatcagttggatgtccgtggccatggcttctgaggatgtgatagcaaagcaatcttggtttcaaaccaaatgaacctttgcttgatcttggaagcacaagattgtggatgattggcttgatcagcacttgggtggtgtacttacggtatggttagtacctcatttcaataatcaaagcaaagaacatactcgtttgcttggtactagggcggtaagacaaattgtaaaaagtaatgtaaaattttgcaatgaaatactgttttggtgaaattgttgtttggtgtcatcgctaccaaatgatgcaatatctttgcatggattatctctgcaaaaagattaacgcgtgctgtaatgctagtgtcactaatgttcatcacatatagcagtaatcttcgatctaagatatgaaactataacatgaaattttttattctttttaatagctaaaatctagaatttacgagagtgacagaagtcagtggaggtgaactttggtaatactggttctgaaagaattgatgttaaagagaaattaattcctgtctgcaaattacggagtattctatgaatttcattttgactggatagcaaagtagcatcatgttttaagagaaaatgttgtatgttttgtggatttcttttaattgtagttcagttaattaattatatttcagttgattgagcagaatatatcaattgttataaatccttttgtagtgtttttgattccttggatatttttttaaggtgtttttgtt

SEQ ID NO: 24401 - DNA, 542 bp, Glycine max
  unsure (1)..(542): unsure at all n locations
aaaaccaaaagcaaacaacaatggcgaaccctgaaggcagtagcagaggctctagatggtcccttaagggaaccactgctctcgttactggaggaacgcgtggaattgggcacgctgtggtggaggaactagcggagtttggtgccacagtgtacacttgttcgaggaatgaagaagagctgaatgcatgcttgaaggagtggaaagagaagggattttcggtttctgggttggtttgtgatgcgtcttctccaccccatagagagaacctcattcaacaagtggcctctgctttcaacggcaagctcaacatacttgtaaacaatgttggaacaaatgtgaggaagccgacaattgagtatacagccgaagaatattcaaaattgatggcaactaacttggactccacataccatttgtgccaacttgcatatcctcttcttaaagcatctggaaaatgaagtattgtgtccatttcctctgttgcaagtcagacaagcgtangttctggagccatttacgcagcaactaaagctgctatg

SEQ ID NO: 24402 - DNA, 312 bp, Glycine max
tcgagccagtcctttgtaaggataggattagagccagcactagtcggtgttgcctcagctccccctcattcatgttcccatctttcataagcttcaaccaacatgctccatctccaactcacttccgagagccatgtccatttcatttttagctcacattcccaacactgattcacgccttctcttgaccaacaacatgatggattgcacttgcacttgtccattttaccctccaacaactctggccaacgctacaacccgcaagttaacctttgtttgttcctcccaaagggttctccccattgagaagct

SEQ ID NO: 24403 - DNA, 328 bp, Glycine max
gatgacaacaatcaattttccgtacctcttctcacctggttttattgttattttgcttttttcctgcgtgctggcattcttcttgaattactgtatttttctgaacacaacactatattcagctgtgacacagacaatttgtggtaatctgaaggatctctttactattggccttggctggataatttttggtgggctaccatttgatttttggaatataattgggcaatttctcggctttgccggatctggcttatacgcctaatacaagctcattggcaagtaacttattcaagtcctctagatgatgtctttttttcaatttggg

SEQ ID NO: 24404 - DNA, 607 bp, Glycine max
cggctcgaggctatttccttacaaagaatggtgggtagtacctgccaaagttgccttcgatcaaactgcatggtctgcactttggaacagcatatattatactgttgttgcattactgcgtcttgatcctcctatgagtattttaaatgaattgaaggcaacgtttttccccatgttgacggccggatggaagctatggccatttgcccatctcattacttatggtgtgataccggttgaacaaagactcctctgggtggataccattgagcttatttgggtgaccatactttccacattttcaaatgagaaatcagaagcaagaaactctcagtctatggtgccttcagaggtgaaatccaccacatatgttcatcctcctgaggagtaacgagtggagatatgaccagaagcagtgggagaaaaatgactttgctaaatcaaattttgtccttgatatggacatagatttttgatgcggaatgtgaaaaagctaattatatatacgttgcatcccgcggaaattcatgtatgttaggtaacatcaactttccagtaaacagtacacataatgtacttaaatttaatgagtaaataatttatgtcc

SEQ ID NO: 24405 - DNA, 270 bp, Glycine max
gatacattccgcgttgacacagaaacacttcaattagttggtggaagagctttagcaatttatttgactaaggaagaaggtgctaaatttggtagcccgaaactactcaaatagaaattcgcattttgcaagatgtgtcaagcattggcgggtatggtatggtatggtatggtatgatgaaaagcaggaatttgatactgtagaaatatgaagaaatggacttagcggccagacaaaatgacaccccttttttcagataaaactagtggg

SEQ ID NO: 24406 - DNA, 379 bp, Glycine max
cgcctccacccccgcaaatcctcgatgatgctatttacgccgattgacaccacactcctcaaaaagcaccttggacctcctcatcaaagaagtggagaagaaagtccatcaaaggtcggagattagagaggacacaacgaagatggtgaagaaggctccacggttgccgttgatgaagtaaagggatagcacggagagagaaatggaggaaatagagaagcatgaaaaaaggatggtggcagcgatgcgttactaggatcgacagacaaagacaaatgatgggaaaaagaagcctaccacatacgacaattgagaatcgccacaatactttttgtgggtctctttccctcgatttcttctctctgtttatattgttatg

SEQ ID NO: 24407 - DNA, 393 bp, Glycine max
ggctagtattgccaccattgctgctgtggtggtggagcttcccaatgctcttctatcagaatatcagcctgatgtgcctggaataagtgatcgtcgaacagttgcagctactccaaggcagcatccatcaagcagcagaactaatgatggacatttttcatctggtccaaagaagagtgaactgaagattggagagtcatcagcctttttcacctatgtcaaagcaacaacactgaagagcaacgttgaagagagtgctcatgttgacaatagtaacaatactactactactactactactacagaagttaggatggaagatatgaatcaagcatgtactgaacagggggataatggccttaaaacacacaacaatggagaaatgtttggaaa

SEQ ID NO: 24408 - DNA, 282 bp, Glycine max
gaggttgactccttgatgaagctctttgagacaacaataaactcctcaattgcatggaaggaattcaaatatacgtgattggggattcatcaaaacttcctgagtctctaaggagtactatagctaatgcagaaaagagtacaaaacataactcgagactccaacttattgtggcaatgaattacggtgggaaatacgatgttgttcaagcatgtaaaagtgtagcaaaaaaagtcaaagatggtcttcttcatttggacaacatcaatgaaaaaattattg

SEQ ID NO: 24409 - DNA, 296 bp, Glycine max
atggatttctctaaatttggtggaatgggtgatgcaatggatgacattgatgagagtgatgatgaagagcaagaagtgtcaaagcctcttgaacaggatgctggcgaggcatcaacagagaaaaaagaggctgctccaagcacatgatgccgttgcagttcaaggcgctaccctagaagatgtgtatgaaaattctcgagtgaaattttctctatctgtagcttggattggtagttgttttaagtagagacgttcatgtgtctctcccgtgttggctgaacattagcgcgtattat

SEQ ID NO: 24410 - DNA, 277 bp, Glycine max
aaaaggacgtcttgcacaactgtgcttactctagcttaccaaagtcttggggtagtatatggtgacctcagtagtgtccctatttatgtttacaagacctcattctcagggaaattgagcctcaaagaagacaatgaggaaatttttggggtgcttccatttatcttctggacatttaccattattggtctcttcaaatatgttttcattgtgatgtctactgatgacaatggggaagtttgagcaattttgctgaaaatgttgaggttcactttgc

SEQ ID NO: 24411 - DNA, 261 bp, Glycine max
gtccacgtcatctcaaggctaacggctgccaccagcaccgagcgcctcgacctgctcgacgacgacagacacgtcatcggcttcaccatcgtcgggggcgaccacaggctcaggaactaccggtcagtcacctcggtgcacgggttcgagtgcgacggaaagatctggaccgttgttctggaatcgtacgtcgggacgtgcccgaaggaacaccgaggaggatacgcgtctgcttgctgatactgttgtgagctgaatctg

SEQ ID NO: 24412 - DNA, 377 bp, Glycine max
  unsure (1)..(377): unsure at all n locations
cggctcgagganacgcgagtgtagttgtcgcctcggttgaacaagtttcgccgtcgtcgttgttcgatcgcaacctctcgaccatttctgccaccgtcaggtttccgtgcattgaattggtcatgattgtttaacaaatatttgagtctcaaaatggtgattctttcctcgttgccactgaactattcagctttccttcgtcaaggtactccttttctgccatcaaagtttccagcaagagttgattgtcacagaaatgtttctcagacatcacaaacgatttttagaatantaataagatgaaaacatgcaaactatagttgcacgatatttgtgactctgctgcaagaatgacatcatctagctatgatgatgat

SEQ ID NO: 24413 - DNA, 435 bp, Glycine max
tgatacagggaattaaggacagtgttaccatggaggatactgcacttactggactctcatagtttgtgaactacgtatgctgagaactaatcacagcaagtactgttaaagtcctcaattctcttgttgaaaaggagagaaaattgcttgtgcaggaacttggagggtgaatactaaaataggttaagcagtcatttttgcgggaatgtcatgaatattatacagtagaacattactatctgctgtggctggttagtgcggtttattattagttcaatagacacggtaagaatgtatttgagcttattcattttttctctatttgtctctgacaagaaagggatgtatttgcggtataaaaaaaaagagtaaaaaaggttgaatggggtcattggggtcaagactttggcaggtaaagatgtacacgagcttagt

SEQ ID NO: 24414 - DNA, 445 bp, Glycine max
ctctgaacgagactttggatgctgaagtccggcgtttgaggcgtgctgttgcagaacttggcggtgaatccctcacaagttgcatggctcgacagcttgctattaaccaacaaatgttcgagttacagcatcagcagcccagccaacagagacattttctactgcaaaatcaccatactcaggaagagatacagtctcggtcacagcagattcaaggcaatgaattgcatccccaggcacagattcagtaacagcagattcaacgcaatgcattgcatccccagccttaaattgcatagcattattgcctacaaatggtgccaatagtggaagcagaataccttttttttcaaaccaatatccaatacttttggacgtggagctggtgaggtatgagtataatcaatcgtacataagcagtgatctagccttagtttgcttgtag

SEQ ID NO: 24415 - DNA, 297 bp, Glycine max
atttgaatcaaatctcagaaaatcctcttccactcaacaaaccctcccaagagctaaagcaaccactatggcttgctggtctgcagaaaatgccacaaaggcctacctcagcactttgaaaatgggtcaaaagtgcaaagagccagatgtagcagagtttatatcagcactagctgcaggaaacaatgcacaacttatggttgtggcatgtggtggtgcagctgactccaccacactagcattggttgctgctgctaaccaaactggtggcaaagtcatttgtattgtccctagcca

SEQ ID NO: 24416 - DNA, 534 bp, Glycine max
gaaggggaaaaaaacaaacactaggcagtgtctgtgttctcttccgtttccgattattccaattcgaaatctgcaggatgagagtggaaagagagaggaacagcaacacagtgatgccggcggcggcggcggcggcggggcggaggagaatcgggtacataaacgcgcaaacggcgtcgttgcagcagcatcagatccgtggctcctcagtgctgacgtggttcctgcagaggccccactccatccccttggtccttcgccgtcttcctcttcctcgcgtggctctcactccgcctccagcgcgtggcctacgcgccccctcactccttccaaacggacatcagggccaacctcgccaggttcgactcttccgaggtcgcaaaggacaaccgcggctggatcttcgatcctatcgccctcgcccgcgcttccggcatttcaggtggagcagtgtcgtgtgcgtcgcttcacgtgggagaaattcggccgttgaagataagagcgaatcacagacaccacgattctaatgagact

SEQ ID NO: 24417 - DNA, 284 bp, Glycine max
cgttatcctctccagatagcgcgaggggagagagaatgacaataactgttttcttagttcctccgacgcctcatttgtgcaactacaaaaactcatggccaatttccacttatccttctctttcttcttcttcttccaagttaattgttccatgtgctctccttcccctccaacatctattatcgaagagggtccttctccttcaccagatgaacttcccgttgttgttgatagctcggaattcacgaggggttgtaaggcatgtggaagagaagaaattgagc

SEQ ID NO: 24418 - DNA, 225 bp, Glycine max
cgtcgggcttttcgttggctccgtcgtgctcggcggcttgcaagaggctgattgattgaatggtgtgggaatggtatgtggatgaattcatcttagattgtctgtttgtgtcttcgtagtcgtagaattgaggaggcgacgttatggcagtttcttttggtgtaagaaaattgtaataaaacatgtgaaatgacaataatggactggaaaatcaaatagcctaat

SEQ ID NO: 24419 - DNA, 840 bp, Glycine max
gaatgaagttgggttttgttccaaacaccctcccttcctccttctccttaacttccctaatcttcaaacttcccatctcatttcccttctctcaccccaaaactacttcttcaggaagaaagagcttagtttttcgtgtgcaaaacattgaccatagaattgaaccaattcctagtcatttgatggcttcagaaaatgaattctcagaactcaacagaaatctttacccgcaaatagaaccctacagtacaggatttttgaaggtttcagatcttcacacaatttactggccgcaatcaggaaaccccagtggccatcctgttgtgttcattcatggtggtcctggagggggaacttctccaagcaatcggaaattttttgatcctgacttttaccgaattgttctatttgatcagcgaagcgctggggaaagcacaccacatgcttgcttagagcacaacaccacatgggtcgctcattgatagacacttgaaagctaagagaacacttggagattccagaatggcaggtatttggtggatcatggggaagcacacttgcccttgcatacagccaatctcacccggacaaggttactggcatgatcctcagggggattttccttttaaggaagaaagaaattgattggttttacgagggaggcgctgctgctatattccctgatgcttgggagccatttagagatcttattccagagagtgagagaggatgctttgttgatgcctataacaagagattaaactctgatgatatcaaaactcagtatgcagctgctagagcgtggaccaaatgggaaatgatgactgctcatcttattcc

SEQ ID NO: 24420 - DNA, 272 bp, Glycine max
caaacacggttgagaatgtcaaagcgggtccaaatcgacgatcccaaaaacgacgacgacgttcccaaaaacgacgacgttccagacgctgattcctctcagctccgtaaacgggactacattgacgtcccttctcacccctacttgatgaagcttttgaacaagcaacgggaccagattgttctatttgcggatagagttttgaagttcacgggttcggggaagatgaaatgccgcattctgttggttacggatcttgcgatttacattgt

SEQ ID NO: 24421 - DNA, 434 bp, Glycine max
ctcacttgtcactcgtcactctgccacttcttcgtcggtgtcaaactcacacaaactcagcattcaaaaccctcttcctgcgccaccgccggaaaatggaggcggtgggttcgagactcagccgcgcctcctcccgctacggcgcccccaccgtgttcagcggccccgtcagaaagtggaagaagaagtgggtccacgtcaccccctcttccttacccaacaacagctctcactctcacactaacaactccaccaccaccagcagcgcttcctctcgcctcctccttcgccgttggactcccgccaccgtcgacgacgccgccggagccgtctccgacgagcctccccgaagaaagttccgttacacccctgttgttgtcctagaagaacagaaaaagatgaatgttgtgaaggctgaacatgaacccacaatt

SEQ ID NO: 24422 - DNA, 232 bp, Glycine max
ggcaattgctatttttcttgttgtcttgactcttgttcctgttggaggatgagcttgcagtcgatctgggtataggtcttgtaactgcattttgatgtttatttatgtgtacactaaggccatttttaattagaattgagtagtgacatatatatatatataggtaatatcgttaccatagatattggacttaacatggggactactgtatgaggcattgttttcgctggta

SEQ ID NO: 24423 - DNA, 319 bp, Glycine max
cacaaatccctcaactactaattctgaagctacttcccctgtacccaatacgaacccacttcctaatccttggtcctctactggaactggaggaggccagaataacaccagaaggtcaactactactggtggggaagctcgacagtcaacacccactggtctaggagggcttggactgccagatcttgaaggcatgttgggtgggactgggatgccagatgctgctatgttgacccagttaatgcaaaacccagccatttcacaaatgatgcaaagtatcctttccaatccacagaccatgaatcagattcttggggtc

SEQ ID NO: 24424 - DNA, 404 bp, Glycine max
agaggtcaaactatttaaaagcttttggagttggagacgtgtgggtagctgttggatggagtagtgatattattcctgctgctaagcacatgtctaatgtcgctgttgtcgatccaaagttcggagcgagtttatgggcagatctttcggcaattcctgctgcctctaggattcaaacaaatcggattggtggacgcatcaggggaccatcaccattgatccatcagtggatagagttttgtctgcaatctgcaagagcactcccctttaagcaggaggtgatcccaggtgcctctccctctcatcttcaaggtcattcagccaatgtgcctgtggagttaaccaagggtgggccgaggataaatggcaacctagttgatggagcacctccaccagacatctta

SEQ ID NO: 24425 - DNA, 247 bp, Glycine max
tgttctttgcggggtctgatgattctagattttctgaatctgataataggtaaattgttatgcttgagtctagattaaaaagtaagatcattcaacttgttaaattagtttgatattcattcaagttagatttgaattttatttgataagaaactcaagacgggggggattaatctttcaacattttgttttgtggtcttgtaaatgatggagcagctgggtgaattttactaagttcttgactgga

SEQ ID NO: 24426 - DNA, 242 bp, Glycine max
gcatacctttcaagaaaccaacacttgtgcgaacatgcccgcgaaattgggaggtgagagtcagggtcaaatggagcctttagccatgatgagattgtgtttgcttgctaatgcgttattaggggtccagttaatgggtggctaatttagtttttctgtttgttttgctttctttttctcgtatgtaataaaaaaaattatgatggttgtaaccaatatcattttcatgatttgaaaattga

SEQ ID NO: 24427 - DNA, 248 bp, Glycine max
tagaagtccctgtgtttgggtctcttgctgtcgcccacaatggaactgtaatatgttgcctggtagatggccatgttcttgcattggacccaaatggatccattgtttgcaagaaaacaactgatggtccaatatttgctgggccatgcataccttctgttcttcctcatgaggtacatcaatctcttcatggattttacatagtcatttcttaatcatttttccacttgccccctaacatccttttg

SEQ ID NO: 24428 - DNA, 668 bp, Glycine max
cgagatgctgttgaaaagggacttgtgaaggctgtaggtgtttcaaactatagtgagaagcgactccgtgaggcttatgagaagctcaagaagagaggtattccattagctactaaccaagtaaactacagcctcatctaccgggcccctgaagaaaacggcgtaaaggctgcctgtgatgaacttgggataacaataattgcatattcaccaattgctcaaggtgctctcactggaaagtatactcctgataaaccaccaagtgggccaaggggcagaatttatactccagaattcctaacaaggctccaacctttgctgaacaagatcagtgaaataggggagaagtatgataaaactccaacacaggtatccctgaactggctggtagcacaaggcaatgttgtgccaattccaggagccaagacagcagaacaagctgaggaattcagaggtgcacttggctggagactaactgatgaagaggtagctgagctgcgtagtgtggcttcagaaattaaacctgttataggttttccagttgaaaaactctagaatatagcatgcaccttttaaatcaaatgtaaagatgtatctgtttatggatatagctcttgttattattaattatttattttacaaaatacataatatggttcttttatatg

SEQ ID NO: 24429 - DNA, 245 bp, Glycine max
cgaaatttcaaccggtttggtgggtgtctgggaaagaactcaacaatgggcaaaaacttaaggcttttggatgatcttcatgttcacattcttgcttctcgtgaatctagttcgggaagggataccattcgcatggaataccttactcttcttaaagaaatgacagagcccctgccaaccctgcctaaggtggtttgaagtacacgtgttctttagttttaaacataccaaatgttttaagctga

SEQ ID NO: 24430 - DNA, 276 bp, Glycine max
ctgcatagagaggaccccatatctgttatgtagcggagattactcagttcagctcagtttcaatttctggggtttgtgggttacccggtttcaagggttgttggcatgtaaagttgtgatttttaggtttcatctgggaatttcccatctgggggttgtggtctttggtatttgatggtatctgggtttctagggattgattgatcagggattcgtagagataatagatggggttgggtgctgagaatggcaaggtggtggagtcttgggatgtgt

SEQ ID NO: 24431 - DNA, 698 bp, Glycine max
gcaccagatattgtaccacgatggatatttcatgtgggacaaaacctgattctggattcagatttatatctcctccatgttgaggaacataaactaaaggatattggtccaaacaattggcacaaagcctgttttgtgccaacaaagtcagacgcccttgttattggttatagaacgtggctaaggaagtatgcaggtggtcaggttgattggagaggaaaatatagtggagctcttcctccaacacctccgagagaacagcttttggacaggtactggtcccatgtggtgaattgcaagagttgcaattctgcttataagagcctcaatgcggttgaagtaatgctgcagatcatatctgttgcttcaattgggattgttgccgtcatgaagcatggtacaatgtcagtggcaaaaagaaattcaatggttgccttagcagtgctatcatttgcactgtcacggtggttagctcacttcatatacaaaaacttccgttatcatgactatgagcatgccttccgctgaaatgtgttttccatatttcttcatgtctaaaaatatgtgtatagactatagtgaaggtccactagaatgaagtcactggcacttcatttgactttttaaattttaaaagttaattcctctatgacaagtattcgcaacctcttcatacagaggacaaataagttgatatc

SEQ ID NO: 24432 - DNA, 432 bp, Glycine max
agaagaacgagtgagtgtgtagttgaaagaatgctatgttgatgatgacacatggatgatggatcatggatcatggatcatggatggatgattaagatttttcttcaacacaagggaaggtagcaaatagaaaaaagcacctcaatttgtgaaagcattgcttgcagtacataagcactaacaacacagtgtgtgaatatatataaactaggtagcgtagtagtactattattactaaaacttgttacatcaagccaatggagacacacgctgagataagggtgtcaaagttcaagagggtttgtgtcttctgtgggagtagccctggcaaaaagagaagctaccaagatgctgccattgaacttggcaatgaattggtctcaaggaacattgatctggtctatggaggaggaagcattggtttgatgggtt

SEQ ID NO: 24433 - DNA, 259 bp, Glycine max
gtgaaagaaggggtggtggtgtagctaccaaggaaagtgatgtttatgggttaggggtggttttgttggagcttttaagtgggaaagggtgtgagggaggaatgttggtgaagtgggctttgctattgataagggaaacgagttttagtgaacttttggatcctaggttggtgattccttctgacatgaagcctttggttagattagccaaagttgcttcagcatgtgttggtaattcacgcaaatgtaggccttcgat

SEQ ID NO: 24434 - DNA, 272 bp, Glycine max
gagaaatcctgcagaaaaaccgccttgtacttgaaaagattgtggaggaattactcgagtttgaaattttgactggaaagtatgtcattccaaatacagagaatgcagtgactaaattatttaccacaaattgtgattcattctgacccctacgaaggatttagaaagaattactaaagataacggtgtaatcagggagcaagagccgtttactcttggtgaagttcaagctagtgagccaacatctggcagcttccttgaaagaggaaatg

SEQ ID NO: 24435 - DNA, 451 bp, Glycine max
atctgatttacaaaaggttacaaacttctcttgcataaagaatggcatcagcaacaataaggaatgcagttgtcacgggagcaaacaaagggataggatttggaatatgcaagcaattggtttctaatggcatcacagtggtgctaacagcaagggatgagaaaaggggtcttgaagctgttgaaaagctgaaagagtttggtgtgtctgatcaagtggtgtttcatcagcttgatgtgactgaccctaaaagcattgaatcccttgcaaatttcatcaaaacccagtttggaaaacttgatatcttggtgaataatgcaggaattcatggagcatatgttgaccgtgatgctttagctgctgctggggaaaaagttgccaatgttgattggagaaaaatctcaactgaaattttgaagctgccgaagcaggcattagaacaaattactat

SEQ ID NO: 24436 - DNA, 536 bp, Glycine max
gtaaagcaaagtctttttttttttcctttgagttaagacttgagaccccaaaacatttgcctctttctctcctctttgatcatcagcatcaacttctcaaggctcaatcaacttcaccagttctagtgaaactgtgaaagcgccagtgttgctttttttttttaagaagctgacatcatcatggactccgactccagggctagttttcattctgtcaagcacctctctgctgtgcaagctgctagacttcactctgttgtcctgtgctctgcagcaatttggaagaggagcattgctctgccctaaaaaatgtggtttgtcccgtttgtgaagaaaatatagggaaggatgcaatcatgcaatttacacattcaagctctcgaaggtgggcgtggaagcctgagaaatctagcatctggcctggtaactccgcaatgcttggcaagaagctggccaccaggggaaacaaacaagaatcaataactgatccactattgtcaccatttatctgcaacgtgcctattccaaactctaac

SEQ ID NO: 24437 - DNA, 376 bp, Glycine max
aaagcatccagtgtcaaaagccaaacatgactcagcaagacttcgcaacttcacaaagccggtggtgataacactgatgggaaagcaaagtccttttttttctcctttgagttgagacctgaacacattttcctttcaccagttctagtgaaagtgctctcagtgtttgtttgaagaagctgactgacatcatcatggacttcgacttcaggactagttttcattctgtcaagcacctctctgctgtgcaagcggctagacttcactctgatgtagataatgatggccgatgtgatttccgatgtccattttgtgattttgaaattgaagttcctgtgctctgcagcaatttcgaagaggagcattgctctgccct

SEQ ID NO: 24438 - DNA, 329 bp, Glycine max
aatgctgatgatcaaagaggagagaaagaggcatcaacttctcaaggctcaatcaacttcaccagttctagtgaaactgtgaaagtgccagtgttgtgtttgttgtagctggctgacatcatcatggacttcgacttcagggctagttttcattctgtcaagcacctctctgctgtgcaagcggctagacttcactctgatgttgattctgtgggccggttcacagatgtagataatgatggccgatgtgatttccgatgtccattttgtgattttgaaattgaagttcctgtgctctgcagcaatttcgaagaggagcattgctctgc

SEQ ID NO: 24439 - DNA, 227 bp, Glycine max
gaggtaaatcatcatgaaccactggtggatgagtacaggagaccttcagagaactcattgacaatcaatgaacagtcaccagcagtaagcacagaatgggttgaaggtggaaacactgacacacaagacaattctattgaatgtcctcgaagacatcatagtaattcaaatgattatcaggttatttggcaagacaatattgatcccgacaacatgacctatgagga

SEQ ID NO: 24440 - DNA, 629 bp, Glycine max
  unsure (1)..(629): unsure at all n locations
atagggctgtactggaaagctgaggtacgtaagcagggttgattatctgtgggagagtgtgaggaggaacgaggtggaaattccggagtttgtgtttgatcacgacgaggatttggattaccgtccgatgatggattacggattggagagcgatcacgctagagtgtacggtggtgctccaaccatggattcacccgtcaccacctactccatgaggtgcatctcataggattccaggagattcattaatcctctgcgcttcttgtttttgtgcgttaggtagactggggtccctgttagttaaatgggcccatagctatgtggttgttgatattgtgcagaaagaaaaggttaaaaaaaaaaaagaagaagaaaaaaatagtccgttttttttaggtctttgctaatggtgtaatacttatccaatagcgttttcagttttggttgatggattcagtcagtgatgatattttaaaaagatttcccccggcnaaaaanaaaaannnnnnnnnnnnnnnnnnnnnnnnnnnnnnannnnnnnnnnnnnnnnnnnaaaaaaaaaaaaaaaaaaataatcttgggggggccgcgggagggtgtctctttggatttttttaaccctttttttg

SEQ ID NO: 24441 - DNA, 172 bp, Glycine max
ataatgctcagttctaactaatgaaatggattgcctagtaggggtttctgcatatcacctgtatagtagttatatgcatatgtttctgtgcatgttctctacacaattgtaaggtgtcactgtattgaactgttgcacttgtcaactttcaataaagcatataaatgttgat

SEQ ID NO: 24442 - DNA, 384 bp, Glycine max
cttacgcgtttgtggacgcgtgggcggacgcgtgggggcaaattccagttgaatgcgatggttacatgagagtgtccattgatacagaagtgttcttgagagggaaaaagcagcttgaaactttcaatgatttgaccagtgattgcaaggatggtattaatacctgtaatgttgcagcaaactaatgtgagatttggaactgcaatgcttgatatattgaaatatactctcatagtctcatgtacttttagctgttatatgtgttgcatttgagaatttgtatcctttagccttagcagtgaggagtaaaattgttatacttttgtattgtaagagtagtgactacttggaagttttgatgttcttaatttaaatttggttcgt

SEQ ID NO: 24443 - DNA, 491 bp, Glycine max
gcgaagtgtgtggcagagtttctggctaagtgagaactgggatagcgatgataatgttcgtgatcaaattgctactagcctaatggaattggaagaaaagtttgaggatttcattcaaaagttgaaagatgcagaatgggatacccagcaattaaatttgaaggttcccaaagaaatcttcattgatgacaataccaattctctctaaattctaaaatggtgaagctgagaatgttgggtagtgcaaaatgatatgacctcataaaatgtgatctaccaaattgtaaattctgtaagcagttttgcaagcattcagagcaagatatctattttcacatgtagatattcaacaaagggagacacaaaatttatggtggccaattggcttatagtcctaactcattaaataccaaatactggctttgatactgctttctactttctgaggatcctattgtaaaaaaattgttctcaattttgtttaaagtctt

SEQ ID NO: 24444 - DNA, 348 bp, Glycine max
ctcgtgctacataaattaacggagactgtagacgggggtcggtatttgaattggaggtggatgtttgccgtgaccaatctatgcttggcggcggagtaaggtggttgcgctcctcggagcgattcaagtttctgacaacgtcattctccaccaacgccaagaccacttattattccttttgcacttcatcagccaacaagaacaacaacaaaaacatgatcgttgatgaaaggtatcggcagctggtgaatctggacatggtgactgccgctaagatccttttcagcgacccccctaagaagaggaagtttggggttgatttccatcttgcacagttgtttgtgcgtg

SEQ ID NO: 24445 - DNA, 252 bp, Glycine max
ctcactcacgccgaggtgggggaaactcttatggacgccagggtggttttgaagcttttgattagatgccaagttgatcggtagtggacagactttcttaaggtggtcttttgtgtcatccatcagaagccatacatccatcaactgtgctgctatagtcagccgtgttttcagcagggctaagaacggtgaagatggtgtccccgtttttgtggggggctgggggcagaagagggtttcgtggatagagtt

SEQ ID NO: 24446 - DNA, 611 bp, Glycine max
gaagttctggatgttgcttggtcaggtatatgttttgttgctggatctcaaccagtgaatgctttggcatttgttattgatgggatttattatggggtatcagactttggatatgctgcttactcgatggttctagttggactagtttcttcaactttccttctggtggcggctccagtagggcttcctggagtctggactggattgtttattttcatggctttgcgtgttctagctggagtttggaggtgaagtatttaattaatatggaaggtgataattgtgaaacttcatgtttgtgtattattacccattgtcgtactcattcaaatcctagctcaaagaacaatggcaaaatgatacaggacatgttggatgaatgtaacatgacatcaagtcgcatgttatttgttctcttttatgtcggtattttattgggtaggggcaggatactctatggataacatgatcaaaattttcttcataagatttatattgagttaatatttttgttttcttaaggttgagcagtaaaagtgggccttgggatacaatctggtatagagatggagcagaagattgaccaacatgcattcagtactcagaagttc

SEQ ID NO: 24447 - DNA, 276 bp, Glycine max
  unsure (1)..(276): unsure at all n locations
gaaacgttggtacttctggtttgggatggtctcgttgaaattagtagtggagtcacagagatatttagtgtccatgtcttgaaggaggattctagggtgaaccaccttaataggtggttcattatggaccattatttacagtactttgattaatctaagtagcacaaggttattgtacaacatccttgtgctattttgattaattaagtagcacaaggttattgtacnnnnnnnnnnnnnnnnnnnnnnnnnnnnnnnnnnnnnnnnnnnnnnnnn

SEQ ID NO: 24448 - DNA, 262 bp, Glycine max
cttgggtggagggctgtttctaatttttgctgtggccaccttttttggggttttctgattcattgttgtctatccttacaccttttttgtgtgcaatatatcactgatggagctaaaaggaataacacatgctcaaaacagaaagattgtgagagaacagagaaaagctcatattttaactttgttaaaagatttcttgagtagaaattaggagcaaattgctcacatggttggagaataagaagcatgaaatgtgccatta

SEQ ID NO: 24449 - DNA, 258 bp, Glycine max
gttgatggcttcctccgcaagacaagagtatgggcttgcttgtggcgtggattctggggagtatgtgtttatgaacactagggtttacttgaacagttccaatgggctggatgagatgagggacagtccaggggagtctgagagtgatgatgatgacgatgaagaggaggatgtcggtggtgggggtggggatgaggatgaggatgaggacgacgagatgtcgtgccgcgtgttggcggattcgattcagaagtttgg

SEQ ID NO: 24450 - DNA, 633 bp, Glycine max
ggtcagtttaagtatggcgtcaagcacggtgttggctgttaccattttagaaatggggatagatatgctggagagtattttggggacaagatacatggatttggggtctaccactttgccaacggccactgttatgagggagcatggcacgagggtagtaggcaaggtattggctcgtacacttttcgaaatggtgacagaagaagtggtggatgggatgctggcaacctcaagcaatctctaccaccactatctgatgttgttttacaaaaattgcaggctgctaggaaaacagcagagaatgctataaaccttaaacgagtggatgaccaggttaacaaagcagtaatagctgcgagcaaggctgccactgctgctagagttgctgctgtgaaagctgttcagaacaggatggatggaaaattttgcgaccctgatgtctaagaattagatgttagctttgtttggaattgtaattgtaattttttttttttttttactaattttgagtccttggaagatgtccccctggtgagcaaaagcttattggaggttgaagagagagtatgtttgtttcccccccctgtaacttgtatataacccatgtatatcaatgaaaaatgaatttgctcc

SEQ ID NO: 24451 - DNA, 437 bp, Glycine max
atctgctgcttctggagcaaaatctcccaatggacagtgcatacaaatcagaagatgtgaatgcagcacctatccgtgttattcagcttctatataatgcaggggatgtcaagggaccacaaactcttgctttcaatcttccaaatgatgagcgtattgtaaaagaccggggatcatcaatggtcatgcttaagaatgtttcagaggctaagttcaagcatattcttcttcctatagctgctgcctgtgttgcaaatgaccaacaagaacatgtagattttgaatcattctttacacatacaatttgtcatgaatgctgccatggaattggaccacataccataacacttccaaatggccaaaagtctactgtcagattggaattgcaagaattttactcggctctggaagaagcaaaagctgatatagttggcctt

SEQ ID NO: 24452 - DNA, 280 bp, Glycine max
ccactgtttcgattcaagatctcaatcacatcactccaagatcctctctctttctctcttccaaaccctaggctccaccactccgtgatccatgcttcttccccacttcgatgctgagtttcttcttgggagtgccttagcgtagagaggcagagcgaaaccaagaaaatgctcagtttcgtcttcatcattgcgcccttattcctctccctctgccacggccacgtctacaccttcacgatggaacaacggccactcggagcctgtcaggaagtggtcc

SEQ ID NO: 24453 - DNA, 354 bp, Glycine max
cggatgaaaccatatgcaaggagatgaaagtgatcatcaaagagacactggaaaaggaagaagaggatcgtagaagagaagctgcaatcgcatcctcatcctgtctccgacccaatttcaaccctaaaggcataacccaagaccaactctcaaaatttcgtgaactacacaagaggcgcttgcaactgaagtcaaaatcgaagttcaaaatgaaatccaaagatagggccaacaaaaagtcacatggtgatggtctatcaagccaaaacggtggaactcaaggttcaaatgttgatcacaaagaatcaaacttgtggaatgattgtgaaggatttgattctagatatgaagact

SEQ ID NO: 24454 - DNA, 128 bp, Glycine max
ctgagatagatacctcattccgcatatgctaagtaattctcagaatggagtgttcactttatgatttaccatatatatcctatcttgaactgattaagcacatcttaaattattttttagattaaaaa

SEQ ID NO: 24455 - DNA, 376 bp, Glycine max
aaagaaaccagttttagaaaagaagaaaaaaaaagtgtaaccgaaaaggaaagtaacaaagggaagttaagtggcgagctttggtttacttttttttttctttccaccaacaaagggtctcaagagagaacagggaaatttttgtgaatgtagctgtaaatggtatacgtgtggaaaagtgtgtgtgcttacaacagtgggtgatcctctctgccaaatgactcagattttcgggtttgccttttcttctttctttcttttttatgggaatcaaatttggttttgtttccttttgtatattaccctacctcgttgagttataatggttgtgccaatagtttcagttttttcaaaacaaggaaactgaatacaatgg

SEQ ID NO: 24456 - DNA, 519 bp, Glycine max
acgaaattgttcggtgataaagagcttgagacaaagtgagaaccttcaggtgaaagatgaactctatagtcagaggaaagaacttgtgaagataactggtgatagcatgtgttctctgtgccataagaaaatagggacaagtgtttttgctgtctacccaaatggtagcactctcgtgcactttgtctgtttcagagattctcaaaatatgaaagcagtgggcaaagggtctcaattgaggaagcgattatgaagctgaaatgccataccaattggtggtccagttgtcttgttttagcgtgcttttacccacggtacctgttggtaggtgtggattatgatgaaagtggcaccgtaatttatcttcagaggtctctctttttctttttttgcttttttgcccagtcaattcgtgtgaaaagtgagatttgatatgtgaagagcgtgatgtgtctatctttttcttttttgtgatgtaaatattggcaaaacttgccacaagtaaaataagacaacacg

SEQ ID NO: 24457 - DNA, 367 bp, Glycine max
ccgctcacggctggattgcccgaaacatttgaatttgaggatatgagtgacacatattggacagacagggtcattgacaatggtagtgaagcacaaccagcgcaaccgtgtcaaccaccacaaccagcacggagaaaccggaaaaaagaccatcaacttgttcctactgagccagggaagcctgttcaagttagtcgtaggccatattccaggaaacagtattctaacaacaatcacattgaggctcctgcaaaacctcctggttatatagatgagaatgcccctgctgaacttgttatgaactttgctgagttgggttctgttccctcagaaacaaaccttaataaaatgtttaggcgttttggac

SEQ ID NO: 24458 - DNA, 409 bp, Glycine max
ggcatttgatgtcaaagttactcctgaggctagggaattggcagatgaattgggagtgaagatatttattgctgatatcatttatcatctgtttgaccaatttaaagcttatattgacaacattaaggaggagaaaaagagagaagctgctgatgaggcagtcttcccatgtgttatgagtatcttaccaaattgcattttcaacaagaaggacccaattgttttgggagttgatatccttgaaggcattttaaagattgggactccaatttgcattccttctagagagttcattgatattggtcgcattgcctccattgagaataaccacaaacctgttgattatgcaaagaaggggcagaaagtagccattaagattgttggcagcaattctgaagagcaacaaaaa

SEQ ID NO: 24459 - DNA, 273 bp, Glycine max
agaatgcagacagatcatgaagcccaaaggcaacataatgttgaattggtcaagatgcaagagcagtcttctttcagaaaggagcaggcaagacaggctactgaagaacagattcaatctcagcagcgtcagactgagagggagagagctgaaattgaaagagaaactattagagttaaggcaatggcggaggctgaaggccgagcccatgaagcaaaattgaccgaggatcataacaggagaatgcttatagaacgaatgcacggtgaaaga

SEQ ID NO: 24460 - DNA, 296 bp, Glycine max
ataatatctactcagtcagcacatacctacagcgaactcttaaacagaaataataacatcttaattttcattcaaaccgttttgttaggaaaaatgggtccgaaattggcgaaaacagggtctttccgtcacggtttggcggagaagaaggacaagcttctctctgcgtcggcgaagagtagtagtagttattctgagataggtattgacataaccacgcgagaggaagacgaagagcaatcgtggtggaacacgtttaagcgcgtggctgggaacgcattggaaatgggtcgctc

SEQ ID NO: 24461 - DNA, 638 bp, Glycine max
gctacctccccccattgaggcctcttccgatgaagagcaacgaccttcctccaagcaacacacagaagaaggagtttcctcttcagaagaagcttcttcccaagaagaagacgacgacgaccaacctcccacccttcctctcgcttccgcaaacccccacccgaaaccgtcgtcctccgactccgacaccgacttcgagcccaccaaagtaaaacccaagcccacggaccaggcccagaagccccagccctcacccgcgccgcccaaatggggatccaagcgccctgcccagaacaacgcccctgccactgacccgaaacgcgcgaagaagaaattgaccaattcttcttccgccgctgccgcccacgagacggaggagaagtccggtggcggccaagcgaagttgtctcagagactcttcagcaaggaagacgaactcgccattcttaagggcatggctgagttcatttcgaagacgggccaagacccttacaagtacgccgatgccttccaaaatttcgttaagaattcgctctgcgtggaggcttcgagcaaccagatcaaggagaagatccgacggctgaagaagaagtttgaaactaaagcacagagagcgaagaaatgggaggaccctgagt

SEQ ID NO: 24462 - DNA, 296 bp, Glycine max
aggacatgatggtactcaaggacttggtttgaatgacattcttagtttatcagatacaaaaccagataaagtatcagataaaaaacaagatatagttgaaggtgttcagggtatagtgaaattcgcaaaagagttcttggatcttattgatgctgcagatgctacagcacagagtgaaattgcccgtgaggctctcaagaggttagctgcagctggttcggtgaaaggtgctttagaaggtcatgaattgagaggattagcattacgccttgcaaatcatggagagttgactcggc

SEQ ID NO: 24463 - DNA, 521 bp, Glycine max
atggagtatacaagcttgatttccccaccaagcctcttaccggatcacctcgcacagaaacatcaatcattaatggaacttataggggatttatggaagttatactgcagaacaatgatactaagatgcatacttatcacatgagtggatatgcattttttgttgtcgggatggattttggtgattggtctgagaatagcaggggtacatataacaagtgggatggaatagctcgcactacagcacaggtctatcccggagcatggacagcaattttggtttcccttgacaacgtaggagtttggaatctcagaacagaaaaccttgattcatggtatcttggtcaagaaacatatgtcagggttgtcaacccagaggtcaataacaagactgagttgcccattccagacaatgcccttttctgtggtgcccttagcaaattgcagaagcctcaaaaggtttcttcagatgcaccatcaatcagtcggaacaaactgaagctgttcttcacttggctcatt

SEQ ID NO: 24464 - DNA, 340 bp, Glycine max
attaagcttcaatcacatacttcttctcctagatctagaacttgttgtgaactgaacaacatatatattctaagctctttgaacttatccttcactgatcagattcagagaaatggaaaacatcaaagatccatcaatttaccgcaatccagtcatattgcagagcgaggacttaaccaagtatattctggaaactgctgtttaccctagagaacctgcgcctctaaaagagctgagggaagccactaataatcacccttggggcttcactgctactttacctgaagcgggtcagctaatgaccttacttatgaagttctcgcggtggaggtgtcaagtg

SEQ ID NO: 24465 - DNA, 282 bp, Glycine max
ttaagcttcaatcacatacttcttctcctagatctagaacttgttgtgaactgaacaacatatatattctaagctctttgaacttatccttcactgatcagattcaggatcttttgtctcttaccctttgaaggaccctgccccttatagtgttgttgatttcagagaaatggaaaacatcaaagatccatcaatttaccgcaatccagtcatattgcagagcgaggacttaaccaagtatattctggaaactgctgtttaccctagagaacctgcgcctct

SEQ ID NO: 24466 - DNA, 304 bp, Glycine max
  unsure (1)..(304): unsure at all n locations
ccatcgagncgctcgagccgatcgacctcttccggtttcaatagatcttacgaccggaaagcacgcagtgtgcgttctatcttctgaagatgaagaagaagaagaagaagaagacagcgattgcgaagaaagcgattgcgatgaagcgtccgaatccgatgacggtgacgttgatgattcctccctctccaacaaagtcgtcgccctccttcgagaaggaaaagatatcgaatctttgaaattaaacgaatgcaaagcgtatctacggaatcacggcttgaggatcgcaggaaatagagatgtt

SEQ ID NO: 24467 - DNA, 410 bp, Glycine max
ctgtgcctaagattgttggtgagggaatctatggggttggtccagttttggctgcattgtcagctgatcgaagggaattctatgcattgtatgttcaagaaggattggatttgagtggcaacaataggaagaagaaggacaagaaagggtttgagagagttctgaagattgctgaaaagcttggtttgagtgtaaaagaagcatcaaaacatgatctgaatatggtggctgataaccgtccccatcagggtttggttttagacgcttcacagctagagatggtgaaagtaaatgaactggatcctgtttctattgatgaagggaaggggttccctttgggtagccttggatgaggttactgatcctcagaatttgggggcaataattaggtctgcatatttttttggagc

SEQ ID NO: 24468 - DNA, 1006 bp, Glycine max
acgagactcttggttgttgttctttaccgattcaacgtggtagtacccttgagcctgcagaatctgcactttttttgccttcactttgaatcgggagatatcctttccattcaaggccgcaaccagaagtttcaacgaaagtctcctctcccaacaaacagctactaccttctcttctcaacactattggaatcaccatcatctcaataattccctttctctttctttttctctcacacaccccatgatgtcaaaagttgttattttctctttattcctatcatcagtcccgaccatgtcgactcccttccgtttttaatatttctttcttgctttctccttcttttaacctttttggaagatttctttctccaacataaaacccgtggagtgcctatcctaaaggtttaaccttccccttcacgattctctctccctctctccctcttattcccaaaccaagcccctatttgtgttcatttcgcgtcacattagaataagaaacgcaatatggaagacagtatcctatgcaaacacacagtgcatcgcaccgtcaccaagaaactcaatctcccccaaaaaatcatcccaaaccaattcttcaacacaaacagagcgcagaatagtgcggatttcatacactgatccagacgccaccgactcctccagcgacgaggaaggtttccccttggttcgcaaaagaatgaagcgctatgttaaccagattgaaatagaaaccgccgcggaaaaagttgttcggaagaggcccgccggtgagccttgcaggcgaccggcgaagcttcactccgggaagaagttccgcggcgtccggcagcggccgcgggggaaatgggcggcggagattcgagatccggcgagaagagcgcgtctctggctgggaacctacgacactgccgaagaagctgccatggtctacgacaatgccgctattcggcttcgaggccctgacgcgttgacaaacttcctaacgccaccgcaaagagag

SEQ ID NO: 24469 - DNA, 411 bp, Glycine max
ctgaactcttgttcttctttaccgattcaacaacagctcagcagtggtagtacccatgagcctgcagaatctgcactttttttgccttggcttctattctctcctcactttgaatcggaagatatcctttccattcaaggcagcaagcagaagtttcaacgaaagtctcctctcccacacagctactatcttctcaacactattggaatcaccatcatctgaataattcccttttttctttctctttctctcacacacccccatgatgtcaaaagttgttattttctctttattcctatcatcagtcccgaccatgtcttaatatttctttctttcttctttttttaaccttttggaagatttcggtttaaccttccccttcacgattctctcttttcattccctattttg

SEQ ID NO: 24470 - DNA, 316 bp, Glycine max
gaaattcagattggtcaattaaattaagggctttcttttcactccaatgacgaagaagaattctaaaaagacaacaagccagttacaagagaatactgttgcagaagaggagagaccttcttctacacccagaaaagcagttaatgaaattgatgaaatattcgctggaaaaaagaggaagaaatctgaaatggtaaacaccggaaaacctgatgaagtaactaagaagactgacaaaacgaagaagaaaaagaagaatatgaagaggaaaacctatgggtcagatgatggcaagtttgtagaccggccttctcga

SEQ ID NO: 24471 - DNA, 946 bp, Glycine max
gtctagcggttcgatgatttgtatcgtaagtctgtggcatttgagaagcagtatggggacagggaagggattgaggatgctattgttgggaagagaaggtttcagtatgaggatgaagtgaagaagaatccgttgaattatgattcctggttcgattacataaggttggaagaaagtgtgggggataaggagagaatcagggaggtttatgagagggcaatagccaatgttcctccggctgaggagaagcgctactggcagcgctatatctatttgtggattaattatgcactctatgaagagcttgatgctggagacatggagcgaacaagggatgtgtacaaggagtgtctcaaccagatacctcacctaaagttctcgtttgcaaagatatggcttctagcagcccagtttgaaatacgtcagctgaatctcaaggccgctcgtcaaatattaggaaatgccattggaaaggctcctaaagataagatttttaagaagtatatagagatagaactgcagcttggtaatatagatcgatgcagaaagctgtacgaaaaatatctggagtggtcgcctgaaaattgttatgcttggagcaagtatgcagaactggagagatctttatctgagactgatcgagctcgagcaatttttgagcttgcaatcgctcaaccagctttggacatgcctgagctgttgtggaaggcatacattaactttgagactgctgagggtgaatttgagagagcaagagcactttatgaaaggcttcttgatcgaacaaagcacttgaaggtatggttaagttatgcagaatttgaggcaacagctatggatatggacagtttagacttaccagaagatgaacaaaagaagcaatgcattcagtgtgctagaagggtgtttgagcaagctcttaactacttcagatcatcagctccag

SEQ ID NO: 24472 - DNA, 324 bp, Glycine max
acctgaggctcctgcagggtggaattcaggtggggggattcgtcctatgccttatggagggttttcagcttttttgagagaggaagatagccacctcttgagaaatgggttgagtccaaatgcaaaggggaaagtgaggcctgaagcagttattgaggctgcaactcttgctgccaatatgcagccatttgaggttgtttactatccccgggcaagtgccccagagttttgtgtgaaggccaatttagttagagccgcattgcaggttaggtggtgtcctggaatgaggttcaagatgccctttgaaacagaggactcctcgcg

SEQ ID NO: 24473 - DNA, 410 bp, Glycine max
gtgggtgtttccgagaagaggaagacaattgaaattgaaattgaaagtggatgacattgccagtagcagccaccgttctttaagaaaaagtgattttcctttttttcattacaattacaaggctgaatttgtgattccaatttccacatattattagatctctccatggagtgggagatgaggcccggcggcatgttcgttcagagacgcgaggcagcggcggataacggcggcggcggcaacggcaacatgacgacgacggtgttgatcactgtcgtccacgcttcctcccactacgacctccacctccctaccaactccactttctgggatgttaagagtctgcttgtacatagaactggtttacagcctgaagagcaacaactcttctttcgaggaaaagaaaagga

SEQ ID NO: 24474 - DNA, 421 bp, Glycine max
agggaacattgtatgtgcagaattcacataatcataagaacctggttcagtatctgcataactatgttgaaatgattgcagggaaatatactttctggaacagaactggaggcgctgatcattttcttgttggttgccatgattgggcccctggagaaactaaggttgacatggctaattgcatacgatccctttgtaatgctgatgtgaaagaaggatttgtttttgggaaggatgcatctcttcccgagacgtatgtccgcgatgctaagatccccactaaggatctcagcgggaattcagcttcgaagaggacaacgcttgcattttttgcagggagcatgcatggttatgtgaggccaattttgttgcagcactgggaaaacaaagaccctgacatgaaaatctttgggagattgcc

SEQ ID NO: 24475 - DNA, 963 bp, Glycine max
gggtattgctatccttacgccaacatcagccatagacataattttgtcacggaaaatcgtccccctgctcaggttttccgtgacaaaattatgtctatggctgatgttggtgctggaggtgaagatgccattgttacatttgagggtattgctatccttacgccaagaggacgatacagtgttgagttacacatgtcattcttgcggcttcaaggacaggctaatgatttcaaaatccaatatagcagtgtggttcgcctatttttacttcctaagtctaatcaaccacatacctttgtcattattagtcttgatccccctattcgaaagggacaaactttgtaccctcatattgtgatgcagtttgaaactgattatgttgttgaaagtgaattggcaataaatgaagatctttataacacaaagttcaaggacaagttggagctgtcttataagggtcttattcatgaagtgttcaccacaatattacgtggtttgtctggtgccaaagtgaccaagcccggaaaatttaggagttgtcaagatggttatgcagtgaaatcatctttgaaagctgaagatggaattctgtatccccttgagaagagcttcttctttctacctaaacctcccactcttattcttcatgaagagattgactatgtggaattcgagcggcatgctgctggtggctccaatatgcattattttgaccttcttatcagactaaaatctgaacaagagcatctcttccgtaatattcagagaaatgagtaccacaatttgtatgaatttatcagttcaaagggcttgaaaattatgaacttaggagatgcccaacctactgttggtataaagaaggttcttgagaatgatgatgatgatgctgttgatccacatcttgagcgcataaaaaatgaagctggtgaagatgaaagtgatgaggaggattctgattttgtt

SEQ ID NO: 24476 - DNA, 264 bp, Glycine max
gtttcccagttccacagcgttccgcgaagaaaaccagagaccaagaaagagtgcttacctgaaattgaattcaatggcgacgagaaatcgaacaatagaatttagacaacacagagacgccgtgaagagcgtgcgcgctcctctatcctcctcggcatctgcctccaccggccccgtcatcgaaatggttaccacttcgcttcttcctcccaatcgatcctcctcctatgctcttctaagcacacaggaacctgctccatccac

SEQ ID NO: 24477 - DNA, 1988 bp, Glycine max
attacattacacttctcttcatctggggaaacaaatggctaggtctgcgaaagggcatcaagatgaattcgacgacgatgatgaagaagaactcttaactgctaataacacctctttcaaagtgaaggtggatgaacccagcacggggaagagggtgaacccacagcgttcaaagcattcagaaaccgagcaacgtagaaggagcaagattaacgaaaggcaagctttaaagaaaagaagaagaaaaaattctttttgttgagttaattgtttgtgtgtaggttttgagtggaagtttgatgtaattctatattatttggcaatatatgctcgcttgaaaaaattgtgtttttgagccaggtttcaggttctgagagatctgatacctcaaaatgatcaaaaaagagataaggcatccttcttgttggaggtcattgagtatattcagttcctacaggaaaaattacaaatttatgaacagacttatgaaggatggaatcaggagcccacgaaattaactccatgggtaaagttatttggaatggtgcaatgcgaacattttttgtatctgtatactctggaccttgatttatgaaatgttaggcaatgcattatgcatggcaatgcaagtgtgcactatagcagctttcccgactgatagtggtgccacctcaacattgttagacttgtgattttctgattgtataagcattcattttgtatagactgcaaaagaaagagcatcaactaggaagccttattcccactaagtagggtcaccaacatgcatttgggtacacccatgcacttggtcatgtgccatgtactcatgatgccaactgcaaaaaattctcataaagagtttaagttcctttcatgtttaggatttcactactttatgctgtttctttgaattcatgtctgcttgttttctttttttatttatttacaatgtccttttcttccagagctagtagcccagtatgcatatttgaatgagttcaggatggcattgtggcaacttcagtgatctatttgtcacaatggttggttgtgacttagtgtcttgaaattgtaacaatggctttttatctgaagtttattgttctcatctgtttttttttcagagaaataatcacgggcctgcagaaaatactacagatccttctcaagctactcaaaatgggtctgttgatgagaaaaataacaatgtctctccattgttgcccaaaaatgtacagaacccgatagagtctgacttctcaatgacaactattcagaagggcaacatccctggttcaactacagaagcagttcccctgcccatgcaaatgcgattggacatgtttgatccagttgttagcagtagtatggcaacccaacatctgctggaacctgtatctaatgttaacatgctttcccatacccagcctcaattgtggcttgataaacgaaacaagggcaactatattcttccacataatgatacaatgaaggaacaggaggagctggtgaatgaaagtgggtcagatagcatctcaagtgcctattctcagggaattgtagattctctcacacaagcactgcactcttcaggcgtagatatgtcccagactaatgtctcagtgcaaattgatgttggtagacaagaaaatgctgggctgatcccctctgcatctacttcaaagggtcatgaaaaccaatctgtgagcaatccagcaatagcacgttccggagttgattactgcaatattgattctgaacaaagttcaaagaggctcagacaagaagcaagctagagattcctctcatgttcattttgtcaggagtttctttttttgctgtttgtcttcagatgagagtaagaggaattgggtggatcggttcatttttgccatgctggttagggccagatcaaatgtaaattttcacgattctggttttgggactaagacattctgaaataaaatgttatatatgcttgcttc

SEQ ID NO: 24478 - DNA, 401 bp, Glycine max
attaacgaaaggtttcaggttctgttagatcttttacctcaaaatgatcaaaatagagataaggcatccttcttgttggaggtcattgagtatattcagttcctacaggaaaaattacaaatttatgaacagacttatgaaggatggaatcaggagcccacgaaattaactccatggagaaataatcacggacctgcagaaaatactacagatccttctcaagctactcaaaatgggtctgttgatgagaaaaataacaatgtctctccattgttgcccaaaaatgtacagaacccgatagagtctgacttctcaatgacaactattcagaagggcaacatccctggttcaactacagaagcagttcccctgcccatgcaaatgcgattggacatgtttga

SEQ ID NO: 24479 - DNA, 294 bp, Glycine max
catcgaactactttcacttcttcaaaatggctcactcgttgataagaaaatgcataaaacctgcaaccctcaacttcctgacaccactcgcagtccctgagattcggcggcggctagcgtcggtggcggcagcggcggacgaggaccctccgcaatcgccgtcgtcgttcactttctcgtcggagggggagaaggtgtacgtgaagccgccggcggggaagtggaagccgtcgccgtcgtcgacggtgacgatgccgatgtcgttcatgacggggtccatcgtggggaagcgct

SEQ ID NO: 24480 - DNA, 389 bp, Glycine max
cgaaaaacgaaagacagatcgtgtaaactctcattctcaaaaaaatacctttgaagtccaccgtcgtgtaaccctagcataccaccctgccgtcaacggtcatcactctccgtccaccgtcgcagtcggagcagccaccaggtccgtcgaagctcgtactctgaagtctgttcttcacttcttcccctctgtacttgatttctcagaaaggagtttagggagaaaccttggcaagtagaaaattagaattttaaatggccatgagaggaggaaggaagaatttgaagagggcaacagaggaaaaacatataacccttcaagatggccaaggcatcatgcaggtcgtgtctcttcgaggtgctaatatcattgaggtcatggatgcaagt

SEQ ID NO: 24481 - DNA, 417 bp, Glycine max
accctatggaagcagtgaaacgacgctaaaaaaacaaaagaaaggcacagccgaaaaacgaaagacagatcgtgtaaactctcattctcaaaaaaatacctttgaagtccaccgtcgtgtaaccctagcataccaccctgccgtcaacggtcatcactctccgtccaccgtcgcagtcggagcagccaccagagtttagggagaaaccttggcaagtagaaaattagaattttaaatggccatgagaggaggaaggaagaatttgaagagggcaacagaggaaaaacatataaccttcaagatggccaaggcatcatgcaggtcgtgtctcttcgaggtgctaatatcattgaggtcatggatgcaagtggcaacaaattgctagctctattccctgctaaaattcagaaaagcatg

SEQ ID NO: 24482 - DNA, 538 bp, Glycine max
ggaaatgtagctaccgaagatgttgtgtacatgctgaatggacttggggtgaaaaccaacgttgatctcggaaagctcatgttagccggtgagttcatcggcaagcatttggggcgcccatctggctcaaagaccgcggtagcctttagccgagtcacagctgatgcttccaagatatgataatatgttctaccataaaaataaaaataaaaattggatgcttcaagcagtgagaggacaccctattcgtttcatcaccctattgtttcatcttattaaccccgtaattatagacaaagaataaaatgcccactcacgttgatgagttggaaaggaagaagtaatgcatgtaatctgccaatagcaagtacaagtacaagcttctcatttgagtgtaagcttgcaatttttatccctccaattttttgttttttagtttaaatcatgcactcattgtgcatgatgtttagtttataccacgcctcttgtataattctgaaaaagatcatagaaaatatcatttactcttttacaagat

SEQ ID NO: 24483 - DNA, 444 bp, Glycine max
gaaggaagagacttcaacttcagttcagttgtgttgtctgacaaaacgaacagcaattgggagcagatgcaagatccatcttcaaaccctaattccaatccaaatcccaatcctcacaacgccaatgccgcatcccagttaccgcgtccgccgcaggccacggcgtccaccgccgtcgccggcgccttctcgtcctctctattcgcgcgctccggcggacctcaccaccggcgagcccactcggaagtgagtttccggctgccggacgacatgatggacctctcgccgtcggatccgttcgccggcgggtcgtcgacggccagcatggaggagatcggatcggaggacgacctgttctcgacgtacattgacgtggacaagctcggcggcgcaaacgggtcgggcgccgccggaaacggagcggatccgaccggcgaaaccgag

SEQ ID NO: 24484 - DNA, 305 bp, Glycine max
gcaacagcttctcatgatgctctctcatcagattctatgaagtacaaccacaagttgcgccaattagcttttaatttccagaaaaatgcagtgttagcacgccgtctattgagtggagagttggagccttcaaaaatattaaatatgacacccaatgaattaaagttcaggagggtttggttgctgaggacaaaaccaaggaggagcctgacaagatccagcacttgcaagtaaactttccctgctacaattattatctcattaactgttattaagttgcgtgaagatatctgccggcttcagct

SEQ ID NO: 24485 - DNA, 338 bp, Glycine max
  unsure (1)..(338): unsure at all n locations
cttcaaattactccaccaggtttttgtgcaagtgcaatcagaagccttgtgcgttttcaagctcagcaacaacaacaacatgctcatcaccagcatcagattgaagttccagctgcttggtgctttgagtttccaaagacgacaacaacaacagatacgcacatggtgatgaacaatatttgccaagcctctggagctaacttcaccacaaaacaagatcgaccatcgtctcaattcacaagctccttcttgtctagccgtggtgcagattgccgttcttcttctgaaaaatattgtanaattgcttcttattccgaagaaacacatagtagcattca

SEQ ID NO: 24486 - DNA, 438 bp, Glycine max
  unsure (1)..(438): unsure at all n locations
atgaaatgtgaattttcttccttcaccaaagttcatctagtttggttgaatggggagtttggtgtggtcttggaattccttggaaacattctcaatgagagtttgcttcggatgaataagatgggaatttaagtgctttcatgctagaagcatatggacaggatcaggaaggaggtgtcgatagttaagtttttggtttatagtcagattatagaaccagctacaaatacttggacgtgcggttggtgtagaaactttgatgaaacaagttgtggaggcccaaccccagcatgtcaaagtatgaatgtaatatttggagagtagagccataattgttgtccatgtgagtgtcctaggggctccttttagaagaaaccccctatacccagcgttttttttcttnnnnnnnnnnnnnnnnnnnnnnnnnnnnnnnnnnnn

SEQ ID NO: 24487 - DNA, 577 bp, Glycine max
aattcttcaacttatgtaggtgggggttctgtggccaaaagggtgattgggtttgtggcaaaggccaccttgaattccgttgagggcattttggctaacaacaagtccaacaacaaccccattgctgttattgacaaccatgacagcttcacctgtaatctctgcccagttcattggagccgggaactgagcaatcaatgactggaaaggatttggaaattgaaggatacacagttggggggctgtccattggaggccatgaaacatgcgtcattttccccacacttaaagtagcctttgatattggtcgctgcccacctcgcgctgtttcccagaactttcttttaatcacccatgctcacatggatcacattggaggacttcctatgtatgttgccacacgtggtttgtatcgtatgaagccccctacgattattgtgccaatttcagtaaaggaggatgtagagacgcttttggagatccacgggaaaatggatcaatcagaacttaagcacaacctgattggcttggatgtaggagaagagttttatttgagaaaggatcttagagtaaaagc

SEQ ID NO: 24488 - DNA, 329 bp, Glycine max
ataaaattatagtattttgagtactgtgtatgtgaagaaatcagattttggtgtggcggcgtgcatagcgacttccctggcagagaaattcaagagcccaagcaagcattaagcacgttgtcgcttcggtctcgtcggactctgtctttgttcattggagccgggaactgagcaatcaatgactggaaaggatttggaaattgagggttacccagttgggagggctgtccattggaggccatgaaacatgcgtcatttccccaaaccttaagtagcctttgatattggtcgctgcccaccttcgcgctgtttcccagaactttctttta

SEQ ID NO: 24489 - DNA, 572 bp, Glycine max
ctcgagccgcgatgctatagcgagattgaaggaggaaaaagtgaagtgttcgggaatgcaagatccgcctcttaaaaccagttcaggaggaaatgaaaatgaaaactctgagaagaagaattggatgagttcagcgcagctttggagcactcagaaatccaaatcgaggaatgaggaagatgataggtctgggccagcgagcccaattaatgggaattcgtgtgtccccgagaaggagggctcgcaagttccgagctttggtttgatggctcgtgcttctgaactgagtcatagcaattccaagagtgttggtggagatactagttctggctcctctttgctccgtgttgaggtacagagtcagccacagccgccgcagcatatgcagcagaatccgaggaaacaacggcggtgctggtcgccggagcttcaccggcgctttgtggacgcccttcaacaacttggtggagcacaagtggccactcctaaacaggtttgagagatcttatccaggtgaaaggccttacaattgatgaagtgaaaagtcatttgcaaaagtacaggcttcatgt

SEQ ID NO: 24490 - DNA, 363 bp, Glycine max
caacgcccaagccaaacaattgccctgccaacacctctaccactccgattgcatcacgccgtggatagaactcaactcgtcgtgtccgctatgcaggtttcggttggaggaagaagaggaggaaggtggtgacgccgacgctgacgccgacgccgttatgacggagatcaggagggagatcattgcgaggctgacggagctgacggaggaggatttctacgggctcaggaccacgctcagccacattgcctcgcgccacgcgctcatcgaagagaaccagaatcatcgcgcgcagattggcgagcctcgcggcggcggcggtggaggtggcggcgattcggcttgctgataacgacgtttaca

SEQ ID NO: 24491 - DNA, 741 bp, Glycine max
tcttcgcgtccgcccacgcgtccgcgaccacatgtatttcatagagacggacagcacaacatggaagctataaaaacattagaccgagacaaaaccagctttttttttttttagaaatggcgaatagagaagaaaacaacgagggtcacaaattcacagtgaaatatgttggactcaacggaatggaatgcgaaggcaaattgccgaggagggtggtgggagtgagaaatcactgttaccttttgaaatccaaaatcggagagggttcattctccgccgtgtggagagcggagcagagaccaccaaccggcgttgacgtggcggtgaagcaggtcttcctctccaaactcaaccctcgcctcaaggcatgtttggattgcgagatcaatttcttgtcctccgttaaccaccccaatattattcgccttcttcacttcttccaggatgatggatgtgtgtacctggtcctggagttttgtgctggagggaatcttgcttcttatattcagaatcatgggagagttcagcaacaaatagccagaaaattcatgcagcagcttgggtctggtctaaaagtattacactcgcatgacattattcacagagacttgaaacagagaacattttgctatcaagccacgggttgaagcagtgctaaagtagctgatttggtctctcaaggactgtatgtcctggtgaatatgctgagacagtttgcggttctccattatatatggctca

SEQ ID NO: 24492 - DNA, 358 bp, Glycine max
gaatcctgtgccctaacccacatcacacttatcgtcgtccgttcaccgtctttcttcgccggcggctgaggcaccgcatccatctattaatctcgagagaagcgaaagaaaaagagagaaaaactggggaagcgaaagagaccgaaagcgaaaggtagagtgagggagatggagagttcggggttaggtccagtggattgcgacgttggatcgattgtttgggttcgaagaaggaacggttcgtggtggccgggtcaaatacttggccccgatcacctttctgcttctcatcttacttctcctcgttcaggaactcccgttaagcttctcggaagggaagatgccagcgtgattgggg

SEQ ID NO: 24493 - DNA, 339 bp, Glycine max
ctgatttgtataagaaagataataataatgtgctggactacgtccaacgtcatcttatctctttatctatttgggaggcattacgattttgggaaggatattttgactatttaatggagcaatcttcaaacaagtctgccaactatgcatctttggtgacagctcagcttgttgtgttggcatcacacatggtattgtttggtctactcatgtgcttgaatttcattgaagtcaagttgtatctttttgtgcttttaatactttgcctgcatgaaggctgggctgggacttcctgataatgatgcttggtacatgatcgaaacaattgcagagaggaac

SEQ ID NO: 24494 - DNA, 434 bp, Glycine max
gttgcaaacttctccgattttgaagatcctccatcaccaccatcgagttatgataacacatacttaaatgaagaggagttcagcaagcccccgccagaattaccacctcaactaccagtggcaataagacatgaggcttcttcatccgcaagtggtagtcgttttgtccctaggcccacgcatttggaactgaatcatctatacatccacaaaactgataggggtcaatttgtggcactacgatcaacttacaagtttcaacacaaatatattactacggaactgtacaagtccttacgcagggaaagatgatgaagcattaagatttttgtctgctattgaacttgcctcgtctaagctgcccttatgagaacacttgttaaggtcattaatttaatgtgtagaaaattgattggaataggtaaatgaaaaat

SEQ ID NO: 24495 - DNA, 630 bp, Glycine max
ctcgagccgcttcatctcccaagggattcaatacaataccaggctagaagaaactccactcatcaccatctcaagcaactaattaacaagctagtactctttgagtgtttggcaattggcttagatttcttgtacttggaacaagatggaaagcactgtcacatttgagactgatctcaacctcaaggcaaccgagcttagattggggcttccaggaacagaagaaattgttgaaaaaccacttcctgcaagtgctagaattaccaacaaaaggcctttgtctgaaacctctgaggagtgtgcttcaaagggttctagtgctccacatgtggaaactgaagcagcccctcctgccaaggctaagatagtggggtggccaccaatcagatcctacagaaagaacagccttcaggagaatgatggtgctgggatttatgtgaaagtgagcatggatggagctccttacctcagaaagatagacttgaaggtctatggaggctacacacaactcctcaaagctctagaaaacatgttcaagttgaccataggtgagtattctgaaaaagaaggttataagggatctgactatgcacctacatatgaagacaaagatggtgactggatgttagt

SEQ ID NO: 24496 - DNA, 360 bp, Glycine max
gcaatggcaatggtttctgtggcaagagctgggacaagctgcagtatctttctctttggataaaagtcggtgatctgtatgactccattggccagtggcagggttggaggattgtcccgtcttggaagagattcgaataaaggttgaaggagatagcagggggcagccaaaacccgcagagagcgaatttggtctgagcattctggcttgttatcctcagctattgaagatgcagctggattgtggtgatactaaaggttatgctctcacggcgccatcggggcaaatggatttgagcctgtgggagaggtttcttctgaatggcattggcagtatgagtctcggtgagcttcattactg

SEQ ID NO: 24497 - DNA, 359 bp, Glycine max
aatttgttttccgaagccaaattgagaagaaaagacaataggttactcatataactggttagggcttggatccgcgcgcatggaagcaggtttctcccatcgaaggcaaagcagaaagaacggaaagggttcaagtcggagtaccacctttgctggatcattgagacaaacctttgcgtctttcatacgtgtgattcttttagacatgtgaaacaattgttttctggagctgaaatctgaatgttactgcaataattatggattcttctgctgtcgtgggtagcacaatttcagagcctcatagtgatatggaatttgaatctcatgaagcggcatatgcattttacaaagaatatgct

SEQ ID NO: 24498 - DNA, 345 bp, Glycine max
taacaaatggatatagctatcttctctccatcatccctcttctctgaagatgacattcctactcgcgaggaagatgcagactctcaagaaagctatgttgagaggaagcaccagtttcctgggatggagttggttattcgagaattttcctttcatcaactgaatgctaatttactctggccagggacatttgcatttgcagaatggttagttcagcacaggtcatgcattgaaggacggcgtgccattgagttggggagtggcacaggtgctttggccatatttcttcgaaaatcttacaatcttgatattacaacttcagactatgatgaccaagacatagag

SEQ ID NO: 24499 - DNA, 376 bp, Glycine max
gggggaggaggtgtggtggtagttttggacttcgatcgaacaataatcgacgatgacagtgacagatggattgtggctgaactgggtctgactgagctattcaaggagcttcgtcacagcatgcccttggatctctctcatggacaggatcatggcccaactccactccaacggcgtcaccgtcgaccacattgctgactgcctcaaaaggctccccttccctcctcccatcgtttcagccatcaaatccgcccacgctcttggctgcgatttgaggattatcagcgacgccaacaccttttccattcgaaccattctccaacaccacgccttgtttcactgcttttcccagatccatacaaaccctgcttttctt

SEQ ID NO: 24500 - DNA, 386 bp, Glycine max
gcagtctcattccttgcaactgtacctttgggagaattattctttttccatatgatcctgataccaaagggtatcacaacttacgagtatgttgtggccatgcgaactctaagtgaaccacctgggccttcagttgatgggggtgaacagcagagtctaccatcgtctcctactagttcagctgtcactgcaatgagtggaagaagctccgttggaatgagtatacagtacaaaggtgcctggtgtacaccgccaaggatctttatggaccacccggatgaaattataccacatttggagccaggacgcctaccatccactgttgatccagatgcagtacaatcacctgacaaagggagaaaaatgaaccagcgccctgtgcgaat

SEQ ID NO: 24501 - DNA, 576 bp, Glycine max
tgaatatgtggctattggtgtttactctgtattggctctctctgtgttctttctttatgttcgatgcactgccattgatcccgccgaccagggcgtcatggttgattgtgacaagacatcaaagaatagatcaaaacttgatgaagagttggcagaacccagcaagatgggactaaagggtgaaggaatgtctgatcgtcacaattcaagttggtgctctaaagttgggtgtttcttctgtagtttccttgttagagaagattgccgcagtaatgaagatattagtctacagcaacaatctggagaagaggaggctttgttctgcactttgtgcaatgctgaggtgcggaagttcagtaagcattgtcgaagttgtgacaaatgtgttgatggatttgatcaccattgtcggtggttgaacaattgtgttggaaagaagaattacatcacgtttgtgtgtcttatggcagtgagcctagtttggcttatagttgaatgtggagttgggattgcagtacttgtcagatgtctcgttgataagaaaggtacagagattcagatagctgaaaactttga

SEQ ID NO: 24502 - DNA, 338 bp, Glycine max
  unsure (1)..(338): unsure at all n locations
ctcagttccaagtagatccatatggatgtcgaggctcactttatcacaagaaactaaagcgtgacccttttcatcggtcaattccttatcccaatgggtgtcctgaaattgaaggcttgttcagatattgtggaccaactccttatcctggtgcactaccgtgggcacagtaaacatgacatggtcagattatatcattgtatactaacaaaatagagatattagatgccaacattgcatgaatttgttgataaaatgatgtgaagattanattttgttctggagatgagatgatacattgtgtaaatcanaatggtgttgcatgtttgtgtgaggag

SEQ ID NO: 24503 - DNA, 384 bp, Glycine max
gcgctatagtaaaatgtagtgacagacagatgcacttgactggtctggtacccttgtccaaaggttgctgcgtgtacagccacatggtctgagtagcgagtgacttctgtttgtgagaagtttggaataaggcaggctacgccattatgattattagcaaagcagtttagacccaaaacttagaccaatgtacactctgcatgctactgtcctttggaaagctaggactgccttgatgctattatagatgtattatgtaaaatgttggtgctttcgagctctgttatcactgttcagttgtgacaagcgtctgccgttgaagaaatgactctaattaaaggctgcctgcacccttatatttcaacaaaattgttggctttaaaa

SEQ ID NO: 24504 - DNA, 396 bp, Glycine max
gtattcggctcgaggaaaaagcaaaaatcaatgctaggcagagcagagacaccaaccccaacttttcaaatcttcttttgcatcactaacttctttacagcataaagcgaagcaataaaagagactccctttgttatgcttgcccttctatttcaatttcaacgtgttatcatggcttttgtaacctcaggtagacgaggatgagatttattggagacgcagaaaggaagatgaagagttggaatggacacctaattccactcacttgatatctcagttgactcaatgttttactaatgctatggttggatcacgatcatggataggaggactctttaaccgcacaaccactaagcgaaatgacaaattcgttgattatcctttgattcctattga

SEQ ID NO: 24505 - DNA, 338 bp, Glycine max
atcgatgtttctttgtgctgtgtttgacttacggttcttgtgtttcagattctcaactggttatcccacagtcccacggagatggagagctatataaggccaggttgtatactattaacgatatacctccgtcttgaaaaatctgcatgggaggagctctactgtaatctaggctcaagcttgaggaagcttcttgccgaatcacatgattcaccttggagaacaggatgggtatatgcacgggtgcagcactctgtagcttttctgtataacggtcaggtagtcttagatgtgcccttgcatctcaacagcgcacaacattgtcagatttcatgcat

SEQ ID NO: 24506 - DNA, 331 bp, Glycine max
  unsure (1)..(331): unsure at all n locations
cgaaaaatggcatcggataaggtggtggaaacggtcatagcagggaactacgtggaaatggaaactgaagggaagcccaaggacgtaaaaaccaagctatcaagcttgttgtggcatggaggttctgtttatgatgcttggtttagctgtagctctaaccaggtggcccaagtgctgcttacgttgccatactcattctcccaactgggaatgctttctggcatacttttccaaatcttctatggtttactcggaagttggacagcttacctcattagcattctctacgttgaatacagaacaagataagagagagcnaaagttaacttca

SEQ ID NO: 24507 - DNA, 586 bp, Glycine max
ctttacttttggtgacaagcagattctgtagagagattccacatttcatcttttatcttattcgttttggctcaaaatattctagaggcagagggtccctggtttgaaagttttctcattgtaagatttggaaatattttagctcttaatattaatgaaagaaaatttgtttatcctgttcctgacacattttggatggtgcagaatatcctcttggtttatgtatctgaaatgattattgatattatcaagcattcattcattgctaaattcaatgacattaagcccatcgcatactccgagttccttgaagatctatgcaaacagactctaaatatgcaaactgagagtgcaaagaaaaacctgacttttgtcccccttgctccagcatgcgtggttattcgagttctcactccagtatatactgcaaaccttcctcccaatccccttccatggaggcttttctggattctgcttttttcagcaatgacctatgtcatgctcacaagcctcaaggttctcattggcatgggactacagaagcatgccacatggtatgttaatcgttgcaaaaagagaaaacatc

SEQ ID NO: 24508 - DNA, 326 bp, Glycine max
gtgatttgaagttttcttctctagcattttatggttttagttgcattaatcaaccggtatgggttgaagctcagttgattctagtttgctttcttatctgtcatcaaagttaagaactaagtatcctgtcattgttaggactgcctctcttagttatatcataactgctataatgtgttttagttagaattctgttgttcataactgctatatgcttttttctctttttatattttggtttgcatagctccgtttcatccgccatgtcacaaacaattgctgtgttcaaagaagcggttgaagatcgagtgtctatttgacacaca

SEQ ID NO: 24509 - DNA, 317 bp, Glycine max
  unsure (1)..(317): unsure at all n locations
aaaaagcttcgagctttagcgtttgtacgatgatgggtagcggcgacacgtcttcttcttcggacttcttctgccgccgccatgtgttcctctgctacaagaaccccgccgtgtggccgccgcgcattgaggctgctgaatttgatcgcctgccaaggttgctccacgccgccatcaatgccagaaagcctcatatcaagaaagagacctgcttaacaatatgtgaggggcatgatgggactgaaacatcaaatggagatgtattaatttttccagacatgatcagatataggagattaacccatnttgatgttgag

SEQ ID NO: 24510 - DNA, 341 bp, Glycine max
  unsure (1)..(341): unsure at all n locations
aagngctcgactcgagcgcgaaattttaaaggagtgcttatggttagtcatcttgcgaaatgcacctaattatacatgcatggagcatcaatgattttcatgaaggtgctatttgcaagagaaacatctgacgtgcatgctcccttttggcaagataagacacatgttttggggtctgtttgagtactgtgtagtatcaattactggtgaaagaatagaatgcaagcttaacatggagaagaattggttaggaatcatgtattttattcacaattttctttttaaattatatgctgggttgggtttcttgtttttcttacccaatgtcattatacgcatat

SEQ ID NO: 24511 - DNA, 413 bp, Glycine max
tgctggttcttctgtcaatgaggagtccttccaggcttggaaagaaagtcttctacaaagcaatggcaaggttcaggctcataaaagttatagcaccaaacttgtcggtctgcctcatacaaacctaagtcaatctgtagaaagtacaagccatttgtcatctttgcatgtaccgagtcattatgagcagcacatgtatatgaatcagacaactgatgaatggaagcgtgtggtgataaagccaagctcctacacttctaactcaggtgtactgcagaaaagaagtgctgatggttgcactaagagatgggacaatgatttacacaggttgctttttatgccaaatgggctaccagatggtgctgagttggcttactatgtcaaaggacagaaattacttggaggttacaaac

SEQ ID NO: 24512 - DNA, 560 bp, Glycine max
cccacgcgtccggccataattaagaagatagctggattagtttctgatttctataagcgtcccaatgtggaaagtcctgcaaaagctgcactagatgaaacctctcacatgtttgagaatcgaggagtccagatgctggggcaaataaagcatggttcttgccgtcctcgagctatcttatttaaagtattagctgatactgttggtcttgaaagtaggctcatggtgggcttgccaaatgatggagctattgaatgtcaagactcatacaagcatatgtctgtgatcgtcgtattaaattccctggaaatgctggttgatcttatgcgatttccaggccaattgttaccacgatcaaccaaggcagtttttatgactcacatttctgcaggagagagtgattcagcagaaaatgattcttgtgattcaccattagaacctaacagccctttatttggggtttcagagagtgctgagaaggaggaaaacctccaattccatagaagatttgaaaaatcttcgaatgtatcaggcctatccttgagagacgtgatgttacg

SEQ ID NO: 24513 - DNA, 339 bp, Glycine max
atcatcagggttaccaacaacatcagaaccaaccctcttctgggttgcttcgttttcgctctgcgccaagttctcttctttcaaatctcactccttttgtgagtgaagactttggttctagcagcttcagagagttgcaaggaaacaacaacaagggttgttctaaggatttgagttcgatgaattcgcataagggcgtgtatggtggggggttgccacctcactatccaaggcatcgtggttcttcttcctctgctgctacttcgagttctgctatggacaggtcttttggattggtgggttcaatgggaatgaatcatgaaacgccgcaaaacgggc

SEQ ID NO: 24514 - DNA, 508 bp, Glycine max
  unsure (1)..(508): unsure at all n locations
tagncgatgaagatgagtccttgctgagaagctcaaacactctcttaacaaccatgtattggatgatctagaacttgatgatgacaagtataaggttcctgcagacttattgaagaataaagatgctccacatgaggaacaagaggattctgctgctgatgtgattcgtcgctgcaaggaatatgctgaggagtatgaagttgaagatgatcacaaggatgttgtacttgtacaagaaagtagtgatgaatcagaagtttgggattgtgagactattgtttcgatgtactcacatttagataaccaccctggaaagattgaagcacctggagtaaccaggaaaaagaaattgtctgaaaccgtgtctgcagtcttgagttcctctagtcaaataataccccttagaggaaaagagaaactccccgtagacttcttgcctggtggtaggaaacctgccaccgaaaaggttaaaggccagagcattgcaaaaactgagcagtacaagaga

SEQ ID NO: 24515 - DNA, 501 bp, Glycine max
tcttctgcatctgttaaagaatctaatgtaataaagtccgataagcatcaggctcaacagaaaccattttctaatagtgtcataggttcatcccccaatgttttactcccacaagcatcacaactaaaggctgaagaggcaacttctgtttctgatttgcagaggcagattgttccatctaagtctcagctatcatcagagtatgggatatctcagaatcatgcctcttctaacagcaaagattttcaacatgaagctggaaaaatgaacttcttatcccctctatctattcaagtgctgcaagaaattgggcggcggtgtaactctaaggttgaatttaagtctattttaagcaccagcaaagacttgcagttttcagtggaggtactattcactggtgagaaaataggtgttggtatgggtaggacaaggaaggatgctcaacaacaagctgcagagaatgctcttcgtagtttagcagagaagtatgtggcacatgtg

SEQ ID NO: 24516 - DNA, 459 bp, Glycine max
cggggagaaggcatgttcgtccgcgatgctgttcatgaggactgggacctgcagtgttgttagggttgccaaggtgaggatggagagggatgagattgttgagaatgtcgttgccgcgattgtcggcgctgtggaggttgtcccgaagaagtgggggaatgtgaggtccttgcatttgaagctgctggagagcctggcgctgccggtgtaccagacggttccggatgtgaaattgaagattgatggatttaaagtcgaggagccggccgacgacgacgacgaagaagaagaatgaaacgaaggagaaggacagtgagggtgaggttagtgattcgaagaagaagaaggggaggattcatgaggttaggtacatggatgagattgaagatcaattggccagcgatgatagtgaagatgagatggtgagtaagaagaggaagaaaggaggttcgagtgagt

SEQ ID NO: 24517 - DNA, 330 bp, Glycine max
gattaataaaggccactccttaattaatcttgcactggtcttattgaacacaaggcagtcataatacactagttcctcaactccccaatgtcgcgctaagaccagtgcaagattaataaaggccactccttaattttgttgtatttatcggttattgtagctgttggaggcctattatgtcaagttgtcaagtcgtcatttaggcggtcaagacttattataggagggcagtgtcactgcctttgctgcagcataatggtttggacttttggacaatgtaattaatgtatggagtccttgtcttgcgtcctgctagtggactggcctttg

SEQ ID NO: 24518 - DNA, 336 bp, Glycine max
ggttcgaaggtgcaaagcaaggaagctgaaataactaaatgattctgaattcttgttccatgagtccacaacctctgtcacctcacaatttcagagacctcttcgattccgtcgaagcttttctcttcgactgcgacggtgtgatttggaagggcgacgaactcatcgatggtgttccgcaaactctggacatgcttcgcgccaagggcaagaagctcgtcttcgtcaccaacaattcctggaagtcgcgttctcagtacgccgacaagttccgatcgttgggaatttcggtttcgcaggatgagatattctcctcgtcttttgcgactgctatgt

SEQ ID NO: 24519 - DNA, 514 bp, Glycine max
  unsure (1)..(514): unsure at all n locations
gctgcataatgctactggcctatgcaagctacagtttggggacttctaagnggaaagaanaggtagcttgcataggccagtagcattatgcagctgctaaatgctatgggcctatgcaagctaccgtatctttcaacttagaagtcagcaaaatgtagatgtgtccagttgacgaggaaggagataatggtgaaaattctgatgaggaggaagaacatgaattaactcaatgggaggcaattatctggcttgctatcttgacagcatgggtatctatattgtctggataccttgtagacgccatacagggagcatctgagtcattgaatatgtcagtggcttttatttctgtcatcttgcttccaattgtaggcaatgctgcagaacatgccagtgctatcatgtttgccgtgaaggacaagcttgatatcactattggagttgctattggatcatctacacagatatctatgtttgtgatccctttctgtgtggttgttggatggtgcatggg

SEQ ID NO: 24520 - DNA, 479 bp, Glycine max
gcaatatgataagggttgttcagcaatctttactcggttcaatcttgtcaaatatgcttctagttcttggctgtgcattctttactggtggcattgtccactacaaaaaagtgcaggtttttgataaggcagctgctgttgtcaattctggcttactcttgatggctgttatgggaatactatttcctgctgtgctttactttactcactccgaagttcatcaagggaagtcagtcttgtctctttcaagatttagcagctgcataatgctactggcctatgcaagctaccttttctttcaacttagaagtcagcaaaatgttcatagtccggttggtgagggaggagagaatggtgaaaattctgatgtggaggaagatctcgaattaactcaatgggaggcaataatttggttcgctatcttgacagcatgggtatctatattgtctggataccttgtagacgccatacagggagca

SEQ ID NO: 24521 - DNA, 330 bp, Glycine max
gtttctcatttcgtagagtcgtagcggcagctccgccgttggtccaccgcctcctcctcctcgcgccgccgcacttcggtgacgacggaagacacgtcgaattggtcctccgtggaatagtcctcgtttccccgtttggaataatttccatcacttttcgttgctttcgttttgttcgaggttgggaggagaaaatgaagcaagtagtaggaatggtggtttccagtaagatgcagaaatcagttgtggtggcagtggatagacttttctatcacaaagtctatgatcgttatgtcaagcgcacctctaaattcatggctcacgatgaga

SEQ ID NO: 24522 - DNA, 636 bp, Glycine max
ctggagctccaccgcggtggcggccgctctagaactagtggatcccccgggctgcaggaattcggcaccagatctcctccacctccagtgaagaaaccctacccacacccacacccagtctaccactctccaccacccccacctaagaagccctacaagtacccatctcctcctcctccagtgaagaaaccctaccctcacccacacccagtgtaccactccccaccaccaacacctaagaagccctacaaatacccatcacctccgccaccagttcacacctaccctccccatgttcccaccccagtctaccactctcctccaccaccaccatacaagaagccttataagtacaagtctcctcctcccccagtccactctccacctccaccacactactactacaaatcaccccctccaccctaccactactagaatatagccctttcatatcacacccccacatggatgtatacagaaagtgtgaaaatgaaagccatggagggggaaggtgcagttgcagtttgcaaatccacaaagaagtataaatgtttgattattgttattgtttagaggactctgtctagttaaaatagttattggctttgtttatcaacgtggagggctgggtctctg

SEQ ID NO: 24523 - DNA, 600 bp, Glycine max
gctgtacgtagtggcaaaacggtaaaaaaacatgagaaccatgtcgttaatggaagcttataataattaaaattgtattattattgttttacacaacgagttgaacatccaggttcaagtttggcatctgtctcccaatacggaacccaaaattagctcgattaaatccaaatctgagagaagcattgattggtacggtaatggcggaagggaaggaagagagtaaatctagcgaggaaagtgtgaagctgttcgtagggcaagtgccgaagcacatgaccgaacccgaactgcttgcaatgttcaaggagttcgcgctcgtcgacgaagtcaacataatcaaagacaaagcgactcgtgcttcccgaggttgttgcttcgtaatttgtccgtcaagggaggaggcggataaggccgtcaatgcgtgtcacaataaaaggacgttacccggggcatctagtccattacaagtgaagtatgcagatggggacttggaaagattagaacacaaactcttcattggcatgcttccaaagaatgtttctgaagttgaaatatctgctcttttctccaagtatggaactataaaggatttacaaa

SEQ ID NO: 24524 - DNA, 484 bp, Glycine max
tcgcgtacgcgtgggcttatgacaagggtactaatcatataatatcaatgggtccaacatatgataaggtggattcaaatattgcatcaacagttccatcatatgacagaggagattctagttccttacctgtgggtcaacaccaccataagggtcagagcagttccatttctttcggaggttttcatgatgaccctgaaccaaatacccctggtggaatcattagtggctatgatctgttgataggaggccagaactcagctcaaggattggatagccagaacgacctgactgagacaaacactgaatcacttgtaaatagcattccaaaacccaatactaaaaatgatattgttgttaagaacaaagagccaaagacaaccaagaaggctcctactaacaacttcccttcagatgtctaaagtttgcgttcaactggtcattttgatggtgttcaagtgaaatatgtttcgtggtcacggga

SEQ ID NO: 24525 - DNA, 328 bp, Glycine max
gcaatatagcctcttagacatagaaaaatattaatatttgctttttattttgtttgtttgttggcttgcttgcttgtttagctctgaaacacatgtgtttgttggtcttgaactcttgattgatgctcctgagttattatgagttgaatcatggattgtccataaggaatattcgctattctagtttaagaagtatgtgttaggaaatggtgaacataacaggaggctgtcttttaccagaaagttttttagcagtagtcacaacattagaatagaatatagtagaagcgactcttttcttttcaataactctcaagcacatgagtgt

SEQ ID NO: 24526 - DNA, 431 bp, Glycine max
gatcactgatttgacacgtttgtgccgagaggggaaagttaaagaggcaattgaattgatggacaaaggggtcaaagctgatgctggttgctttgaccttctgtttgacttgtgtgggcaatctaagtcccttgaggatgctaagaaggcccatgaccactttctacaatccacttttaggagtgatctcactctgaacaacaaggtgattgacatgtatgggaattgcaaagcatgactgatgcacgcagggtgttcgatcatatgcccaacagggatatgggctcttggcatttgatgttgcggggctacgcttataacaccaatggggatgatgccttgcagttgtttgagcagatgaatgagcttggtttggagatcacttcagagactttgcttgcggtgttgtcggcttgtgccagtgcagagga

SEQ ID NO: 24527 - DNA, 454 bp, Glycine max
cgcatcgtgattctaacgttaacttccatttccattttctttgctgcgatgcgaatatgcttcctccaatccgtccttctacaaatgctatgtgaatttcatttcttctttaaatttcaattatagaatctccagtgtggaatgcaccataatattcatgtgaaattgaattgctttttcttcttcaaaattaaactcatattgtcaaacctgccatgtatttgatttgactgagtatctttatgctggccaattaattgcttttcagctgctgacagatgctgagtaccgatccattttctctcctttttcgcagtcaccattagaaggaagccatggaatctgagagggaaagttttgacctctcaggacctttgcatctaacttatgccttatgggacaatgcatatcatcgaatgtcagttgctgctagtttggtccaaggtgtttacat

SEQ ID NO: 24528 - DNA, 389 bp, Glycine max
ctaaaaaatgatgtaatcattgcaaagagcctgccagaaagtatgatggaaaggagaagaagaaatgaatttcctacatttaagcccacaagttcagcttctctaaacttttacattaaagaaattttaccaaagctaaagaaatcaaaggttatcggattaattattgccaatggtggagctctgcagtcaatactcccacctagcatggctgagattcagaggctaagatgcagggttgctttccatgccctgcaatttcgtccagaaattcaaatgcttggtcgtcggatggttcacaagttaagagcattaggccaaccattcttggcattccatcctggcttattgagagaaacctgcgccatgttgcgactttcagatgaaac

SEQ ID NO: 24529 - DNA, 1066 bp, Glycine max
acacctttttctttttggttcagttcagctagctgcagcctgcagaatttataacaacttctgactatgaccatgtcgggtcctgaagaacacggaagcatgagcttaatgggttcgttacgtgtgatagagctgcagctagtggcattcgcgttggttttctcagcaagtggtcttgtccctctactcgatttagcttattcggcccttatctccatctacctaatgctacttgggcgttttgcgtttccgtcgcatgggtgtgcgccgggcccgatgttccacgaaagtgggcttttccaagtgtacgtggttgtgggcacgacggtgggcctgttcttgccgctggcctacgtgcttggtgggtttgggagaggggacaagcaggcggtgcggtcggcgagcccacacttgttcttgctggcgttccaaatactgacggagaatgtgataagtagcttctcgctgttctcgccaccagtgagggccatggtgcccttgatgtacactgtgcggaggatctttgtggatattggttggatacatgatgtgtgcctcaacaagactttgcccccatatgcaaacctcaaggataaggcgtggttttggtttggcagggttttggcagtggctaacctggtatatttctccatcaatctctttgggttcttgataccaaggttcctgccaagggcttttatgagatatttccaagagaggggagagatttatgccaagctagttgaagagaagcgatatgtgaatgtggtcaacaataaatcccatccaccggacaagaagtaacattaactaaggatttttgtcaatatctgttactattttaaacgtgtgaatcgtaattcgagtctctctccccaaaaaggaaatcatctgaaaagtcaatgttctcatgaagtagttctggtacctttcagcttggataaagttcatcaagttattaacagatgtcttgtttctcccgaaaagatttgctttctgtttaacaatgactcaacatgtataataaataattttccacgataagggacaagccaagttgaagatt

SEQ ID NO: 24530 - DNA, 449 bp, Glycine max
cttataatttgtgaggggtaagaaaatcagagaagttaaaatatggtttctgtccttccgaagaggataatactgatgcggcatggggagtcacaggggaacctaaatacagcggcttacactaccacacccgatcacagcattcagttaacggcgcagggcatgacccaggcccgccacgccggcgagcagctccgccgcgtgatgggcggcgatgggtgttctcctgactggcgggtacaattctatgtgtctccctacggacgcacccgatcaacgctccgcgagctcggacggcatttttcgagaaagaggataatcggcgtgagggaagagtcgcgggttcgagaacaggacttcggaaactttcaggtggaagagaggatgaaggtgataaaggaaacacgtgaacgttttggaaggttcttctatcgctttcccgagggaga

SEQ ID NO: 24531 - DNA, 555 bp, Glycine max
gccaagaattcaagcctttggctgtgtttgaggttgtacttgctgctgctcaagctgcattgacaactgtgtttgtggtttacaaagcaactaaaataaattatcgggcgtttccaaggaatacattgctgcaagatgctggtatcacgtctaacggtggtaatacttcagattcatttcaaggatctcgattgcatgcaaacatacagcttgagaaggaagagttagatgtggaaaaagcaatttctgagattatagaagttcagatgaaaaatatccaagataagcttgttcattttgaagatttggacctgctgatggaaaaagaaggccagcagatggagcaaatgaaaaatatgtttttccttgatcagcttactctcttatttcataaatcatctgcaccaaaaactggagaatgacaagaaggcaataatgtatagacgaaccatggctgactactcttaattagctagtgatcttaggcttagcgaatgtattcaattatcctgctctctccatttgtcttggccacgagtcactggactattagtt

SEQ ID NO: 24532 - DNA, 336 bp, Glycine max
caagagcttattacaatcgaagaagacctcttctcatccctgggattgcattttaaaactttggatatggcttctgaagatttaggtgcacctgcctatcagaaattcgatgtggaggcttggatgcctggtttagaacggtttggtgagatctcaagcgcatcaaattgcacagactatcagagccgtcgtttgggaataaggtatcgtcctgcatcagaagcacaagccacaagtgcaaaaaaatctaaaggcaatcttgccccacctcagtttgttcatacattaaatgcaacagcttgtgctgtaccacggatgattatatgtttgcttgag

SEQ ID NO: 24533 - DNA, 366 bp, Glycine max
cggaaattcacaaacccggccctagtccaaaatctcataatatgaaagacggtggaacaaatgttgaggtttcagaagatggatctaaaagagaagatacaacctcagagagtggtggtggaggaggccttattaacaacttggtttccactttgatagcacccttgagtccaagcattgggaaagccactgagcatgaaagtggtgctgatgatgatggagaaaaagaaggggttgatggttgtgaagagggaggagggatcatcagaaaaatggtttccaatttcttccatcaaagtgaaggtgaaggtgtggttgaagctgaagaggacaaggaagctgtggatgaaatcatggctggtggtg

SEQ ID NO: 24534 - DNA, 132 bp, Glycine max
acaagctggacacttacctgtaagtatatacaatccattacaatctgagaggatatctgctttctgctgctcatgatgattcgtcatatttgtctttcagagtattatatttctcgctttcccacaccttgt

SEQ ID NO: 24535 - DNA, 488 bp, Glycine max
ggctgaagatcacaagagctgacagatgctagttaatttaataataaactgatggaggtttcaagcctacactgtccaaggttgaaatgaacgtagcatggcaacaaggaaatctgagaaaattctgccaagagaaaggaattcatgtgagtgcatggtcccctttgggagctaatggtgcttcatggggttctcttgctgtgatagatagtccagtcctaaaagacattgcaattgcaataggcaagagtgtggcacagatcctgaaaccgttctatgaactaatcaagagtgaaacaacgatgatgagaactgcttctcagaaatggggctacattcggatcatggctggtacaatctttggaggcatccttggattctatgtcatgcaccgccttgaaactaactacaaggaataaaatccaagatagtaaactaactctcaaagagcttgaaactacgcacaacaactatatgaaaagacaaga

SEQ ID NO: 24536 - DNA, 433 bp, Glycine max
acgaggcgaaactcactttttttcccaattccaaccttgaaacccattcaccagtatcatcccctcccctggcttggcccaccgcccccgacacgcctccccaccatctatgtcgcgatttcccgcaccaagaaagcggtgacgtttccgttctccggggcgacgaggctgatgaaggaggtggctttgatgcacaaacgtgaatctttcaaggaagggccttaagatctcttttttggcagctgaacccctcctgtgacgacttcgtagcgtgcgttcgtaaggtgctttttattctcccattatttacgtttgtatgtttaatgcttttttgagtttcttttacagctagagcagaaacaaaaatatgcagtgtggaaagccgccgaaataagaaaagctttgaaagaaggaaggaagtccagtgctggcc

SEQ ID NO: 24537 - DNA, 305 bp, Glycine max
cataggcaaattcatctgaaactgcttcagccattggaatgtcagaagatcttctccggcctgcgaatgtacggcaactacaagctccccaaacactgcgacaacaacgaagttctcaaggctctctgcaacgaagccggctggaccgtagaagccgacggcaccacctatcgcaagggatgcaagcctcctgtatgaacgcatggacatagtaggtggttctgcagcagcaagcccgtgctcatcttaccatccaagtccttgtgctatctacaaccctagtccatgctcctcttgcttacgag

SEQ ID NO: 24538 - DNA, 360 bp, Glycine max
gagacattcctatagtggcctaatggttacattggtggtatcccttggagccctgtttcctttggaatttggtgattagaagtatggtgtgttctagaatggataagatgcaggccatctgcaccactaacaaacactccgacgaagcctggtttctttggaagtggaggaaactctttggcatccaacacagcaaacctaaacagcaatggtgtcttcggtgttcaaagcggcccatattctacaccattggatttgaaaatgtttccaggttcaactcaggaaacatcgactgctttcagtaactctggtcccacttcaatgtttcaaacaacaccagatgtccagttgttaagtcag

SEQ ID NO: 24539 - DNA, 422 bp, Glycine max
ccagaatctgaagagaatcaatatgcaatgaaatgtattatgagggttcttgccgttgcagatatatctgttgatgttgcacgagtttgtgttgaagggttgggctctcttcttactgaagtttgcaaaaatccaaaaatcccattttcaaccactatctctttgagtcggtagccattcttgtgaggcgggcttgtgagagggacccatctcttgtatctgtttttgaagcaagcctttttcctaggcttgatgtaatattgaccaatgatgtgactgagtttttaccatacacgtttcagttgcttgctcagcttgttgagttaaacaggtcacccatcccttcaatctacatgcagatatttgagcttctattgtcacctgaaacatggaaaagagcctcaaatgttcctgcacttgtg

SEQ ID NO: 24540 - DNA, 334 bp, Glycine max
tggctatatatgaggagatgataaataatgggttgacaccaaattggcctacctatgcagctttgttacaagcctattgtagagcacggtttaacagagatgcactgaatgtttacaaggacatgaaggagaaggggaaggatttggatatacttctttataacatgcttggtgacatgtgtgcaaatgttggatgtgagggtgaagctgttaaaatttttgaagacatgaaaagttctgggacttgccgtccagacagttttacatatgcatccttgatcaacatgtactccagcattgggaaaatttcagagatggaagccatgttcaatga

SEQ ID NO: 24541 - DNA, 400 bp, Glycine max
ctactagttgctttgatgatgaatggaagaaacaggtttccctttaccccatcacagtggcaagagcttgaacaccaagctctcatctacaagtacatggcttcaggcatttccattccccctgatcttctcttcaccataaaaaggagctattttgattcccctctctcctcaaggcttttgcctaaccagccacaacactttggatggaactaccttcagatgggtttgggaagaaaaatagaccctgagccaggtaggtgtagaagaactgatggcaagaaatggagatgctcaaaagaagcatacccagattctaagtactgtgagaggcacatgcacagagggaagaatcgttcaagaaagcctgtggaagttttgaaaacaacaacaccatcat

SEQ ID NO: 24542 - DNA, 505 bp, Glycine max
ctttcatcctctctctcgaacttatttatctctctctgtttctctgttttgctctgcttctcaaaacataaccttttattattatagtattttactattataaactaattttgcattgctaatgcaatggccatagagtgcataacaaatatacaatcaatgtctcaaccacaaaagcaccaccaagagcacaaagaagatgaagcaccattggtttttgatgcctcacttctcaggcaccaactcaacctaccaaaacagttcatttggcctgatgaggaaaagccatgcatgaatgtgcctgagcttggtgtccctctcattgacttgggggggttcctctctggtgaccctgttgcaacaatggaggctgcaaggatagttggtgaggcatgccaaaagcatggtttctttcttgtggtaaccatgggattgatgcaacttaatctctaatgctcatagctacatggatgacttctttgaggatcctctgtctcagaaacag

SEQ ID NO: 24543 - DNA, 798 bp, Glycine max
gtaattgcaggatccatcagagtcccttgctgttgttggtcgttatataagtgaaaattacaatggagctgccctccatcccattgattttatagatacaagtacagggcaactggtagccgaagtgatggacccaaacatcacaaccatcagtcctgtgaataagctgcatccccgtgatgatatcctggcaactgggagttctagatctctgttcatttggaagcccaaggagaagtcagagcttgttgaggagaaggatgaacagaaaattgtggtttgtggaaaagctgagaagaaacgtggaaagaaaaatggcaatattagcgatgaatctgacgatgaaggattcatgtccaagtccaagaagtctaagtccaaaaagaccgagtcgaaattgtctcgctgcactactaaggataatcgctgaagaatgaagtcagagtgcattgaggattttcctacagctttttttgtgaaggttccccggtccaactgctaaccctgtatggtggccaaactcctcccctccttgttttgttttttaggaaatgggatggatgctgttatcacattcttggcttgttcccctggttgtaagatttgatgtttttcttgaagtagtgattttgtatcagatacaagccttatgccaccattttggcttttgtattttgtagtgctagcgtatcatatttaggacataatgccccatagcattttaggatatagtaatagtgttttgttggattgtacctttttgttgatgtttgtaaatggtatagtctcttcaagctt

SEQ ID NO: 24544 - DNA, 301 bp, Glycine max
gcgaggtgctgtatcgagcagtcgtgatgcagctgttggcaatgagactgagccctctcatcctctcaccatggatgctagtccaggagcactccgtagaatctccaatgctcaaagaagttcacctatcatgtcatttgagcacaacagaacatcctctggaagatacacatcaaacatgaagacttacgagtcaactctccggggtattgcgaccctaaatttcaatgacgagagggtacagtattagcagcttccattctcgaccatatctatcatagtgtgttgtgttgtctgtgca

SEQ ID NO: 24545 - DNA, 359 bp, Glycine max
aagcaaagcacaaccacacttgaacctcataagcggagcacccctccctgcccccaaggaataactcttccgacagcaaccctgttcgtttataaccatcaaccaccttaaaccctgggtagctagctttttttttcattattgtgtcggcaatcggttgaggaaaaaaaaaacacagaggagggtgcaaaaagcagggtggtggatgatggaaggggtttcgagggaggctcagatgtcgattgctgcttcgtccatgtttcctggattcagattctgccctaccgatgaggagttgatttcttattacctgaggaagaagttggagggtcatgaggagagtgttcaagtcatttctg

SEQ ID NO: 24546 - DNA, 707 bp, Glycine max
ttgtaatatccgcaggatcttgctggtgacgccatcaactagcgctgagaatttatgcttgacgtgacggagaatagtgagaatatgataacatctcgcatcaaactgtggttttaaatccatctgcaattttaatggtgtctgaattctgaaacacaatttttattatgccattcagattgcgttagctaatgattcttttgttctgtttcattgtttgcttgttccttaaagatctcaaagggtccacaatcgcacaatttgtgaactgctcacgggataaaatggaatgcccttcaagttggatatccacaaacacatagatcttgtattctttgtagtatatttaataggacattgagttatccactcacccaccacaacacattgtttctatcaattttatagcttcaaatttttggtgcaaactgacatgagttgctgctgtgagttcaacggctgtaatcaaggagccaaggttttggctgtcatttttgacttggatggcacccttttggacacagaaagggcaacaaggggtgtgttgaatgagtttttggcaaggtatgggaaagaacttgatagggagaaggaagagaagaagaggttggggatgacacaaaaggattcagcagctataattgttaaggactatgaacttccattgacacctgatcaatttatcaaagaaatcactcctctctaca

SEQ ID NO: 24547 - DNA, 546 bp, Glycine max
ctaagacattgtgaggacttgttggaagacatgccctgtgtctccaccaaaggagagggccctaatgggaaaagaatagaaggctttctttaccggtatggaaaaggtgaggaagtgaggatagtttgcgtttgccatggcagttttctcaccccttctgagtttgtcaagcatgccggtggcggtgacgtggcaaaccccttgaaacatattgttgttagtccgagcttgttgtgaggccaagagaaagaaccagccaattatatgagtgatcagattttactctattgactcctatgttcactcttgaactcacctctacttcttcttctaatctgcatgttatgttcaagttctgttcatcttttgaaatcatagataatattctgaaagaatctgattttcttattcaggtattcttcccctttgttcctatttgacagtagaacaggagggacaatgatacctgttagagtttgttagctagttttctgttatctgttagtttccatcaacttaatttagtacttcagtttttgtttttct

SEQ ID NO: 24548 - DNA, 340 bp, Glycine max
cctcaagccgaatcggctcgatggagttcagaagcttgaacctaggccatccccaaaatcccattccatagtgaaggagtatgggagtagattactataagattttgcaggttgacaagcatgccaccgatgaagagttgaagaaagcttacagaaagcttgcaatgaaatggcaccccgataagaatccaaccaataagaaagaggctgagactaagttcaagcagatatccgaagcttatgaggttctgagtgatccccagaagagagcaatctatgatgaatacggagaagaagggcttaaagggcaagtgccacctccagatgccggtgtgcatac

SEQ ID NO: 24549 - DNA, 371 bp, Glycine max
tatgttgacgaagaaggtttcaactctcttgagtataacaattttaatggagcagtcaaatcaccacctattggacgttttacagaatggcataatgcaaccttccataatggtgttggttttgagagtggaaatggcttagggtctggtgagcaaggttttgctattggaggtcaagaacggctaagtcgaatgaatggttacctgtcagaattggctgctgcagcttttgtttgcagaggtggtgttcaaagagttcacttgctggatggaactattagtggagttttgttgttggaattgtttaaaagagatcggatgggaccgatggtggctagtgacctttacgaaggcactcggacagcagaggt

SEQ ID NO: 24550 - DNA, 328 bp, Glycine max
agaagaactcacctgattcattggagacacactttctctcttttgaattatatatgagcaaacagaggattttgcttgcattccaggctgtgaagcaattactgaggttggatgctgaacaccctgattctcatcgttgcttgattaaattcttcaataaagtaggatctatgattgctcctgtgactgacagtgagaaactcatttggagtgtcttagaagctgagcgccaaactattagtcagctgcatggtaaatctctgttctgagacaaataactcgttccttgaaaaacatgaagatctttgacgcatagagctgctttgga

SEQ ID NO: 24551 - DNA, 414 bp, Glycine max
ggtccagggtcaaagaaaatttaagggatgacccaagatataaatgtgtgaggcatgaggatagggaagttttgttcaatgagtatatatctgaactgaaagctgctgaacatgcagcagaaagagagaccaaagctaaaagggaggagcaggacaagctcagggaaagagaacgggagctgcgcaaaagaaaggaaagagaagaacaggaaatggaaagggtgcgactaaaaattcggagaaaggaggcagttacttcttttcaagctttacttgtggagacaatcaaagaccctctggcatcatggacggaatctaagcctaaattagaaaaggatcctcaaagacgtgcaactaatcctgatcttgatccattggacacggaaaagctctttcgggaacatgtcaagatgc

SEQ ID NO: 24552 - DNA, 503 bp, Glycine max
  unsure (1)..(503): unsure at all n locations
gactgggggctgctgcatccaaagaagagaaggaagagagtgttatgaatagactttctcttctgacaccttcttctgtgaaagaggggtgtggttcaaggggatcaaggagcagttccaacagggctgtttcttcttcttctcctcccacggctcagccgggtttgcgtgcgacttcgcttcagcagactgctaggaaacagaggaggtgctggtcccctgagttgcacagacgattcgttaatgccttgcagaagcttggaggttctcaagcagctacaccaaagcacattagagagcttatgcaggttgatggcctaactaacgatgaagtgaagagccatttacaaaaataccgacttcatacgcggagagttcctngctgaagttctaatcagccagttgtggttcttggaggtttgtggtgtctcaagatagtacaatgactcttcaaagttagcagtcagggtcggttctcctcaagtcctcttcatttggctgca

SEQ ID NO: 24553 - DNA, 674 bp, Glycine max
ggaaaacaaaaagaatagagcagcatttttgccgactctgataaaaattcaaatcctataagctaaaaggatcgatgatgaatttaaaacccctttcctttcctgttcccattccctcccaaacaaattagggtttgggttttgccaacatgagtggttctcgcagatgcaatggcgattgccatggcgatcagaacccagctactcgcagggtcatacgctcccagttcctccaactcaagaatttcatcaatgagaaaagagatgatttgatgaacacggagtccgacaagttcgacaccatcttggatgagttcgacaagttacacgtccaagttgagaagccgagggagcaagttgcagatgcggaggcactgctggatctcacacgcactctagtgggatctgttaagtcgttgacgaatgagggcgtcacaccttctcaatttgtttcatctttgctcatacgctacgcccacgcccaacactcaattgattggcaccaacttggccttgccgcctccccaatcttcctctcctttcatggctcttctaccatgcttggtcccatggacaaccagtttaagcaacgcaaaactggagtgcccagaaactgcaatcctcgccaaattgcaactactagacctctacaggttgatgaggctgttactgag

SEQ ID NO: 24554 - DNA, 264 bp, Glycine max
cagggtttgggttttgacaccatgactggttcgcgcagaggcaatggcgatggcggggaaaatgtgaggaaagcggcgagcgagcagaacccggccactcgcagggtcatacgctcccagttcctccaactcaagaatctcatcaatgagaaaagagatgatttgatgaacacggagtctgacaagttcgacaccatcttggatgagttcgacaagttacacgtccaagttgagaagccgagggagcaagttgcagatgcagag

SEQ ID NO: 24555 - DNA, 339 bp, Glycine max
atgcttccgcacacattccttcaggaacacaatggctccatagtaggattgagataaatgggtatgaggagtatagtggtatggagtatcgttctgctgggtgttctgaggaatattctgtcattgatcgagaaccagggcttgtggtgttagagggtgatattggtgggggattggttcttaaacgtcatatctatgttccaaagaatgttcccaatgccatccagatagactctagtataatagcacgaagtgttggagctggttctggagggttctcagggttggtttgcttaagagttcacccaacatttagtgttttgcatccatcagaatctt

SEQ ID NO: 24556 - DNA, 340 bp, Glycine max
ggactaattggtatataccatgattggtgtgaatcatttggcacttatccaagaacatatgaccttttgcatgctgatcatttgttctcacggctcaaaaacaggtgcaagcagcctgtgaccattgttgtcgagatggaccgtatattacggccaggaggttggataattatacgtgacaaagttgaaattctaaatccgttggaggaaatattgaaaagtatgcagtgggagattagaatgacttgtgctcaagacaaggagggtatcttgtgtgcacggaaaactatgtggaggccttgagtctctattatatgcaattttcttcttgtataacatc

SEQ ID NO: 24557 - DNA, 336 bp, Glycine max
tgtggaagatgcaaaagaggataagaaagaagatggggtgaaagaagctaaggaggataagaaagaagtggtggaagaagtaaaagaggataataaagaagatggagtggaagaagcaaaagagaataagacggcagatggggtggaagaagtaaaagaggttaaggaagttgatggtgtgaaagaaatcaaggaggataaggaagttgatggggtgaaagaagtcaaggaggataaggaagttgatggtgtgaaagaagtagttgaagataaaaaaagtgatgagttgaaagaaatagaagaggataagaaagatgatcatatatctgagaatga

SEQ ID NO: 24558 - DNA, 403 bp, Glycine max
gatttattaaaaagacttgttttgaataacttttgcaccatacccgcaaaacttgtcttgcagctcacaacagcatttcgagagcgtggtttatgtaacaggaatgggacctttttttacaaggatcatctacacaaaagcaatacccctatcttagctattgctggagaccaggatctgatttgcccacctgaagctgtggaagaaaccgttaagctaattcctgagcacctggttacctataaagtttttggagaacctggaggctcacattatgctcattatgatttggttggaggaaggctggcggtggagcaggtgtatccatgtataattgaatttcttagctgtcacgacaagtgatgtacaccgtcaattttcatctaatacatccttcttggat

SEQ ID NO: 24559 - DNA, 235 bp, Glycine max
tcggataagatgatgctactagtccattaacaaaacctgtgccattgaagaatgagatccatacaaataacattagtgacggcaattttcagttttttcaggagaagcattctgatgataaccaaccactaggtcatacctttgaaggctatgcttcaactctgtacaacaatgcttttaatagctcaatatgacacagttggattatcatccattcagtttaaatcaagatatg

SEQ ID NO: 24560 - DNA, 358 bp, Glycine max
atttgtatgtgtggttgatgcgcaacaatagctatagcaatcgcattgtgttactgttaccctagggctaggctagtagtatgaatggattatggatggtgaagattgattgattcaagatgactgcaactggagtggccgtgtcgttggggttggggacattctctaactgttactgttacccagtgcctgtaaaggaattgcttttttctacaacgcgcattcgcaatcggagtaggaagaagcgttttggttttggtcaaaaaaggttttgcgttggagctgcaaatgcaaatcatgagtttgatccagagctgcgatctgtgcttgaacttgccaccgattctgagttgtacga

SEQ ID NO: 24561 - DNA, 391 bp, Glycine max
gtgatgtgatgttgaactcatactaaaggatggacatttccaattctgaatattgaccgcagtgtgtttcaacacaggttgacaagaggacagttgattgcaggtacgatgtaaattggacagtttcctgggatttgtcagggtcgttttgctggagaaagtttggatgttggagaaagttgtcataattctgtgtagcttgtaagttgtaacaacacatggtaggcgtacgcgacatggacagtatcagaggaaggaattagttttataatatataggttgatcagggtaacattgcacaagtgcatagattagaatatgtagatcgtgaagttgcctcatgttaattctgtagctttttatataagatattgtgtgaattgtgatcaaa

SEQ ID NO: 24562 - DNA, 355 bp, Glycine max
gaaatgtatagttttcttaaagaaatccaatccaatggtaaaattaagttgattcttaatttcttcaaataacccatgatctctgcatattgaactcatgttgggtagaggtgaggaagaactcacgagaatcccatggctgattttgactcaactaatagtcctctttctcctcttcgcactcctctttttcttcaccctcctcccttttgatcccgaccacgaccaccacaacaaccttgtcaccgccgacattccccctccgacgacgacaacctcttccactctcttctttttcgacgatattcaaattcaccagattgactcaccgcttactaatcacgattcgtcgccc

SEQ ID NO: 24563 - DNA, 578 bp, Glycine max
ctcatttctaatattgcttccaaaatctctctctctctctctctctggggggtatgtgtgttgttcagtacaactagttttggtatagctagctgctcttcatttgattttgctcgcagtcgcagctccaatccaaatatggaggcgatcactgcttccttagagaggtctcttcaaaactgttccttaaacaataccaacaacaaccatcagcagagcaggaggccggaagaagatgatgggtcagctacagatggaggcataggaatctcatcctgctcagacgatgtcccggacccggataatagtcatatctccgacaccactttagagctcaactcccacatctcactcccttatcattgggagcaatgcctagatttaaagacgggggaaatatattacattaactggaggaacgggatgaaagcaaaggaggatccaagaagcaggagggcagattatagtgtaagtagggattgtgagtccgaagaagaagaagaagaagagagctggtacgacagcgaagagtcttcatcggagtcatgcccttcttcatccaaagagcactatgatga

SEQ ID NO: 24564 - DNA, 364 bp, Glycine max
tctatcactgttttctttatgataagagatggaactaaaaatacagtgatttcttacataaaggagagaatagaaatttttaaggaggacatgatttgttttctctcctttcatgtaagaaatcactgtatttttagttctatcactgttttctttatgataagagatggaaaagagctaagtacaagataagaggattagatatcctccaaaagcctaggtaacaagataaacacttgactaattagtaagcattttgaagaatataatgtgttgcttgtgcttttgctctgaatactttctgcttacatgaaactgagtttcttgttgcagacttgctttgtgatcgaaccgaactctcagc

SEQ ID NO: 24565 - DNA, 561 bp, Glycine max
  unsure (1)..(561): unsure at all n locations
gtggtagcagagacaaacaaacaaacaaaggggtaaaaccaaatcggttcctaactcccttcctccttccctcacccctcgcatgctgcttttttctttctctctttctttgttgtattgcgctttgttgtaagagacagaaagaggataaaagctgtccccacagtttttcatggcaacaagatactcatctcctctctccctgttttccctgccaaagtaacctcgttagtgacaaacaaaaagctctctcacactgagtgaaagaaagagaacaattttgaggacaaagtgaagagagaaagaaaagaagaaagagtgagaggtggcaatgggtgcaaggttggggatgataacggcagcttgatgttgatgtgggaagatgggttttgccgaggaagagtttcagattgtttggaagagattgatggagaggatcctatcaggaaatcttttagcaaaatgtccattcagttatataattatggagaagggttgatggganaggttacatctgataagtgccacaaatgggtctttanagagcctacggaatgtgag

SEQ ID NO: 24566 - DNA, 271 bp, Glycine max
ctctccctgttttccctgccaaagtaacctcgttagtgacaaacaaaaagctctctcacactgagtgaaagaaagagaacaattttgaggacaaagtgaagagagaaagaaaagaagagtgagttgtttcagacagtagtagtagttagatagagaaggtggaagtggaaaaagggtgtttgttgtattgtgaagtgaaacaaggggtgggggtggtgtgaaacaaaaaaaggtgtatagtgagagagaaagagagagagagatggtgggc

SEQ ID NO: 24567 - DNA, 1003 bp, Glycine max
gggtccgctccctcgacaagaccggcaaacctaacaagcccgatgtgaatctctttaaccattacctacgcgccaacctcatgctcggcgcctccgccgcggagctcctcgatctcgtcgcgcagatggcggagttcgacaacgtcgcccccaacaccgcctccttcaacctcgtcctcaaggccatgtgccaggccaaggaaaccctcgccgccgataaattgctccaacggatgttgcagtcaggaaatgatgctctccctgatgacgaatcgtatgacttagtcattggaatgctctgttccatgggccagattgacactgcatttaaatatatagatttaattttgaaatctggtaatgtgttgtcaatgaaggtttttatgaactgtgtggggagttgtgtcaataagggaaggcttgatacattggtgacaataattgaaaggtgcagggcatcagatcaaaacaaagctctttgccccaactgggacttgtgcaattttattgttgaaatcgcaactcgagaggataatagcaaattaagtttttatggcctggagtttatggctaaatggattgtaaagggtgaacgtcaaagaccccctatatatctttctgtagatgaaggtttagtactgtcagctcttttgactgctggtagaacctataattctgatctgctagtggcatcatgggctgttttggaccgctcattgcgtaaaaagaaagttcctaatccagagtcctatcttggaaagatatacgcgcttgcgtcattggggaatctacaaaaggcttttggtactctgaatgaatatgaggcagcttatggggactctggtcaagaagctgaagacttgttctgcccatttacttcgttacatccattggttgtggcatgctccaagaagggttttgagactctagataatgtttattttcaactggagaatttaaaccgtgcagagcctccttataaatctgtagctgcactaaactg

SEQ ID NO: 24568 - DNA, 363 bp, Glycine max
  unsure (1)..(363): unsure at all n locations
aggggaatatggaattcggctcgatgtattttggagaggactatgggcttgatgaatagtaggggtcagaatagcgagatccactcttgtttttgtccttataatgcatgctttgcatcagccgcatgtcaaatatggagccttcagtttcatgaaaatgaagatctgagaactatggcaaatactctagttgacattgctgattgctgatcattcattattgaaggccaataggatctgtattggtgttgaggtgtttgataaaattatctagggcttgtgcttgtacactttccgtggccctttttgtgtgagtacatacacgatagactgaaatgtaaattnttgtttgtaattctgttc

SEQ ID NO: 24569 - DNA, 674 bp, Glycine max
gagaaagagccaaagcagaagtccagatcgccctgtcctcctcatggaagatctcggtcaaagtcaagatctcccatcagttaccggagaaggaggaggtctcgctcttattcacctgctcgtcattctaaggatcaccgctctaggtcaccattgaggccccatcattactcaagctatgatagggaaagacggtcctatagagatattagggaacatagtgatagatacagaagacgagattcagatagatcacttgatcatcgttcatctgcttcaagaaggaacagaagtaggagtgtaagcccttatacaaggaaatcacctgtttctccaaaacgtcatagagaaacttcacctcatagaggaaggaaacagtcacgtgttgattctggctctccaagtcatcgcagaggaagtaggccttctccaaagattgatgaaaaaaaactaagaaacagaaggcgctcaaggtcaagatcatcagatgataggcttcactctatcaaaaatgaagaaatctcgcatggaaagtctaaacacagagagagaaggcgatccaggtcattatctgtggatgagaagcctcacagaaggagccgatcatccccaagaaaagtggatgaaagtagatccaggcacaaaaaacggttgaggtcaaaatctgtggatga

SEQ ID NO: 24570 - DNA, 543 bp, Glycine max
gccagctgctgaggaagaggaataagcaagtgatgatgaggaatgggagctagattgtaggagcaacaactgagcaggggtgactgaggaggaggaataggaagaagcctcggttgaatagggcttgggcttgggcttgggcttgtggggctcagcacttgttggagggtcgtgacgaatttctctcaataatgcagcaacatctttcattgtgggtcgatcctctgcacgattacttgtgcacaagagagcaataccaagtgcttgtagcatctcttgtatttgcgtgtctggatggccttgtagcttggaatcaagaacctcgactgggtccttcttgctcttgaggtgctccctcacccactgaataacatgttgttgtccatccgggaatgatggatccactggccttttcccgttattatctccagtaggaccactccaaagctgtacacgtcgctcttctctgtgatcttaagcatgcaagcatactcgggagcaatgtagccgtaggagcctgcaaactgtgggttaacggaaaag

SEQ ID NO: 24571 - DNA, 696 bp, Glycine max
caagaagaaggaaccaaactacatgcttcttcaatagcaaaagcacatgaagactaataacaacgtttctggggagaggaaatcgcggaagagacgcaacggtggaagtgattatgtggaagacacacttgaaaagtggaaggagtacaacaggcagcaacaacttggctctagagaaaatggggtggaagtgattcacaaagctcccgcaaaagggtcgagaaaagggtgcatgagaggaaagggagggcctcagaactccgattgcaagttcagaggtgtgaggcagaggatttggggtaaatgggttgctgagattcgcgaacctatcaatggcaagcttgttggtgagaaagcaaataggctttggcttggtactttctccactgcacttgaggctgctcttgcttatgatgaagcagctaaggccatgtatggcccttgtgcccgtttgaattttcccgagccaatagactctaatggatcatcatcttctagtggaagtgataaaaaatcaccaagtggttcttcggagaatggtggtgatgttgcaatagctgaggagttggaggtgaaccatcgtcggtgtcatgaagacagaccaagattttctaaggttggtgtctttgagaaagcagaagagatgccggttctttctgtaggttgtgtggctgatgactcaatagaggagttgaa

SEQ ID NO: 24572 - DNA, 207 bp, Glycine max
cgtcactcctttggataatagcacatgaatcccaatgaccaattgtgtcatcttttgagcttcataatgtaccagttcaacattttttttagtttctgacaagtttgtggtcgcccaaaggaaaagtatggccaatgtacacttttaactgacgcataaattttatttttggctgtaatgatattcttataaaaaaaagatggattt

SEQ ID NO: 24573 - DNA, 413 bp, Glycine max
ctgtatccttggtggagaaccattctgcttgcagaacaaatagggctggtcagagagtattgccaaatggccaggtttggaaacctcatctgttacttctatcttttgcctccagaattctggctgaagcaaatgctcttctcaagttacaagatagtccacctgggaagccatatgtagctcgagcaagagcgcctccattaccttttcttttgtcaacccttctccaatcaagaccgcagttaaagttgccagaggagcagtttggtgatgaggacagtcttgatgatgaccttggtgaatcatcagagtctgatgatgataatgaacatgacgacttgccgccatttaaacctttaactaaggcccaggtggaaaagctgtctaaagctcataagaaagcatattttgat

SEQ ID NO: 24574 - DNA, 455 bp, Glycine max
ggatgttaagtcagaaactggaagtacatctctaaaggttttgccaccatggatgattaaatcagggatggttcttacaaaggaacaacgtggagaggtgaaggaggaaatgaagatggatgggacttcaatttccacatcagcacagtacttggacgacaagaaatcaacagttgaccatgatgataagagaaatatacaggatgagtatattaaggcttattatgctgctttgcttaaacaacaacatgaattggaagctgctagtaaacaagaattgccaaatacactcactgcaaatgatccttctagcagtgcttctaatcgtcaagttggcatgaaaccaaaacttgaggaagatgatgatggctctgaatgggaggaggctccagctgcaggcactggaacatgaaaattacaaggctcgatttgaatgttgaagctgacgatactcc

SEQ ID NO: 24575 - DNA, 483 bp, Glycine max
ctttcctagttagtaagtgacaactgcttgcatataaaacaacaaccaacacacaaaagcacactaacctcccagatgggtatactaaaagtaaaacaccacattcccacgctcctctttctcagtatttcatttcctctgtttctcttacacctacctcctcagacaacacaaacttgatctacaaaggttgcgccgaccagaaactccaagcccaatactcccagaacctcaaaccgctgttggactccctagtctcggcgtcggcacagaagggtttcgccgcgactacccaaaacgcgctcaccggcgcgtaccaatgcaggggagacctctccaactccgactgctacacctgcgtgagcaagattccggggatggtgaagcgcctctgcggcggagatgacgtggcggcggcgcgggtccagctgagcgggtgctacctgcggtacgaggtggtcgggttcaaggtggtctccgcga

SEQ ID NO: 24576 - DNA, 767 bp, Glycine max
gttggaattgccagaggactttgcttccttcaccatgaatgttacccagctatacctcatggtgacttgaaacccagcaacattgtatttgatgaaaatatggaaccccatttggcagaatttgggttcaagcaagtattgaggtggagcaaaggctcatcaccaaccagaaataagtgggaaacagtcacaaaagaggaactgtgtatggatatctacaagtttggggagatgattctggaaattgtgactggcggaaggttgacaaatgcaggagccagcatacacagcaaaccatgggaggttcttttgagagaaatttataatgagaatgaagggacttctgcaagttcattgcatgagattaaactggttcttgaggttgcgatgctttgcacccaaagcaggtcatccgatcggccatcaatggaggatgttcttaagcttctgtcagggctaaagcatctagaagatggcagaacttcaaaagaagggcaataaaatgttcatttgcatcactgcgttgaaaaccattagaaacatatagtaattgcttagataacaagtttgcacgtatgtaattaaaggagtttgcagcttgtataatagatatttccattgtttcagtgtgccaaacaattctgtcccagctcagtcagtctacttcataatatattttcttatttgaagtggcattcatttgaattcacggtagatttggtgccacaataaacttgctctatggggaacaaacttgtggccaggga

SEQ ID NO: 24577 - DNA, 695 bp, Glycine max
aaataacactaacagtcaaagtgaagaacatgcaaatgaagaagacattgtaaatgaaaaacataagagacgtgaaaagaagaaagcaaaggaggagagggagaagcaaataagggctgctgaggaaagattactggaggatgatgtccctagaactgctgatgagtttgaaaagctgattagaagctctcctaatagcagtttcacctggataaaatatatggatttcatggtttctatggttgatgttgagaaagcccgctcaattgccgaaagggctttgaggacaataaatatccgagaagagaatgagaagcttaacatctggaaggcctactttaatttggagaataagtatggaaaccctagagaggaggctgttatgaaagtattccaaagagctctacagtacaatgatccccaaaaggtctacctagcactcttgggaatgtatgagaggactgaacagcataatttagccgatgaacttctcaataaaatgacaaagaagttcaagcattcatgcaaagtttggttgaggcgtatacaaagtcttttgaagcaaaacaaggatggaatccaaccggtcattgatcgagcttcattaagccttcctaaacacaagcatattaaatttttctctcagacagcgattcttgaattcaaggttgggtttccagatcgagggcgatcca

SEQ ID NO: 24578 - DNA, 425 bp, Glycine max
cagagatatacctcagttatttgaacttggaggatgatggtgcagaagcccttgctaatgccctcaaggaatctgcaccatcactggaaattttggatttggctgggaatgacattactgcaaaagctgctgcttctgtggctgcctgtatatcatcaaaacaattcctcaccaagttaaatttatctgagaatgaactgaaggatgaaggtgttgttttgatcagcaaggcactggaaggaggtcatggccaattaattgaagttgatttgagcactaactcgatcacatggtcaggagctaagctggtggctgaagctgttgtgggaaaaccaggttttaagttgcttaacattaatgctaacttcatttctgatgaagggattgatgagttgaaaaatatattccaaaactcacctgatatg

SEQ ID NO: 24579 - DNA, 445 bp, Glycine max
gaaaagacaataaagaagcctttgagaggccttataaagttgctagggtttcttcaggagcaactgttgctgctgctattgttgaagctgagaataatcttgaaatagatgctcaagataataaagatgaattgaaaacaaaattaaaggagatacttcgtgagaaatctgatgtattcaactcaaagaatgctgaagaggataagattaaattgggagaacctggctggaaagagaggtattatgatgaaaaattttctgccaaaactcctgaggaacttgaagcgatacgtaaagatgttgtcttgaaatacactgaagggctatgttgggtgatgcactattattatgaaggtgtttgttcttggaattggttttatccttatcactatgctccctttgcgtctgatctcaagggccttggtgaacttgatattagctttaa

SEQ ID NO: 24580 - DNA, 1194 bp, Glycine max
aaaacttccccacagcactacttatcttcttcattgggtttgtttcctcaagtctgtttcaagtttcagttgcatatattgtttcaacaggagatttcaataaggacttctttgtgatatggtctcctacccatgtgaacacgtctgctgatggacatgcaagaagcttgaaactggaccaagaatctggatctggttttgcgtcaaaccagatgtttttatttgggcaaattgacatgcaaatcaaactagtgccaggtgattctgcaggcactgtcctggcctattatcttacctctgatcaacctaatcgagatgagatagactttgagtttcttggcaatgtctctgggcagccatatattctacaaacaaatattttcgcagatggaactgacaatcgagaggagaggatttatctgtggtttgatccaacaaaggacttccatacttattcggtgttgtggaatatgcaccagattgtgttaatggtggatatgattcctataagagtttatagaaaccatgcggacaagggtgtggcatttcctagatggcagccaatgagtctgaaagcaaccttgtggaatggtgatagctgggcaacacgaggtggccaagataagattgattggacaaagggtcccttcatagcttcattcagaaattacaagattgatgcttgtgtgtggaaagggaacccaaggttttgcagagcagctagccctaccaattggtggaaccaatacagctctagcacacttacgtgcacacaaagaaggtggttcaaatgggtcaggaaataccacatgatttatgattactgccaagacaatgagaggttccaaaacaatcttccaagggaatgctctcttctcaagtattgatcagaaatgaggatgattgcttcggtttatattttttttttctcctctcggttttagtttcagatgtgttgttacaattgtcttatgtttgatgccacaaagttaaaagctagctttcatttgctgagtataatcatttgttagccttcgaagtaaagggttcaatcataaagctgaaatgtcttgggtgtgttaggaaaggtttttactttttaggccttatgtagttagttgtcaagaaaatttaattcacagatgtgagttattattaattatccgaatatataaaataaactttacgtctcct

SEQ ID NO: 24581 - DNA, 497 bp, Glycine max
ggtgcctcatgtaatcttcggtgtcatccaaaagctaccaaccaacattccttctttctcacgcacgcacaggctcgctcgcacgtgttgtcctctgatctccctgaaaaaccgcaacactaactcaaactattgatctccgtttaattccttttgaatctgaaagaagaaacagacggtggcttacggtcatcaattgcagagatctattaagattctggaatggcagcaatttacagtctttacatcatcaataaatctggtggattaatctattataaggattatgggtcagctggacgaatggataccaatgacagcttgcgggtggcgagtttatggcactcaatgcacgctatctctcagcagttatcacctgtttcaggttgtttaggaattgaacttctccaagcagatacatttgatcttcattgctttcaatcactgacagggacaaaattttttgtggtctctgagcctggagcacaacacatgga

SEQ ID NO: 24582 - DNA, 260 bp, Glycine max
ttaccctgcttcgattggcctctgcctcttcctttgtttgaatggttttcgttgcaaattctggataagtttttggaatggcagcaatttgcagtctttacatcatcaataagtctggtggattgatatcctataaggattatgggtctgctggacgaatggataccaatgacagcttgcgggtggcaagtttatggcactcaatgcatgctatctctcagcagttatcacctgtcctaggtcgtttaggagattgaact

SEQ ID NO: 24583 - DNA, 1164 bp, Glycine max
gtccgtcacattcattattcctggttccgtttcttcccaccaaacgaacaacgatgacgacggcgtttgagcgtcacgcgcttcctctgtttctgtttctgtttctgactccgattatcaatgcctccattcacgactactccaacgaacccttcactcatcgctccgacgccttcttcttccacggcggcagcgaggccctcttcgccaaatccttcatcaggttcgaaacggtgacgtttgcgcgtcctcgcgagtccgcgagcgtgcatggtaggatgcagtcgaacacgggtttggtggaggcgataatccttgaggttcgggatcggaaccggatcggaggctcgtacctgaaatccgatctgatttgctgcgatccgaagctggccaaagaccgcaactgcaacctcggcgaggtcatcatccagaagaaccccgacaaccatgaactccccaaacgcatcaaaaccttcttccaaggtaccgatgagcaggtccagatggacgctgtaaccctcgagatcaacgccaccggcatgtactacctctacttcatgttctgcgacccttcccttaagggcaccaccattcagggaaggaccgtgtggcgaaaccctaatggctacttacctggcaaaatggcccctcttatgaccctctatgggttcatgtcactggcttatctgttgcttggtcttgcttggtttctgaggtttgttcagttttggaaggatattatacagctgcattatcatatcactgctgttattgctcttggaatgtgtgagatggctgtgtggtactttgagtatgccaattttaactccaccgggactaggcccatggggattacactctgggccgttacttttacctctgtgaagaagacgctgtcgcggcttctactgttggttgtctctatgggttatggggttgtccgccccacgctaggcgggaacgtgattgcctacagagtgctgcttcttgggctgctgtatttcagcgcctccgagcgcttgatctcgtcgagcatttggggaacatcaatgacttctccgggaagactaagctgcttttggtgctccctgtggtttgcctcgactcgtgcttcattctttggatgttctcgtccttgtccaagaccttggagaaactgcagac

SEQ ID NO: 24584 - DNA, 406 bp, Glycine max
gtccaatggagacccatcattaccaccaccactttcagtgctgccacggttccaaatttctcagccaccctcttcctcttccaccttcttcatggcgaccccttcttctagccagacccttttccccttctctcgtctcttgctcctccaacaagcgttgggactccaacgccgaaacctttcgcccccgaaatttcacccccaacgatgtcagaaagggacaagaacaagaacaagaactaaaagaagggttcgggaagaagagaaggtggtggtctgatgaagatagagaatttgatggataaagaagaagaagtagtagaagaaacttctagtgggattttggaagatgccattgacagtgtctggtttctccagattttcaaatcctatggggggacgctgc

SEQ ID NO: 24585 - DNA, 586 bp, Glycine max
acctgacacgtcatttcgttgtccgataatcccttcgcgtcacgcacttcaattcaacactccatcctcagaaaacgacgcctcctccgtctcttcttaagcccatttcttgctaatcaatccaatgcttatctctcgaagcgtgcaagatcgattcgggtcgaacatggatgggaaatcgccggagaaactaatactggtgaaccgcgagccaaacggcgtcgcactggtgacgattaaccgtcccggttcccttaactcgctgacccggcccatgatggtggacctggcccaggctttcaagaggctcgaccgggacgagttggtgcgggtcattatattaaccgggtcgggccggtcattctgttcgggcgtggatctcacggccgctgaggacgtgttcaagggcgatgtgaaggacccggagagcgatccggtggtgcaaatggagctctgccgcaagccaattatcggagccatcagaggattcgccgtcactgctggcttcgaaattgccctcgcctgtgacatcttggttgctgccaagggatctaagttcatggatactcatgctaggtttgggata

SEQ ID NO: 24586 - DNA, 402 bp, Glycine max
aatgatgaagaagtctttgaatagagtcagcgacttgcacggcttcgaaaacgctaggttttaattttattattaataaatgtagaggcatatttagagagaagagatcaaaagaggatggggcatgatagtctaagggaatggggacaagctggtagcagacggcgcggccccttctgcattggaagaaagggtatgccccactctaaaatgggagagattcattgcttggttcctcgatcatgtctttttgtcttgcattgtgccttttatgtacacccttcttttccatttttaatcatttgcttttcaagatcacagccagaaactgctccagtcaatgctcccatgttgggatcgctagtttatcataactatcaagggtagaaactagaagaaaag

SEQ ID NO: 24587 - DNA, 333 bp, Glycine max
gaaaatgaaacctatggaggaggaggagttgaagaggtatctgttggtgttgaagatagaacatcagcggctgaagatcaacactggtctggtctggagggtgtcacgcgagtaaactcactggttcaacttcctagattttctgaggaaaggccaaactcttgagttttgttggttcagtgggattgtaatacctgttgctacacagtcaattcaacaaagaaaatcttcctatggtttacgtgtgtagtatattatgcttaattaaggtcaccaaaaaaatggattctgcgtccagtgtcgctaaatatcagacatgaataccacaaccca

SEQ ID NO: 24588 - DNA, 431 bp, Glycine max
catagctgagctggaaaggaatgtacaagttttacaggcagaagggtctgaagtctcggccgagctcgagtttcttaaccagcagaatcttatcctgagtatggagaataaagcactcaagcaacgtctagaaaatatagcacaagagcagcttatcaaatatctggagcaggaagtactggaaagagagattggaagattacgtgcatggtatcagcagcagctacaaccaccacagacacagccacaacagcaaccatctggtatcacagacgctcgaacagtagagaactcgaatctcagtttgcaaacctgtctctaaaacacaaggacaccaattcagggcaagaccctgctctcagaatctagatttgcagtagctgtagccttgttcggcctctacattcaaccggtgttgccacaggcgcgat

SEQ ID NO: 24589 - DNA, 528 bp, Glycine max
catgtccaaatatacacgatactttatgtcttctttttcttccgcttcacttccccagtatcagacctttcttctaagcgtttggattgccgagcacgtatctctagcagttttgatcttgcatcatgaaaaagagcatctgatcttgaagccatcatttgctgaatatgatccatggcggcaaggttaaaaccaaagatgtctttccatcccttgaccctttcataaaaaatgtcactgaaaactgtcaagataggtcgggcagctggcgtggcaagaagctggttgtaatgtgtctgcaacagcagcgtgcctattctgcaaacaagctcaaccttatcagagtatgaagtccagtctttcaagtacgacagaagcttcaaagcatctgaaaatggtaaagccaataatgtttgctccaaatcattggagtgaacatctgaaaatgcacttagaacatagtcagaaggtgaaagcccattcataagcggatttgcttggaaaacagcaacatttctgctatttttc

SEQ ID NO: 24590 - DNA, 133 bp, Glycine max
agtgatacattatccccacacgatggtgggaaaagccatgtatttaagaagtatcttgaattttatccattccttgtttatatggatgaatcaatattagtccctgagaggactacaaataggcaacaagaac

SEQ ID NO: 24591 - DNA, 385 bp, Glycine max
ctcaagcccctccaaaccggcttcccctccgacacttcgactcccacttcatcttcaacaagctctgccaactctccctcatccgcaatccccacattccactctccgcctaccaccacatcatcaacgtgtccctattgtgatggcatcaaatctgttggccgacgaggaaggagttgggccccccttggagctgctttgtaagacattgtatgcgtgggaggaggccgtgtccccactcttggccacagagagggagggtttggtcccgaagaactcgacggtgctggatactcttggtgaatgtctcaacgatgtggcggaatggggggccagtaaggagagactgttggtgaagttgccatgccaggaccttctggctcgc

SEQ ID NO: 24592 - DNA, 343 bp, Glycine max
accaggttagaatcgaaactccacagtccagtgagaggaagagaaagcatgaagttcacagactcgccggtgatcgagcttgcggtgaacgacgccgttctgtcgcttcagcaagacaacgggtccatgcacgtgggaaccaccgtgtggccatgctccctcgtcctcgtcaaattcgcggagcgctggggcccaccctctgacaacaacccctacgctcgcgtgctcgacttccaaggcaagcgggccgtggagctcggcacgggctgcggcgtggcgggaatgggcctctaactgttgggcctgacggacctgatactcaccgacatcacacccgtcatgc

SEQ ID NO: 24593 - DNA, 359 bp, Glycine max
tctatcgaattatagcagctgactcagctgagcattgatcaactataagggtccatcacagagaaagtgactatgtatgtcttgtcatccttcagccagcttcagtcacagatgcaatctcagggacttgtagtgcctcctgagcctctggttggtcctggtccctccggtcctcgggtgagcacaaatgggagttgtgttgatccctcaggaagcgatcctaagacgggtgactctgacaggtgcggcttgtacatagaagtagatcctgcccgcctggttgccgtggggagagtttatgagggatccactcttgttcataacactcatttgttcctggccaagtacaggtgagtgtg

SEQ ID NO: 24594 - DNA, 335 bp, Glycine max
ctttctcttctttgaactccatggaaccccctctactctgccgccgtcggggttggttctggccatcataggccttgtttacacaatttaaacctatgaaatctctcatcccgtcaaccgctaacaaagccccaagataatttctccaatcaaagcttttccggagccctacctgcgcccttgggactaaagcttgttgcgtgtcaatcgcaacaaaacctcactaggtactttactggtgccatctatgttctgaatctcgtcaagtgcagagcaagggcggtgatgttgcattatttgttcatcgtggaacgaagcttttgggtggtgatgag

SEQ ID NO: 24595 - DNA, 515 bp, Glycine max
ggcgtgttgctgcttacatttataagaaagctggaagatggaagcagtccattgctttgtcaaaaaaagacaatctttacaaggactgtatggaaacttgctctcaatctggtgaccgtgaactctcggaggatttgcttgtttactttattgagcaggagaagtcagaatgttttgcatcttgcctctttgtctgttatgatataatacggccagatgttgctcttgagctagcttggatgaacaatatgattgattttgctttcccatacctcttacagtttattcgagagtatactggtaaagttgatgagcttatcaaggacaaaattgaagcacagaaagaggagaaagctaaagagaaggaagagaaggatgttattgctcagcagaatatgtatgcccagttactaccacttgctttgcctgcaccaccaatgccaggtatgggtggaggaggctatgctccactgacaacaccccctatgggtggtatggggatgcctccgatgcca

SEQ ID NO: 24596 - DNA, 234 bp, Glycine max
agacgtaatatgctagaaaagaagttggctgatgctgaagtctctgaggaagaacaacacaacttgcttcagcatttggagaaaaaggagagggaaatcatgcgccttcagagacataagatgggggctgatgactttgagcccctgactatgattgggaagggtgcatttggagaggttagaatctccgggacaaggccactggccatgtttatgatatgaagaagcttaaga

SEQ ID NO: 24597 - DNA, 587 bp, Glycine max
ctcagaatttcatgctgtgaaataaggatctggagcagaagttgtagatcctgaaattttcactgtgtagagtttggaccaaagttagagtttttgagagaaagctttgagaatgagatacgtggaggacaaagggtgctacaacaacaatggaccaacacaagagactccaaatagcagtgccatgtactcagagtttcacaaaggaaaagatgctactcgtgtctccaaccaccatcatcgagcaaccatgggaaaaccaaccccttccaagtgggatgatgcacaaaaatggctcgtggggttgtcaaaaggtggagagaaaagccactccaaaagcaagccaagaaactcaaacgcagatgatttgagactcatagctcctgtgccacagaaggagcatgattactcaagtagctgagaaggaagaggaggaaaatgatgcttgccatgatttcatgactaatattattagtgctaatgctattgctgctcaatatgaagctgaagccaaaagggtagaatgtgatgagtcaaattggggaagcaataataataataatgacaacaggttttcaggaaacacg

SEQ ID NO: 24598 - DNA, 628 bp, Glycine max
ttttcgcgtgggcggacgcgtgggcggacgcgtgggtttgccgtgaaacaatttttgaagccctccagtggtggaatggaaggtctccttcagatggtttacttttgggcttctgcatactgttgactggattggcttgtgttccaattgttgctattcatttctctcatgttttgtctgccaaaagatgtctagtgctggtagtggcaactggtctactttttattttaatgcagccacctcttcctgtgtcattgacttaccaatcaaacctaatcaagactgctcgtcactctactgatgatatctcaatttatggctatatagctggcaagcctacctggccttcttggcttcttattattgcaattttgctgactctagcttccattacatctattatacccattaaatacattgttgaattacggacattttactccattgctatgggggttgcccttggtatctacattgctgctgaatactttctctgggctggcattctgcatgttctcattgttgtcactatggtttgtgcctctgtttttgatgtcttcactcatctaccctctgctacaagcacaaagcttctgccactgggtatttgctctacttgtggctctct

SEQ ID NO: 24599 - DNA, 550 bp, Glycine max
aactgtgctcttatcttaggttgaaaacccacttcgaaactaatccaaaagacctagatctactgaagcatgacaacattttgagcaagaatgccccacctcctcacctacgggatgtgcctgagtacctattagacaaaccaacgaaagaggcaagggaaatggtcaagcttgcaagggatgcaatgggaaataataatcgccgcaagggatccaagagatcattaagataagaaggagaccctctgaaggctatctatgctacggcgtcatcagaaagaccgcacaaagctaggaagactggtggaagcgatagcctaaatagcagtgataggcataaacacaaaaagaataagggtatttgattgatttgcccgtttcctacaaagccttataacaggctcaattttgttgtaatttaggtccaaatatcgtaaaacgaaaaacagtacagtattggaattgttgtttcctttataccgcgtagggcctgaagttattgctcattactaagttaaattatgctaattgaaactagaatttagctttc

SEQ ID NO: 24600 - DNA, 499 bp, Glycine max
gaaagatggtagcaggaagatttgtaaatgcttattcaagaaatgactggatgcttggagttgcttgctttccgtgccagtctactttctcaaggattagctggaatccaacccgtcgatgtttctgggatccaaaatgttgacgtgacagatcacatagagggccattcttcatatttgtgggctacacaacaggtcctagatgaacttgaattagatacctattatcccgtttataacaatttcccttccagacagtcattcttcctaattctcctatgtttgagtatatgaataagttcctagtgtcactgtcaagtggatcgggttctcccacaatttttcccaaagaaacatacagtgatcagtatctttcactaaaatgcttgtgttgaattaatgccttgtattgtatatggattactgtatagcctgctaagatcgtttattatagctatacaatatctattattcaagttataaaaaattgtaagctgac

SEQ ID NO: 24601 - DNA, 533 bp, Glycine max
tttttacgcgtccgcgggaagactgagtagaaaccctagagtgagaaagaaagagagagagagagagcgatgaggagaactctggtgagaaatggcagtctctacactcgcaaccttcttcatcactccgccctcgcacttgccgcttcatctcgtcctcaattcagactcttttcctccaatgaaaaccccccaccggttccccaaatcgacgacgtgaacaacaaagagctgaaagcgcagatcgagacctacttcaagggcgacgagaaggtgctcccgtcgatcatggaggcgattctgaagcggaagctgtcggggaatcacgaggacaccgacgacgagctcatggaggagctccgcatgcgtccccctcgacgacgtcgacgaccgggacttcgagtctgacttcgagaacattcacgataccgacgaggagatcgacgatttgtacaacgccagggacgtggtgatgaagaggatggtgaaggacgagtacttcaacatggatgataaaaagtgggatgacattg

SEQ ID NO: 24602 - DNA, 1016 bp, Glycine max
tgctcaagtagctgaaaagcatcatattccaaggatttcgtttcacggtttttcttgcttctgcctccattgtctgctcatggtacacacttcaaatatttgtgaaagcatcacttcagaatccgagtacttcactatccccggcatacctggtcaaattcaagctaccaaagagcagatacctatgatgatctcaaattcagatgaagaaatgaagcacttcggggaccagatgcgtgatgctgaaatgaagtcatacgggctaatcataaacacttttgaagagttggagaaggcatacgtgacggattacaagaaggtgagaaatgataaggtgtggtgcattggtcctgtttcattctgtaacaaagatggcttggataaggctcaaagaggcaaccgggcctcaattaatgagcatcattgcttgaagtggctagatttgcagcaacccaagtctgtggtttatgtttgttttggaagcttgtgcaatttgattccttcacaacttgtggagctggccttggccttggaagatactaaaaaaccatttgtatgggtcattagggagggaagtaagtaccaagagttggaaaaatggatcagtgaagaagggtttgaggaaaggaccaaagggagaggccttataattcgaggttgggctccacaggtactaatattatcgcaccctgccattggaggattcttaacacattgtggttggaattcaacacttgaagggataagtgctggagtgccaatggttacctggcctctatttgctgatcaatttttgaatgagaagctcgttactcaagtgttgaagattggtgtgagtgttggggtagaggttcccatgaagtttggagaggaagagaaaacaggggtgttggtgaagaaggaagatcattgagagggcaatatgcatggtgatggacaatgatgaagaagaaagcaaagagagaagagaaagggcaaccaaactctgtgagatggcaaagaaagcggttgaaaaa

SEQ ID NO: 24603 - DNA, 510 bp, Glycine max
  unsure (1)..(510): unsure at all n locations
canaagtttaatatcttctgttggtggatcagaaaattctatgcagattgtttcccacttattgtaaacaaggaggttgtagggtatcaaccanacaactatctcgagtacccggacaattggactgaagctgaatattatggggacatgaatgaatctgaaagcatctctccatcagattttgtttctatagtagatattaggttcaaggggaaaccaatctgttcccaagttctgtggggaattccaaatgcaaatggctatgatggttggttctataactgccctttccggattgatattctcacttatgcagatagagatgataacaatgatggagcggttcacctttctgtatctgatggtctgccaccaattacatccttggagagggaaaggaaagatgggaagctgtggcgggaactccgtgaagggctccagcttagttggattatagtgaacaggaaaataaagcaagctgcaaatcttgcttagctgagccctcttggt

SEQ ID NO: 24604 - DNA, 542 bp, Glycine max
attgcataaaggcaacgaacacattgaacggcggcgcagccatcgattcggagttccccaacaaagcgttaacgagcacgcgtttttccgacctgaatccaccactctctgaaccggttctccaagccctatcacactctggcttcgagttctgcacccctgtccaagctgccactattcctctgctctgcagcttcaaggacgtcgccgtcgacgccgccaccggttccggcaaaactctagcttttgtcgttcctctcgtcgagattctacgccgctcctcttctcatcccaagcctcaccaggtgctaggaataattatatcccctacaagggagctatcaactcaaatatatcatgttgcacaacctttcatttcaacattggctaatgttaagtccatgctccttgttggtggagcagaagtaaaagcagacctaaagaaaatagaggaggaaggagcaaacatattgattggcacgcctgggcggctatatgacataatgaatcggatggatgtctcggattataaaaaccttgag

SEQ ID NO: 24605 - DNA, 361 bp, Glycine max
cccggcggacaagtgccatcatgggatccatccctgcaggcagttagaccgagttatgcatcggcacctggtacttttcctgttcaaactggtgcagctcctccaatgccgtcctatgcgccagcatgcgctatgcctgttgcttcctcacctcatgcacaaagcagccccatggctcataatgcaaatccaatgggaattgctcagctcggggttccacccaatgtaaatttacagtccagtggtgcttcacgttcagcgcctggttcctcacctctcatgcaaaccagtcaggctgctcaaggattgcttcagccaaatgcaagacctggtggtgcttcaccttcaggtcaacattatt

SEQ ID NO: 24606 - DNA, 370 bp, Glycine max
  unsure (1)..(370): unsure at all n locations
gcaaaattattttcaagactctttctttttgtcccattgtgagcattttactcctggtcttttcagtgagatatccaggaatgattattccccaattgcttctttacaggccagactgtgcatagcttccgtgtgtctttggggctgtagctaagtagtaatttactttcatgggtgaatttcttgtggatgcaacagtgtttgaagataagaagatgggagagggtgctgctgcttccaatcctgctttgcaagtgtctgtttcgtttggtagatttgagaacgattccttgtcttgggagagatggtcctctttctctccaaacaagtactntggaagaggtgagcagtgtgccacacctggatcagt

SEQ ID NO: 24607 - DNA, 238 bp, Glycine max
gtgctttgaaacaaaactaaagaagaaatgctgagacaagtgttgcgacaatgttactcacttcatcgtcccgcagtgaatgtgtacgcagtgccgcggtcttatcggagacggctttgttcttcttcttcgtcgtcagaagtccacgtgccgctacatcctccatcgaccgttcttccctttacaatccacctgagcattctcaccaccccacttctgattccgaactcgtcaaaca

SEQ ID NO: 24608 - DNA, 545 bp, Glycine max
cgcagaagttcttggtatcggaaccggaataattccttgtcattgggatttcagtctcatgtgtggtctgatggcaaggttgattctctttgcaatgatttgagcaatggacctaaaaaaccacgtacacaagtatcatactcagtgccctctgctgggtatgaattcagttcaaggcagagaaaccatcatcagaaagggctttctcataaacgagttagaaaggccaaggagaagaagtcatcagatgttgatagggtccctgaaaagaatatcaaatgcttatcttgtggtgcaaatgtcttgattactcttggtgataagggttggagagaatccggggcccatgttgtactagagctgtttgaccacaatgagtggagactttctgtgaaacttctaggaattactaggtattcatacaaagcacatcagtttctgcagcttggatcaacaaatcggtacacacatgcaatgatgtggaaaggagggaaggattggatcttggaatttcctgataggagtcagtgggctcttttcaagga

SEQ ID NO: 24609 - DNA, 419 bp, Glycine max
gcaatgttttcacttcatgctaccacaggctacgatttcttgaggaaaaattccgccttcatctgttactaaatgcagatagggagtttctggctcagaagggtgcaccccaccgagatttttacaatatcagaaaagttgatactcatattcatcattccgcttgcatgaatcagaagcatcttgtgcgcttcatcaagtccaaattaagaaaagaatctgatgaggttgttatctttagagatggaaaatatatgacccttaaggaggtttttgagagtttggatttgactggatatgatctgaatgttgatttgttggacgtccatgcagataagagcacattccatagatttgacaaattcaaccttaagtataatccttgcggacagagcagactaagagaaatatttttaaag

SEQ ID NO: 24610 - DNA, 248 bp, Glycine max
atcctacttcgcttttgctttaagccaccaaacgagtgtcctcttcccttcttaataacacagaaacacaacaagggtttacacctacttcttctttctcagacaaaaaagaaagaaaaacacacaaaatatgtgcaactcagatggtgattgcagacccttgggctttctcttgggtctccccttcgcttttctcgccctcctcgtctcggtcgttggcctcgtcgtgtggatcgttgggttgttgt

SEQ ID NO: 24611 - DNA, 563 bp, Glycine max
cactcgtaagagaaacattctaacgattcactttttttcacgtttttttggcaatgaaagcgaaaacgagaagcacgcgttctcataaacctcgctctgaattattattgcggtttctgttattcagcgactcgctgaagcggtgaattgagcaaaccaaagcgtgaagagaaggttctggaagaagcggatgggaaaatcgacgaataataacagagactggacgcagatgtacgcgatctatggaatggagcaatggcagaccctaattttcctcttgtgtcaggcgatgctgtttcctgtgctgtctgttttgtatcttctgtacttcgatcttgtgcgtagctttttcgagaggatcttttccggcgctggcggaggcacggcgagattcgcggccggaatcaccggctcggtgacggcgctctccgcgctgtgcctcttcttcgcggcggcgaacttcttctactcgtcggtgccgctgcacttcgacatggcgcagcgcatcgtctccgccgtgcacgactggtcgtcggtgaagctggcgctggacctcggctgct

SEQ ID NO: 24612 - DNA, 297 bp, Glycine max
ttcacattttccactccctctttcgccactcagagacaaagatgaaagagagaagaaagtgaaacgcagtatagccttgccgtttttgaaaagaacgctaaacgacgaagcaaaacgcgttcgtaacagaagaaaagaaaagaaaagagtaactgacaactgtaccagtagaaaaatcatcgacgtttctgttattcagcgactcgctgaagcggtgaattgagcaaaccaaagcgtgaagagaaggttctggaagaagcggatgggaaaatcgacgaataataacagagactggac

SEQ ID NO: 24613 - DNA, 599 bp, Glycine max
ccaaatcctcagcctccctctctgatctctgaattccaatagttgttgtgttctgaagagagaacatgtcaagcaattcagatgcagcagcagcgacggtgcatgctcgtggccgtttggccatgctcgctgctcacctcctcccctttgaactcactgatcacgacgccctccgccctatccctctctccgctcagttgccgccgacgaacctcgccggaagtttgaccgtcgtcgacgacagaaccggcaagaagtaccagcttcaggtctccaaagaaggcactgtcaaagcttctgacctcaagaagatatcgactgggaagaatgacaagggactcaagctttatgatcctggctatttgaacacggctcctgttcgatcagcaattagttatattgatggtgatgaggggattcttagatatagaggctaccctattgaggagttggcagagaaaagcactttcacggaagtgtcctatctcataatgatggaagtttgccttctgaaagtcagttagcagaatgggagtatagaatatctcagcattcggctgttccacaaggaattttggatatcatacagtctatgcccc

SEQ ID NO: 24614 - DNA, 628 bp, Glycine max
gatgaatttgttattagggaagctatatcgaatttctagacatagccgagctgctgttgctatttacaaagaatgtctaagacattgtccttttgtacttgaggctatcacagctttagcagaacttgggtctactgcaaaggacatcatttcattgattcctcagactctgaatagaagtggtagagctccatttgatcacactgactcaagtcgttggcttcaacgctatgttgaagctcaatgttgcatggcttcaaatgattataaaggtggattggaactctttgcagatcttttacagcgcttccctaataatatacacataatacttgagatggcaaaggttgaagctattattggaaagaatgaagaggccattatgaattttgaaaaggcccgatcaattgatccatacatcgtaacatatatggatgagtatgcaatgcttctaaagctaaaatctgattatccaaagctgaataagttagtgcatgatttattgaatattgatcctgcaagaccagaggtttttgtagctttgtctgttttatgggaaaggaaagatgagaaaaaagcattacaatatgctgagcagagtgttcggatcgatgagaggcacatacca

SEQ ID NO: 24615 - DNA, 751 bp, Glycine max
tcactgcgtgtctatcctctctcactcactcactcactcattcactgagtcaaattcaaacgaaaacgaaactcgctcgcactcatagttagttacgcatcgcaagcacactgccaaaaatggcggggcgcaagcacgcgccctcctccttcacgcgcctcgacgacgcgcgtcttgcgcattcctcctcctcctccgtcgccgtggtccgcgccctcgaggagcgcgtcgaggcgcgccaccgcgagatccaggccctgctcagcgacaaccagcgcctcgccggcatccacgtggcgctcaagcaggacctcgccgccactcaggaggagctccgccgcctctccgccactgccgccgaggtcaaggccgagcgcgacgccgaggtgcgcgagatctacgagaagtcactcaaggtcgacgccgaggtccgcgccgtcgccgccatgagctccgagctggatcgcgtgcgggcggacgtgcaggagctcgtggcggagcggaaggagctcgcggcgcaactgcatgccgtggagagcgagcttgcaaaggcgcgtgcggaggcgcagtttgtgccggcgattaaggccgatatagaggccatgcgccatgagattcaacgaggaaggaatgctattgaatttgagaagaagacacacgctagaaaccttgagcacagacgggctatggacaacaatatgattattatggaccgcaaggttgaatagttacgtgctggcttggctaatgc

SEQ ID NO: 24616 - DNA, 799 bp, Glycine max
ctgatagccacagtcttgcagaaagagctagacgcgaaaagatcagtgagaggatgaaaattcttcaggatatagtcccgggttgtaataaggttattgggaaagcattggtccttgatgagataattaattatatccaatcgcttcagcggcaagtagagtttttgtcaatgaagcttgaagcagtaaattcaagactggcccccagaattgaagtgtttcctcctaaagattttgatcagcaaacatttgatacaactggcatgccgtttgcttcccaagctacaagagagtatagccgaggttcatcgccagaatggttacatatgcaggttggaggtggttatgaaagagcaacgtagtctttgaaatcccatcacctgataataaatgcatataggatcattaatctctccatcagagctcccataaatcatatactcaaggtgttgttgctaagtcctatagacacctcattcctgttttctacaagagaggcatggagctgttatttgtttccacaggatcacttcagttagtactcaagcaactccatttgttagtgtgttggaaaatgaattcatttacccaatatgtagtttagtatgctgatactcttcattcataacctttaaaatgatagttattattcttgtaaaagaatgctgcttgtcctgaatacataaaggcttacatattgtgtaatagtatcaacattgttgtttgtctgtgaagctgtgttgaataaattaagcccaaatgattttgttaaaaaaaaaaaaaaaagggcggccgccga

SEQ ID NO: 24617 - DNA, 344 bp, Glycine max
actagatgtggaaattggaatagccatagccataaggcagcacccaccgttgcactgttgactatgctgctagctcaacccattttcctctctcgcaactttcccactctcaacaacaaccaccgaaattcgagaacttcacttcaacttcacaaccctcctgaagtaagactttcaccgcaaagaacgccaacaatagcctcttctggttgttctggttgcttcgtgaaaccgcttgatgtcagaaccacaaaagccacgttgggtgcgtttcttaagacaaaaaaaggtggtgtccatatttgccatagtttgaaggaagagagtgaggttggtgggaatag

SEQ ID NO: 24618 - DNA, 479 bp, Glycine max
ctgttatgacaagaatttcaaaaagaattatcttctctctaatgtcagggattcagactaaggaaacctaatctctggcataggagagaagagataactgttatgacagagattaggtttccttagtttgaagccctgacattagaacataattatattaccttttttaagttcttaatactgtgcttagtacattactctcattcctcagaccgcatttgtatactattaccattcttgagagcagaagtatcattgagggcagtgccccatatcctttttcaattctcaaatcaatttgttccgtctttgaaatgagattaataaagttcattatatcctctcaaaaaaaaaaaaaaaaaaaaaaaaaaaaaaaaaaaaaaaaaaaaaagggggggggccacaagggggggttcggggccgggggatttaattcggggtgggaatcgtggggggtaaggtttgtccaaatggggtgg

SEQ ID NO: 24619 - DNA, 438 bp, Glycine max
tacggctgcgagaagacgacagaagggtacggctgcgagaagacgacagaagggtacggctgcgagaagacgacagaaggggtggatctttttggtgactctgttggtacaaactttatgccccatatcattacagtcaatactggtgaggacattacaatgaaggttatatctttttcccaacaaggaccccgtgctatatgcatcctatctgctagtggtgtaatttcaaatgttacacttcgtcagcctgattcttctgggggaaccttgacctatgagggccgttttgagatactttcattatctggatcattcatgcctactgacaaccaaggaacaagaagcagatcaggtgggatgagtgtttcattgtcaagtccagatggtcgcattgtaggtggtggagttgctggtctccttgtagctgctggtcct

SEQ ID NO: 24620 - DNA, 526 bp, Glycine max
atcgacggccgcatgacagtcacgcagctcgctgccgccggtggtcccggcggcggtgacgtgtcgctccgcaaggtcttcgtcgggaacgtccccttcgagatttcctcggagaggctcctcgacgagttcctcaagttcgcgtgaagtcgaggaagggcctctagggtttgacaaatcgagtggcaaaagcagaggcttcgccttcttcgtttacaagaccgaggaaggtgcaagggcttcgttggttgaaccattgaaaacaattgaggggcaccaagtgatttgcaaattggctgtggataacaagaagacgaaaccttttgtcgcggatcagcatcagcagcaacatcatcagcaacatccgcagcaacagatgcagcagcaaggttcaatgatggtgcctcagtatggtggatatggtggtaatggttatgggatgcagcagcaacagcagcagcatcaggtgccaccgtataataatcaaattccgggtgccggtgctggcgggtatggccatggatat

SEQ ID NO: 24621 - DNA, 574 bp, Glycine max
acattcccgctttcattttctttcccctgtgaaaacacaccctctttacagatcctgttgtttctctctctctctctctcacacacacacacaatttgttttctttcttttgtagctgccaaaacaatttgctcaacataaagagagagagaaagagactaccaaaggtttcagttctagatctgagggagctaaggttgtttgaagcaatggagacaccccatgtctcttggtctttcacatgagatgaaagtttcttgctttcttcttctttgacccttttagtctttattcttctactactaccttacttggtaactttcataaattagcactaagagcgtctcagattttggtaacaatgctggccattggggcacatggcactagtatccgcacaagctctacttgcactgctttgctcagagaacttgagcaaatatggaacgatattggggagaccgaagtggagaaagatcgaatgctgatggagctggagagggaatgcttagaagtatacaggagacaggttgatgaggctgttaacaccaaagtacgctttcatcaaacagtt

SEQ ID NO: 24622 - DNA, 295 bp, Glycine max
aaaccaccaagccctaaaaaagcattatcctccttctttgttctttgcttttctcttttctcttttcctctgaaaacacaccctctttacagatcctgttctttctctctctctctctccacaatttcttttctgtcttgctttgtcgctaccaaaacgatttgctcaatatttctaaaggtttcagctttagatctgagggagctaaggttgtttgaagcaatggagacaccccatgtctcttgatctttcacctgagatgaaagtttctggctttctgtttttagccccctcc

SEQ ID NO: 24623 - DNA, 350 bp, Glycine max
cgccatcccaagttattctgctaggagatccttgtttgcgcattatgttaaaactcgtgcagaagaagaacgcaaagaaaaacgtgctgcacagaaggctgcaattgaaggatttaagcggttactggatgaagcctcagaagatattaattacaatactgtttttcaaactttccggaagaaatggggaaacgatccacgggttgaggcattggaccgcaaggaacaagagcacctattgaatgaaagagtgcttcctttgaagaaagctgctgaagaaaaggctcaagcaatgcgtgcagctgctgctgccagttttaagtcaatgcttaaagagcgaggagatatat

SEQ ID NO: 24624 - DNA, 1514 bp, Glycine max
acccacgcgtccgcggacgcgtgggtacgcagggttactatctagctgcagcatcaaagcttgaggatgatgtcaatttttatcaaactgtggtagctgatgtggcgaagcttttccatattgatccgagtgttaaacgccctgctttgatcttgctcaagaaagaggaggagaaattgaaccattttgatggccaatttgtaaaagctgaaatagctgattttgtaacctccaacaagcttcctttggttacaacttttactagagaaagtgccccggtaatctttgaaagtcaaatcaagaaacaattgttgctgtttgtgacttcaaatgatacagagaagtttgttccagtatttaaagaagcagcaaaaaaattcaaggggaagctgatctttgttcatgtggaatcggataatgaagatgtaggaaagcctgttgcagattattttggtatcgctgggaatggtcccaaagtacttgcattcacaggaaatgatgatggaagaaaatttttgcttgatggagaggtgactattgacacaattacggcgtttgggaatgatttccttgaagacaagctaaaacctttcctcaagtctgatccagttcctgaaagcaatgatggtgatgtgaaaatagttgttggtaataactttgatgaaattgtcttggatgagtcaaaggatgttctgcttgagatttatgctccctggtgtggccactgccaagctctggaaccaacatacaacaagcttgctaaacatcttcgcagcattgagtctattgttatagccaagatggacggaacaacaaatgagcatcccagggccaaatctgatggattccccactcttctcttcttcccagcaggaaacaagagttctgaccctattcctgttgatgtggaccgtacagcgaaagactcttataagttcctcaggaaacatgcatcaatcccattccagctccagaaactagcctcaactactaaaaccgccagtgagagttctgatgtcaaggagagccaaagcagcaccaccgaagtgaaggatgaattatgagagataaaggatatttctatttataaagatatatgattcagacagatgataaccgagtgaaaaggtgcttagcaaagaaagtgactcaacgattgggtgagaaagccgtctatttttcctcacccttccaaaagacaactagccaagtagagggtagtgaaaaaatgaggtaacctgtgtattagtttcttcaacttttacatgtttgagtattagaattttggttgagactttaattttccaaatggctcgaaattttattgtatctgcagtcaattttattttcggtgtcagattatttggttatttttgcccttagtaggttaagctagttgataaaaaaattgaactttcattaaagaatgggtttgacatgcaaggcaaattgcatggattgtgttgtcatccgcttgtacaaaagttattttaaatatttcacaaactaccgac

SEQ ID NO: 24625 - DNA, 269 bp, Glycine max
gaaagatcccgattgggagcgtagaaagatggagtccccaatctcaatctgcgacactgagatccctcttctaatgcagagcatcgatgctttcaccgcttcttacgtcaaatccctccattccctcagagccagagcgcaagaaaccgctcgatgtcaagttcaactagacgaggttaaatctaaactcagagagaccgaggatgatttcgtcaaagcacttgcggtcaagacccgcaaagaggccaagcgaatggctttgatggatg

SEQ ID NO: 24626 - DNA, 258 bp, Glycine max
tacaaaggagccaatacagaatatcctgttaaatctgaaacttctcaaaatcttaagagcaagaaaagtcctctacatgatctattagcagaagaagttttaaagaaatctaatgaaatagaagctgaggttccagatagtatattgccctcacataatatagctgcacgttcagaatccctggatgatggcaattttattgaggcaaaagatactaaaagaagccgaaaaaagtctggaaaatcaaagggtttggga

SEQ ID NO: 24627 - DNA, 446 bp, Glycine max
agggatggtatccattcttccttcaccactgtgaagtcaaccaattttagtggaagtggtagtaatttaagcaatggaagttctagcaaaattaatggcgacgagagccccggggaagatggagggtcagatggcaaggataaatcaggcaaaaagaaatggtttaatttgaatcttaggggttctgataagaagttgatttaatattattaattaaacacttgattttggttgtctctttcaagcagcttgggttgcagtttttgtctagattattttcctctgcttggttccgccaagctggttaatctgtccattggtaatgtgatgcattcgaatgaaggtatacggtgtttatcttactgtttccaattccaatatttttgttactccgacaaacaagacccacatcatccaatttcctataaaataaattgttgtgatat

SEQ ID NO: 24628 - DNA, 782 bp, Glycine max
gtcgactttcgcgtccgcagaaaataaacaggaaagcgaagccaaacgcaccataaaaggttgatagaaaagaggggttgaaaaatattgaaagtgatcgactaatagcgccgcaattcgctgctccttctttggtgttgcttatatcatatatagttaagcttaacaacctccattcaaagttaaagatgcctcgtaccagcactctggagtgctccggttgccctccgcttcgcgctctaacctttgacgcgcttggtctcatcaaagttgtggaggcccgcgataagcaacgaggagctccccaggtcgtagagaggtggggcgaccctgaatcatccaaatgtgtgatggctgtttcaatgattgaccgagagtctcaccctttattagctgtagcgaggaaaaacaaccagattgaagttttgagccctgttaatggagatattcaggctacaatcacggatgccaatgatttagatgttcaatctgaagtgaataatattgttggattgcatttatttgcaaaacaaaattcggaattagcttccagggattgtactctacttacatgcacaaccaaaggaaatgcaagcataaggtccattgaacttgttgattcatctacagtatcctcctgtattgactctccaaaaatatggaatgtatgttctggtggtaacatcttgtgttgcaaggtggatggaaatgagaagtttgctttatttggagggaaaggtgttgaaatgaatatttgggatcttaacaacttcactaagatc

SEQ ID NO: 24629 - DNA, 288 bp, Glycine max
agtccctaacccttctctcaaccatgtttccctcttcttcttactcttgatttggtttcgatattgtttttcagttggtgttgcttatatcatatatagttaagcttaacaacctccattcaaagttaaagatgcctcgtaccagcactctggagtgctccggttgccctccgcttcgcgctctaacctttgacgcgcttggtctcatcaaaggtgatgattttttcatattatgtcactctctttttctcgtccttatggggttttgcttgtgctgttgttaattgt

SEQ ID NO: 24630 - DNA, 763 bp, Glycine max
acaaattccttgctatctaagttgaaagatcttgctgagagaagaaagctagaagacttgacaatcggcccagtcctcacatgtacgactgttttaatgcttgagcatgtgaataagttgcttgagataccaggatcaaagttgctattcgggggtagtcctctagagaaccattcaattccacctatttatggtgctattaaaccaacagctgtctatgttcctctcgaagaaattatgaaggataagaattttgagcttgtaacaaaagaaatatttggaccatttcaggttatcacggactatcaaaacagtcagctagcagttgtattggatgctttggaaagaatgcataaccatttaacagctgctgtagtttcaaatgatcctttgtttttacaggaagtcattggcaaatcagtaaatggtactacttatgctggtttaagagcaaggacgaccggagctccacagaatcactggtttggacccgctggtgatgctagaggtgcaggaattggaacaccggaggctataaaacttgtatggtcttgccacagagaagttatatatgattttggacctgtgccaaaggattggaaaactcctcagtccacttgaagaaaagtcctatcaatgatagcaggaacaatgagattaggaatgtagatgggaaggaagtatgtttagcatgtagctcatttcaacgcccctctgacatttttagatttttaataaatttatggaaattgagttttgtttt

SEQ ID NO: 24631 - DNA, 448 bp, Glycine max
gctggtgatgctagaggtgcaggaattggaacaccagaggctataaaacttgtatggtcttgccacagagaaataatctatgattttgggcctgtgccaaagaattgggaagttcctccttctacttgagaaaagtcctatttatgataggaacaacgaaattaggagggtgtgtcctatttatgatagaagcgatgagtaagaatgtaagaggaagcatatttgcatgtaggatatgccacagcccctccatgacatttttagattttagaataaatttatgaaaaaaaaatattttattaggctttttttttattgctgaaatataattggtgagatcatcatcggttgaggtgctgacatgataaaaggaatcaaattgtattgatgccgaacagtgtagaataaataattcatatctaatgctgtaaaaaaaaaaatcttatct

SEQ ID NO: 24632 - DNA, 265 bp, Glycine max
cactgatagcagcgatggtatgcgtcttcttctcctttgaatatgtgtttgtgttaattaagcttatatttatttgtatttgcatttgatacacaggggatcgatcttaaggctgggggtaagagcaaaaagaccaaaagaacagcaccaaagtccaatgacatctacctcaaattacttgtcaaggttcctcaaattaatctttttgctaccaaaagaataacaccgtagtcttactcttactgtatgtggagttagtatcttt

SEQ ID NO: 24633 - DNA, 751 bp, Glycine max
acgagaaaggacagggcatctatgcatttgttacagttgtggatggtgttccttacagtgaagaactgcggaaggaccttgtactcatagttcgaaagcagataggagcctttgcagcacctgataaaattcattgggcacctggccttccaaaatcaaggagtggaaagataatgcgaagaattctgagaaaaattgcgtctcggcagctggatgaacttggagatacaagtacccttgcagatccaaatgtggtcaatcaacttatagaacttgcagattcttgaagccccaaactttgtattattataggtatgagaaatgctagtaacacactccagcgtacttttttttaacgcactcttcattattagttaaagtttattggaaattgcaataatttatggatcatcactacttatttaatgatccttattcgtgattttgtagtttctaataaattttaaactttagtagagtgaattagaaagaatatattagagaaagtgttgttagtattccttgtaaaggtatattagcccatgagaaacgaggacaaattttgccttgtgtatctgtaatttttatgggaatcttagttcatgtgataaataataaatcaatcttccatctcttcttaaaagtatattaaccaatgagaagtgacagggcaaattttgccttgtacatctgtatttttatggaatcttagtgcatgtgatgaataataaataaatcatccatatctctt

SEQ ID NO: 24634 - DNA, 426 bp, Glycine max
ggtgagtctaatcatggaactaaggcttcaagatcagatcaggaacgacgaaaggggattgcttggactgaggatgaacacaggttatttcttctgggcttggataagtatggaaaaggagactggcgaagcatatcaaggaactttgtggtgacacgaactcctacacaagtagcaagccatgcccaaaaatacttcattcgtttgaactcaatgaacaaagatagaaggcgatccagcatacatgatatcaccagtgttaacaatggagatatttcagcacctcaagggccaataaccggtcaaacaaacggttctgctggaaattctactgccaaagcagccaaagcggccaccccggcctcaactggggtgccaggtgttggaatttatgcagctccaaccattggacaacctataggagga

SEQ ID NO: 24635 - DNA, 369 bp, Glycine max
gtattcagcacccacttcattgttcattttattgatgagtaaatcaacaattagacttaaaatccattcattcagctctccaatcatcaatttgttgtctagactctggaaggttccaaaggggatcagaactcacaactggggatggaactcgattccttttcatcgtgaattgattttctgaagggacaattgtggagatttactgcttgctctgaatcatcttgacactagatattccaaagtgacatttgttccattacttcttgtgtcacactcatattgaaggagcctccgttttcaattttgtctgcagcagattagaatttattgccaaatttctatcttgatcacaacccaaagccaaaa

SEQ ID NO: 24636 - DNA, 415 bp, Glycine max
aaatggaccagctggtggtggtggtatcagtactggatataagaaagagactcttctagagaaacacttggtaaagcgggaagatgttttctggcgaactgggataaagaggagcacaagaagtcagtcaaataaagtagttgatcctgaccacaatctgaggcacatattgacattgccaccgaagctacaagctgaaacagacaaatccttggaatctgtttctcttggtagtagttgctcacctgctccatctggccagaagattccactttacagtgtagcacacagcagagctggagataaaggaaatgacattaattgttccctcatgccacattttcctcctgattatgagaggttgaaactaattattacatctcaatgggtgaaatcagtggtctccaatcttctg

SEQ ID NO: 24637 - DNA, 496 bp, Glycine max
ctttgggaccctttgtccctgctccaccagaagttgcaatgcagatgttcagggagcaaggaggacctacatcattcgatgcctcgggaaggaagatgcgatctggtcctcatatgggtggaccagcacctataattgctgttcctccatcctttagacctgatcctcgacggatgcgaagttatgaagatctagatgccccagaagacgaagtcactgtgatagactataggagcttgtaggtgtgaattccactaatttcaatgagattggtttgggtggcatgcctcctattacgctttcttgacgagagctgcagtctagccttaatggggttaggcttcatttattttgtgaattcgctttgagaatctctttttttttccctgtcaatatggtgaaatttgagccgagggatgtatcgtgttgactttgatgttgtactagagatacgatttgtagacttcagttatttttctgatacaaggataatttt

SEQ ID NO: 24638 - DNA, 412 bp, Glycine max
gtatcaactaatgtgaaagcagttagcgctagaaatgaatggttatggtagttttgctatttcattaatcagttagcgctaatgattaaaaatcattggtcaaggaatttatcggcatattgtgtgtatacaatagttcacacttcttaagtgtctcactaagttttgattcattgatgtctgatgcaaaaatgtaatttgcatcttagttttttgcttatactaattctgcaaaatgcctagtgctgatgctccactgattattctgcaaaaccaagatgctccacttccctctttaattgttctgtaagtattaagaatgactatacaaatatattacgcaaaagacctaggtttgttcttgttatgaacgtggtcctgcccagttatcaacataataatgcttttgtgg

SEQ ID NO: 24639 - DNA, 794 bp, Glycine max
cagtgttcttgtattcaatatacttaaaaatgaaacactttcatgcattcaagtataccaaacaaaattccaacactatattttggagaaatatggtttcaatgtgtattctttttcaaatttgtaagaagaatttattactggatatggttaaatatggctgatatatatttttcctgtagggactgcaacctaatctactaactactactgacctctaatgcaggtcaagtctgatctggctaaaaatatccaatcattagaaccaaactctaaatgttatgtcttgtaatgagtgattctcttacactctgaagtataacaattttaccttataaggtttcaattcaatcaaagtaaaatggaaagcgtttccttatttatcaaatatgcttatgttttgtaatgttcttctactaatatgtggcgagcttaatccaaagtgatctttcttttggaactatccagttgaatagcagcatattttcagccttgaactttatattttatttgtgactattcttgtttaagagtggtttatgaatgtggtattgatatttgatgcacgataactggccttctgtcaggtaaaggttcaacaatcttattgccattactttaataactttaaatactaattctttagccgctcccagattgatttagatgagctggaaagtgtttccattctgtcaatgacccttgcatgggatgaattttccttctctacttttcaagaagcccattatttgcttcaagtttctctagaccaggtgcctcacatgcctttttga

SEQ ID NO: 24640 - DNA, 415 bp, Glycine max
caaaattccaacactatattttggagaaatatggtttcaatgtgtattctttttcaaatttgtaagaagaatttattactgtttatggttaatatgggctgatatatatttttccactactactgaactcaaatgcaggtcaagtctgatctggctaaaaatatccaatcattagaaccaaactctaaatgttatgtcttgtaatgagtgattctcttacactctgaagtataacaattttaccttataagaagcccattcaatcattagaaccaaactctaaatgttatgtcttgtaatgatgattctcttacactctgaagtataacaattttaccttataagaagcccattattcgcttcaagattctctagaccaggtgtctgacatgccttttggatatcttttctgttt

SEQ ID NO: 24641 - DNA, 890 bp, Glycine max
acgaggccattaccacttgtccactttggcggagtggctgcgccgctgttattacccaatactaccggctacccaggtcagctccccttctcttctcttcccatatttaataagcgttgagatctacaaccaatacaaactcaacccgacccgaattcattgtaagagaaatgatactggtggcgattgtggcggaggtgctggaggagtacacggcgttgctggcgagagtgctggagcaggttttccgttccgcccctgtccctcgacgggttcgttttctcatcctccgagcgcttccctttgtttcttctcgtcctaggaccattctgccccctcctaccccttcctattaggaattatggttctccatcttcattaacactggaattgatacatgttactccgtttggtttaaccactcacatatatatatgcttgtttgtgtaccccttcaatcctttggttgttaagcgaccttaaccaatcggatagaatcacaccatatactcttgtgggaatatcggattggttagtggttgatagattcctataataacagaaatgcttaacctagaaagaggatcacacttaacacttgaatgttcttcaactaggtctaattataacaattattagtaatattttgattttaattttgagtttgagctgcatgcaatgcattctttggatcaactctgtagtctcaattcccagtcactcatgctcatggcctgccctgcatcactctagaaacttctttcacctctttaactaattattattattagtttaagctctcaactaaatgagatgtaatattttttttttatcctcgtcgcgccataataaatgtcataaaaattgtgtataaatataattattattct

SEQ ID NO: 24642 - DNA, 446 bp, Glycine max
aatcagccaaatttagcagtgcgcactcatcatctttcagtcgcaggaacctggcaccttctctacaacccagtcccggtgcaagattttctgttccattcaactaccccagccagaccatatacgatggagcaactgctaatctttacacagcaacctatggaacttcccacactcaaagcccggctggaataacacaacagcactactctattcctgttgacaatttgggtccgtctggttaccggtctagtggttcttattcagcacagactagctatggcctgtatgattacagaaatggtgctcctccaacttatccacctccgtacacagtagatcaaaccacttacaggggttaattattcgactccctctccccctggttatagtcctttttctgcctgtttgatgttactttcatctattttgtttctcgttttgtg

SEQ ID NO: 24643 - DNA, 423 bp, Glycine max
caaagcccggctggaataacacaacagcactactctattcctgttgacaatttgggtccgtctggttaccggtctagtggttcttattcaggacagactagctatggcctatacgactacagaaatggtgctcctccaacttatccacctccatactcagtagatgaaaccacctacaggggataagttttcgtcctacgtatcctttttcttcccgttgtttactttagatgctactttcatttagtttacttcctgttttgtgatgctaaaattggaaaatataataggttcctgggaatagtacttattcaaatacatagatatatgatgccaaccgcagacaaggcaaagttcgttcttttttttttttttgaagttttgactttttctttttgaatgtaattaatttccccttttctt

SEQ ID NO: 24644 - DNA, 816 bp, Glycine max
cttgattgacaggacaaaggcaccgtgtaagagctgtttgaaggatgctaatgtatccatcaaggaagttgatgaggttcttcttgttggagggatgacccgggtgcctaaagtccaggaggtggtttcagcgatctttggaaagagtcctagcaaaggagtaaatcccgatgaggcagttgccatgggagcagctattcagggtggtatcctacgtggagatgttaaagagctactactcctagatgtcactccactttctctgggtattgagactttgggtggtatctttaccaggttgattaaccgcaacaccacaattcctactaaaaagagtcaggtgttttcaacagcagctgacaatcagactcaggttggtatcaaggtgctacaaggtgagagggagatggctgtagacaacaaatcgcttggagaatttgagcttgttggcattcctcctgccccaagaggcatgcctcagattgaagtcacatttgatatagatgccaatgggattgttactgtctctgccaaagacaagtctactgggaaagaacaacaaatcaccatccgttcatctggaggactctcagaagatgagattgataagatggtcaaagaagcagagttgcacgctcagaaagaccaggaaagaaaggctctcattgacatcagaaacagtgcagatacaagcatctacagcattgagaagagtttaggtgagtacagagataagatccccagtgaagtggccaaagagattgaagatgcagtatcggatttgagaacagcaatggcaggagacaatgctgacga

SEQ ID NO: 24645 - DNA, 371 bp, Glycine max
caacactttccactatgctggtgtcattgcaaagaatgttactcttggtgttcctaggttaagggaaatcattaatgtggcaaagagaattaaaacgccttctctgtctgtgtacttgagatcagatgttggtaagactaaagagagagccaagagtgtgcagtgtgctttaggatataccactctcaggagtgtgactcaagctacagaggtgtggtatgatccagacccgatgagtacaataattgaagagacgttgattttgtgaagtcctatatgaaatgcctgattaaagaagttgctcttgaaaatttcaccttggttggcttcgcatagagctgaatcgtgaaatgatggtggataggaagttg

SEQ ID NO: 24646 - DNA, 571 bp, Glycine max
ggagaaaggagatactttatgatgaagaggatgaggatgaggattctaggaagagatggcgcagaagtgtgatagaggagaagagaaagaagaggctgcgtgagaaggaagatgacctggttgaccgacaaaaagaagaggaagaaattgctgaggccaaaaagaaggctgaggaggaacaaaagcgacaaagagatgcattaaagcttttatctgagcatgtggtaaatggtggtaaggaaaatatgattactgaagagattactaatgaagttaaaagcattgttgttgaacaagatactgtagctgactatcatcatgaatatcatattggtgacggtgattcaataaatgtcatcattgatgcatcaaccatagcatctgttgctacaactgatgcacagtcaggtggcaatgctcctacaaagaaattggggtttggtctagttggttcagggaaaagaacatctgtccgttctgttttccatgaagaggatgataatgaggccaaaaaatgggccattggttccaattgattatcaactgaagaattgcaggcattcaacctacg

SEQ ID NO: 24647 - DNA, 753 bp, Glycine max
gggaccggcaccgggaaaagagtggaagcagagagagggatgatcatgataaggatagaagcagggatagagacagggacaggagaagacgagccaaataagaacatttcagatgtttcagcagagatttgataccttaatgatttgcaaattggcttgtaagagtcaggaggacagttggcttttcgtcatcacagggatattggcaatgtgatacctcctgttgggagataggaatgaaacatctgccaggaaagtgtcactgtagacaatccttggaagtgctgagtagtaactggctcttgatacccccacaatttcaacttaatgtaatattaagattttaaatcgttaattttgcctgtgaattagggcatgctgctgcacactgcatatttgatcaagagggttctgtccataccaattattgagatagtttacagggagattcggctgactatatgtgtttgtttgtgcgtgctgggtaaggtgtattttaaaatatttagggatgtgatcgtttattgcgtaatgatgcataatagtagtattgtggacgaattttgaattcctaacgctagttattttgataagatcaacattttcgtttacctattggacgtatttcaatacagtatagatattctttttcttgctgatatagatattttttgtccttgtttagctacaaaactgagtggccaatgcggttggatatattgaaattacctcatcctagtagtttattgttcc

SEQ ID NO: 24648 - DNA, 449 bp, Glycine max
caagcttagcacaagtgggtaaaatattgtaatgacgtgttgataggaatctatctgatcttctcactctcccccatttcacttctttttatatttttaagtttttttttttataaataatatataatgtaacccctattattattatcattattcacctttcaaatttcaaaatgctctctcttgtctaaacttgtaagtaacaataatggtatggtagaagtagtagtcgcccttgaaataacacaaacaatacgaactctccccaactcaaaacaacacacaaactccagttactgaaattacccttttccattttttccccctaaatttcaccgacgctgtcttttttctctttagccctcacccttttgagagtttcatagctgtaacttgggtgtaaccgatgctggaaatctcaacttcacaggaaaccccgctagagaacg

SEQ ID NO: 24649 - DNA, 729 bp, Glycine max
taattgtctgtgatacgtgcttgctttatcgccctcctcgtacttctcattgttctatatgcaacaattgtgtccagagatttgatcatcactgtccctgggttggccagtgcattggaatacgaaactatcggtacttcttcatgtttatttcgacatcaaccagtttgtgcatatatgtcttcgcgttctcttgtatcaatattgcccacagtggcatttggaagacaataacacatgattatgtatcagattttctgataatatactgcttcatagctgtctggtttgttggtggcctcacagctttccatttctatctcatttgtacaaatcagacaacttatgagaacttccgatatcaatatgataagaaggggaacccattcaataggggatcatgcagaaatcttaaagaaacactttgttccagtattccccattcgaagaataatttccgatcatttgttgtggaggatgaacttatgatggtcgggtctctgactccaaatattggggatggaattttgaccccaaaggagaaaattgatattgaaatgggatctatgcgtgcagaagatggacgtatgcctgttcctgaacttctgcgaaattttgattttgataattttgatggtgacatgaagtttgcagacgacgacgggcagccttcttttgatgcattctacagtattgaagatgatgcaaaagattcagcccgatcatcca

SEQ ID NO: 24650 - DNA, 362 bp, Glycine max
gacttgcctaatggattgggatattgaccgtaaattgttttccatgatactggatagttgttccacctcggataaaattgctgttagaattggtgagagacttctgcaaaacaggtttctttattgcaacggtcaattatttgatatacgctgtgctgcaaatgttattaacgccatggttcagcatgctctgggagctgtaagggaaatagtcaataagatccgtcaaactattggttacattaaaagttcacaaattatactggcaaagttcaatgtgatggctaaagaggttgggatcctgagtcaaaagggcttatttctagataatccatcacaatggaattccacatactcaatgc

SEQ ID NO: 24651 - DNA, 266 bp, Glycine max
gaaacattcatagctggtattatttctcggaatttggattgatggtctacagcatgacaaaaaatagatactgtgagcgaattggcagacagcataaaagcaataatgtgatatatgtggttgatctacgaatggcagtgtattatcagaaatgtcatgatcctgactgcagaggttatcgatctccctcacgtcaaatcccagttcatgtgttctccaatccttcagatgtaattggttcctttgggttgttagatgatgaacag

SEQ ID NO: 24652 - DNA, 269 bp, Glycine max
cgctcccctagcttttgtttgtgtttctgctttgccccttctccttcttcagttgttcttcttccttttcactctgctctctctgaatgctaaattgaaccacagcttgcaacttggtaaagacaaaaacacttgcaaaaatgaggggtcctttgggtgcagtaataggaaggtacccatcaagtgatggagttacccaaatgggtggaatcataaggcacaacaggaaatgcagggacatcattgttcttgtgatcttcatagctttt

SEQ ID NO: 24653 - DNA, 654 bp, Glycine max
cttaaccccaaattcagaatttacgattattttcacttcatttgattccttttctttatcttaggtctcacacactagatccatttttgaaggaacttccactttttctcaggtgatgtaataattataataataataagccttgcaggaactgtaatggctcacagcagctctgatgaggatactgatattagtgaatctgaaattagtgagtatgaagataaatcctatgaagaactgaaaagtggaagccaggatgtgaaaacatcggatgagactttcacttgtccctactgccctaaaaagagaaaacgggattatttatacaaggagctccttcaacatgcttctggggtgggtcagagtagttcccaaaagagaaaagcaagagacaaggctaatcatttggctttactgaaatatttggaaaaggatctcatgaatgtagatgttccatcaaatgattcaaaaccggaagatgaaagtgatccttctgttaattctaatgatcagtttgtgtggccttggattggagttgtagttaatattccaactagacggacagtagatggacgctgtgttggtgagagcggttctaggctgagggatgagtacagaagcaggggtttcaatccagtgcgagttaatcctttg

SEQ ID NO: 24654 - DNA, 435 bp, Glycine max
ttttgttgctgtttggttgctactggaaactgggatcaccttgaatagaaaaaccagctacattgctttggcttgcatctttcacgtggtttttcctattgatttgtgattcatactatcaggaattagaagctgagaatgcaaagctattatctcaacttgctgattgccgctgtcatgagatggagaaaaaattgcatatccctgatgagaaaggcagggaatcaaaaataggcaacaggaaatctgaagagaagatagagaaaatgccaggctccttctcctcgtttttctctttaggggactagttgtggcacctgtgacatgggtgctaagagaaagtaatatttttaaataaatgatgacgtgataattctctctctctctctctctctctctctctttcgctagctgcactttctgctcttcaataga

SEQ ID NO: 24655 - DNA, 283 bp, Glycine max
caccaccactcctcaggatcctgttaattcagactcccctcagaaacaagccattggtaatgcaaaccctagtcctactcctgcaatgaactatggtatggctaatcgacaaagatcattgaagcaccgtggggggccaaatggctataatgtttggggtctggtcctgttcagaacaacttctccggtgctacccagaatcttcctccaccgccaccaccgcccccctttcctgtgcttccgatgcctccaagaacatttgcccatgggataccaggggttc

SEQ ID NO: 24656 - DNA, 1679 bp, Glycine max
tcgaaacggaaatcttgcctatgtggagaggtttgacttaggtggcaattcaggaaacaaatcaaaagcaagagctatttgggtgggagttggagcaggtgtagcttctgtagctatagttgcacttatagttggtcttgttttctgtttctgtaacggcaggaagaaacaatcaagtgataccaagaacaaccctcagggttggagaccattgttcctctatggaggggctgctgtgaacagcacggttggtgcgaagggatcagcaggtactcaaaagccttatggatctgtgggctcaacaagagttggcaagaagtttacattggcagaaatcaatgctgcgactaacaacttcgatgacagtttggtaattggagttggaggctttggtaaggtgtataagggggaggttgaagatggtgttcctgtggctattaagcgcgccaacccccagtctgagcaaggcctggctgaatttgagacagaaatcgagatgctgtccaaattcagacacaggcatctcgtgtccttgattggtttctgtgaagagaagaatgaaatgatcttggtttatgagtacatgttaaatggaactcttagaagccacctatttgggagtgatcttcctcctctatcttggaagcagcgcctagaagtgtgcatcggtgctgcaaggggacttcactaccttcacacaggagctgaccgaggaatcattcacagggatgtcaagacaaccaatatactgctagatgagaactttgtagccaaaatggctgattttgggttgtcaaaagatggaccagcttttgaacacacccatgttagcactgctgtgaaaggaagctttggctatctagaccccgagtacttcagaaggcagcaattgactgagaagtctgatgtatactcctttggtgttgtgttgtttgaagttgtttgtgctagagctgtcataaaccccaccttgcctaaggatcagatcaaccttgcagaatgggcaatgagatggcaaaggcaaagatcacttgagacaatcattgaccctcttcttagaggaaactattgtccggaatcattggctaagtatggagagatcgcagaaaaatgtcttgctgacgatggaaagagccgccccaccatgggagaggtgttgtggcacttggagtatgtcttgcaactgcatgaagcttggctcaacatggacaccacagaaacttccttctctagtagtaatgctttgagatgtccaaaagatggaggactagaaatggtccatgagccttcaaatcaagatggagaagttggttttgatcacaaaaacacagctgaatccgattgaagaatgctgcaatttgagttcagtgatttctgaatgctagtcagacacaccattgattgaagaactataaatcaatgacccttatagctcatatatgctttacatattctttctatttgttttattgaatccaacttcaagtttattgttactatttttcaagctaatacatggtagtgcaataggcaagttattaataacttattatcaaccctttgtctaaaactggtaccaaaatttgtgatatgctctggttttgtattgagtatgcaattaaaaattgtattcctggatcttgcttcttgaaagctagttagaatgttatccctggtcc

SEQ ID NO: 24657 - DNA, 611 bp, Glycine max
caaaggcaaagatcacttgagacaatcattgactctcttcttagaggaaactattgtccggaatcattggcaaagtatggagagatagcagaaaaatgtcttgctgacgatggtaagagccgccccaccatgggagaggtgttatggcacttggagtatgtcttgcaactgcatgaagcttggctcaacatgggcactacagaaacttccttctctaatgatcatgctttgagaggtccaaaagatggaggtctagaaatggtgcatgagccttcaagtcaagatgaagaagttggttttgatcacaaacacacagctgaatctgattgagtccagaacaagaggagttagagaaattaatgatgatgcattttgagttcagtgatttctgaatgctagtcagtcacaccattgattgaagaattgaagaacctatgaatgaatgacccttatagctaatatatgctctacatattctttctatttgttttattgaattcaactattgaagtttattgttactatttttaagctgatttttgtatacatggttgtgcaatgggcaagttattatcaacattttgtctaaaactggtaccaaaatttgtgat

SEQ ID NO: 24658 - DNA, 382 bp, Glycine max
cgccattttcgctctcctcacgctcagtgtgcatgtgaatctctctctctgtatttactggcactagcttgcaaaaactaactgcaaatatactcattcagttacgcaatttccagcccaagaagatctcgtttcgccgatccaaactaatccgaaaatgaagcctaacaaaaccgtaaaccctctcatcaccttcgaacacaagagggatgcctatgggtttactgtgaggcctcagcacctgcaaagataccgtgaatatgctaacatttacaaggaggaagaggaggaaaggtcagataggtggaactcatttctcgatagacaggctgagtcttctgaattggtcacagacggattaattgtgggggaggggggtgag

SEQ ID NO: 24659 - DNA, 416 bp, Glycine max
acgacggctccgtcgaacggcgtcggcgcgtatccggcggcgcgagtaccgcaaggaccgggaggagtggagcgacacggcgattgtgtgcctcctcgaggcgtacacggagaagttcacgcagttgaacgggggaacctgaggggaagggattgggaggaggttgcggcggtggtgagcgaacggtgcgagaatcaatcaaagagcgttgaacagtgtaaaaacaaggtcgataacctaaagaagaggtacaaattggagcgacacagaatgagcagtggctgcatttccaccagccactggccttggttcaagcaattggaacagatcgtcggaaattctctcccggcgaagttctccgacgaggataaagcggtcatttcagccggaacttctccccggcaatcgaaaagata

SEQ ID NO: 24660 - DNA, 310 bp, Glycine max
attttggtgcatgcgagtgaggggctttgtaaattaatttgatctagtaatagtacggtagctaatagtagtatttctgtgattggtgttgcagattgatcaagtgaatataatattggtaatgatggatctgaaggaatggtcatcatcttctgaggaattgaatgtgaacaggaaatgttgcgctgattgcaaaaccaccaagaccccactctggagaggaggaccagctggacccaagactctatgcaacgcttgtggaattaggtatcggaagagaagggcatgttggaggaagggagagttgaag

SEQ ID NO: 24661 - DNA, 432 bp, Glycine max
cttggttgtgtttgagttgagcttgcgcaaaacccctaaaccctgtgaatgaagaagagtggcgaagaaaatgggggcaagttcaagctcaagggtgcggataggtcagcgtacttcgcacgcagagaggcagccaaggtcttgaaagtggttctcgaaggagacgctaagcgccgcgctcttgcctccatcaaatccctcatctatcaaccttccgttagaaacaagaaagccacattcgctctcatttgtcaaaccctaaaacatcttcccattatcacggatgtcttggaagctgcttctattctcaacaccaagtggaagaggcaacgagaattgatttatatcattgtctatgatatccttttaggccaggcggtttcactagttggtgatgctgagaagtaccttatgcgccaccaagatgccctg

SEQ ID NO: 24662 - DNA, 430 bp, Glycine max
cctaaaccctaagattgaaatcgaagccacaatcgcgctggagtgaggttaacactcttaggaggaggcgctgtttggttcgtgaagctgaagatgaaaggcatgcgtaaactgctcatactttatgcctctcagaccggcaatgcattggacgcagctgaacgactttctcgcgaagctgaacggagagcctgccccttcaaccttctctctgtagaccaatatgatcctagtttgttaccacaggaggaggctgtcatttttgtggtttctaccactggccaaggtgatacacccgattccatgaaggtattttggagatatcttcttcagagaaacctaggtcagcgttggctgagtggggttctctatgcggttttcggcttgggtgattctagttatcagaagtacaattttgttgcaaagaagc

SEQ ID NO: 24663 - DNA, 296 bp, Glycine max
gtcattgttgaccgtgaagccaatcttctgactcgaatctatcgtcttgctgagggagaacaacgttccgtcaacattcttgaccttgagaagcccgtgaactctgaggttgttcctgtcatcatattcttccatggtggaagttttgcgcattcttcagccaatagtgctatatatcacacactgtgtcgtcgcctggtgggcatctgtaaggctgttgtggtgtctgtgaactacaggcgtgcacctgagaacaggtatccctgtgcacatgatgatgggtggacagctcttaa

SEQ ID NO: 24664 - DNA, 414 bp, Glycine max
cttttgtgttggcatgcttgttttgattccttctatcttgtgaaacaaatctttcaactggtgttggtgttgctcttgcgctcgcggaagaaaaagttgtgtttcaaatttcaatgacttctgctactagttatactccttcacctgaaaacaaacctcagatccagcacataattaacattcctgaacagatggagcctgaggtgcatgatcaatgttgcatttacaaggttcctcctcatctcctgaaattgaatgtggaagcttatacaccacagttcatctcaataggccctcttcacagtgacaaaccagaactaaagcaggagaagcagaaacaaaggtattttcatgctttttggaaacgtctatctcacaagcaaggtttagctttgtcacaatataaatccttcc

SEQ ID NO: 24665 - DNA, 279 bp, Glycine max
atcacagttgaaactacagactacaatgaaagcagtgactctgccataaatgttgatgatagctgtctgagcagtaggcaagaaaatggacttagtgaacataattcaaaactatcactcttgggacatggaccacatgggaaacgagttgtagaatatttactgaaggagtatggtgaagatggcatccgggcgttttgtcaaagatggagacaagtatttgtggatgctgtaaatccacgttttcttcccggtggttgggatgtaaaacacagtgga

SEQ ID NO: 24666 - DNA, 260 bp, Glycine max
gaaagacgtcttctgaattgggaagcaatagccgatcttgaacctgatgagttactgcccacggtttcctgggattgttcatctggaatatcgaatcttaaattggagaatgccaaaagtggaaccccaaaaagacgcggaagaggaacattctcttatgagaaaaaggagctttatagtgaccagttacttgataggtcggtcgttgatgttgagcgggaagagactccccgtagttcagaagataatacagatgtaca

SEQ ID NO: 24667 - DNA, 285 bp, Glycine max
gatttaactcatgattgttgtgttgagtctttacctagtagctattccatttcaagatcagctctgcaaactgaaaatgcatttgaaaagcaaaagggtgataactctttcagattatgcgaagaatacaatggatgccagagtggagcaattgaaaagtgtgagcaacagtccccatatactcacagctgaagtgaatcattttcaagttcaatttctagtactgattgtgcgcatgcagtttcaaaagaggtgtcagggatatccaataagcttcaaaatgtg

SEQ ID NO: 24668 - DNA, 337 bp, Glycine max
catttgctccagaagaactctaagaaacataaaaaagcctctgcaatgtgttatggcccggaagagaattctcatgttgctaattataggatggtattggaaagatttccactttcattggatcggaaaaaatggtctagtgtagaaagggaaagtcttttgaagggaattaagcagcaattccaagaaatggtgcttcaactttcactttctgttgatagttctgagggcttgcctggagatgcaaatggcatggatgatgtaattgcatctgtgaaagatcttgcaatcacacctgagaggattagacaatttttacctaaagctaattgggatc

SEQ ID NO: 24669 - DNA, 366 bp, Glycine max
gaagaggagcacatgttgtggaactcctttctagaggaggcttcaatgttgcaaaaggaattgagtggtgaggttttggaccatgagacaaggcaaaggttagtggccccagtgtctgtggagcttgaaggggatcagtacgaggaatatgtcaaaactgagctttattacaaaaagcatttgctccggacacctcattgttcccttctgctgtctaactatgcacagtttctcttccttgtccttcatgatattgatggggcagaagagtactacaagcgatcagtgctagcggaatcaccggaagctgaggcattcagtcgctacgccgacttcttgttgatggtaagaaaggatgtttgggca

SEQ ID NO: 24670 - DNA, 568 bp, Glycine max
acagagagagactcagggagagaatggagagtagcgaggaagaagatgatttcccttccattgagagcatcattccccagtccaaggttgactctctctatcagtctcacaccgaaaaggggatcaggaagctttgctgtgagctcctagatttaaaggattctgtggagaacttgtgcggcaatatgcactccaagttcttggctttcttgaggatatccgaagaggctgtggaagtaaagcatgaattgattgagctgcaaaagcatatctcagcacaaggtattcttgttcaggatttaatgactggtgtctgccgtgaattggaagagtggaatcaatcaagcaacgatgttgctgaaattcagcaagaacctgaactacctgaactccttgagcctttaccaaatgagagaaatgaccagaaaatattattcttggaaaccatcgatgtacttttggctgagcataagtttgaagaagcattagaagcattagatgctgaagaaataaattctgcagagttgaagggctcagggaataactcttcagatgatgtttccttgta

SEQ ID NO: 24671 - DNA, 367 bp, Glycine max
acactctactaatgctcatttgatttcacaatcatcaactaacatcacccaatttccattatcatattcttcaaatactggaccaccaacttcagcaacaccaagccattattccaaagaaagcagtgtttcctggcatacagattccctgccaagctttctggattttcctgaaaatggctctattgataataatcgggtagaaagtagtgcctgccctataatggcatctgaggagtattctaagcaaaatgattggcaggagtgggctgagaggctaatcagtgatgatgacactttgactactaattggaatgaccttcttgctgacaacattcaagatcttgagccaaagattccaggacat

SEQ ID NO: 24672 - DNA, 307 bp, Glycine max
aagtgtgcttacacttttcactcttgacaatgtacacaaattgtgcaatcacaatgatccaccacgaaacactcaacaccagcgacgcacccaacagaccaagccccacctcgtacacagcacaatagctcaacgcaagatggaccatcaacgtggctgttgaaatgtatgcgcttggagccactatgctctgggcttggaggaatttttgaatggggaagtttacagcgtaagctgaagatctgagggattagtccgtagtcgaaaagtgctgctgcggatgcgattcttggggattctcctagga

SEQ ID NO: 24673 - DNA, 512 bp, Glycine max
aatcaagctagttcctgtgccacaaaccgtgactgttttcacagtgaccaagaccttagaacaaggagggagcaagcttcttcatagatggcagcaagtggctccacatattgatgagaatctcttcattagagtcatcattcaaccagggaatggcactgttcctggtaagagaacagtaaccacttcctacaatgctctctttcttggtggtgctgataggcttctccaagttatgaagcatggttttcctgagttaggtttgacaataaaggattgtgtggagactagttggatcaaatctgtgctttatattgccggctaccctgatggaacagccccagaagttttgctccaagggaagtccacaacaaaggcttacttcaaagccaaatcagactttgtgagggaagtaatcccagaaaagtccctcgatgcactatggaaaatttttgtgcaggatgatggtcctctaatgatatggaacccttatggaggcaagatgagtagga

SEQ ID NO: 24674 - DNA, 317 bp, Glycine max
ctacagatgagccctaatttattcaaaaagaaaagatgaaccctaatttcctctgtctctgaacttggaagatctggtttccattatctcctccatcttcacgttccgaaattgtagatagaagatcacacttgctcaattcccttctcaagttattgttggttggcaatgcaagatccaaggattcctttgtcagaggagatcttgaataataaaccaaggaagaagaaaaactcaacccagaaggcatctttatttcttttgcaagcgaatggtgtcaaggaagatggacaggcatctctgtctttaaaatcagg

SEQ ID NO: 24675 - DNA, 810 bp, Glycine max
cacagcttttgcctgtgtatacccagatagctaccaagtttgctgaactgcacgatacttccttaagaatggctgccaagggtgtcgttagagaagttctggactggtgtaactcccgtgctgtcttctatcagagactgcacaggagaattggtgagcagtcactgatcaacagtgtgagagatgctgctggtgaccaattgtcacatgcatctgcactgaacttgctcaaagaatggtatttacattctgatattgccaaaggtagagcagatgcttggttggatgacaaagcccttcttcagatggaaggataatcctgcaaattacgagaataaactaaaggaattgcgtgcgcagaaagtgttgcttcaattgacaaatattggtgactcagctctagatttgcaagctctacctcaaggtcttgctgcccttttaagcaagttggagccatcgggtcgcgtgaagttgaccgatgaacttcgcaaggtacttggttagaggacctttttcgtgtcttattattgtaccacatttatttgtgttgattcccttggttaagttgttatacccaagtgaaaggaggctgtagcatccctcattgccgaagggatccgttgcttcaaagtgtaaatgacatgagtttggatggtaattaatttatgcagttagaggatcacaaccggcatcaccatgttccatctatttatttgctggttgattgattcttttggtatatttgaataaaattgtaataatgtgtaacattgtttttaatgcataacaattttgggtggtcgatgtcac

SEQ ID NO: 24676 - DNA, 358 bp, Glycine max
catgaaaactgcagctgggattgtatatcttcttgcttgtttgttagaaccttttatcccatctttcactcttgaagtatttaagcagctaaatttgcctgcggatacacatgtttcacttagtgatgataaaggagatgttgatagggtaaaaagaccctgggatatcataagtgctggtcataaaattggaacacccaagccattgttcagggaactgaaagatgaagaggtggagttctacaggaagaagttcgcaggaagtcaagctgataggattgtgcgtgcagaggccgaagctcagaatgttgctgagcaactgaagaaaacgaaagtttcagatggcaatggaaagaaa

SEQ ID NO: 24677 - DNA, 268 bp, Glycine max
ggcatattctgaaggcattggggccaaataagacccttactagtgatgccaagaaaattctggcagatcttggcactagattgtcctccatgtccatacctagtgagaaggatgacgggaaacaagggcagggggaggatggtggtgatgatcatgatggcagtgatgatcttcatgatgattatgatgatgatgagggtgttagtgctattgaagaaaggcttaatgtgattcaggagaagattatgagatgggaggaagatcagtc

SEQ ID NO: 24678 - DNA, 385 bp, Glycine max
ctctcgcgtccgtgccactgttgtccatccaagtcactgaactattggatggtgttttcataggctgttccatgaaccataccataggtgatggcacttcttattggaatttctttaacacatggtctgagatcttttttcaaactcaagctcaagggcttgaatatgatgctactgttcccatttcacgccaccctattcataataggtggtttccagatggttgtggtccattaatcaatcgtcccttcaaacatgaggacgagtttattgacagatttgaatcaccaaagctgagagtgagaatcttccacttgtcagcagagtctattgcaaagctgaaagcaagggctaactctgagtccagatccagaaccagcgaaat

SEQ ID NO: 24679 - DNA, 935 bp, Glycine max
ggcagcatccagggcagtatgagtactataagaattatgatgacctagagatccacttccgtcaagagcacttcttatgtgaagatgaggcttgcctggctaagaagtttgttgtttttcaatctgaagcagagatgaagaggcataatgctattgaacatggagggcggatgtcacggtccaagcgtaatgctgctcttcagataccaacaagcttccgatacagacatggtaatgaacatgagcaacgccgcggaagaggtcgtacgtttcgtcgtgatactgaaaatcaactttctatggccattgaagctagtttggaaacagctaatgcagagcaaacatttcttgatcaatcgacatcaagtagtgggcaagttgccgttgatgatgggaatgatgatattgatgctctcattcagccatttgaatcattagctgcaggttctgaagcatctgcaagataccttcaagccttggggcatagctctaggaatggacctctggaagattcttcctttccaccactacccataatctccagcaatggccaacaaaggtccaaacatgaactggaaggttcatctagtaacactatggctgcacgtctgcgtcggcatggcaacagaactgtatccgttatcaattctggtaatgcttggccagcagcaggtcgtggactggtacagtcatcaagtaatccttcacaatctaaactttcaacaaataatgtccttggactgtctcgtaacactgggcagatgaaaacagtaattaacagtggaccgtcatcatcaacttatgctggttctattcaggctacacagagaactgctcacggacaattacctgctggttcatcgaggaacacacgcgacaatgtcagaattgttcactctgcatctgctccaaatctcatggagaacaatctgttg

SEQ ID NO: 24680 - DNA, 303 bp, Glycine max
acaaaatatcccaaactctcactcgtcgacggccaccggatcgacctcaattcgccgtcgtccaatcgctctcagttccaccgcctccgccgccggcatccaattcggtttggccttgcatctctctcaggtattaagattctactaaaaaaaaggttgatcagcgtaaagatggagctcactattacacagcctgatgattggcatcttcacctccgtgatggttcccttcttgaagctgtcctccctcacagtgcgaacattttggaagggcatagtatgccaatttgaaaccacatcata

SEQ ID NO: 24681 - DNA, 446 bp, Glycine max
ttgatgactagagagcaaagttgtatgctagtattgtggataaaggttgtgccgcaacgtttgcatttgcagctataatatttggtgaatcctcagaagctctgttttggctacagctgcctcaggcacttaaacatttgttgaacaaggtattgagaaagcctccaccaaaagaatccacagcagcacctatctctgatgttgatcatgagacatctctactatctcggatatcatcaaagggaaaaccgacggaagaaacaggaagagatgtattgagtcaaggtcaactaaggttaatggcttttgaccgagaagagttgtggaaaagtgctagtgaacgcatttcttggcatgaaaaattagaaggtgaagaggatatacagaaacgtattcataagctggagtcagttggaaacctagaggctgcagttagtttatggctt

SEQ ID NO: 24682 - DNA, 308 bp, Glycine max
atcagatatgttttctgagttcgagatttttgcagtggtgacacattcggggacactcgagtctggccattatgtttcttttgtgcgtgtaaggaatcaatggtacagatgcaatgatgcttggataactgtggttgatgaggctacagtcagagcttcacagtgttacatgattttttatgtgcaaaaaactctgcacaataaagcaaatgaagacctgagtcacgtgccaaattcccctggaagagacctatttcttcctattgctggatgttgctagaaaagaggattatattgtaaaggagtac

SEQ ID NO: 24683 - DNA, 422 bp, Glycine max
gttttgagtataggtacatcacctcagattgtgatgctgtggccacggtttatgagtatcagaaatacgcaaaatcccaggaggatgctgttgctgacgttctcaaagcaggtatggatattaattgcgggacgtttatgcttcgacatactgaatctgctattgagcaaggaaaggttaaagaggaagatttagatcgagcacttcttaaccttttctctgttcaactgcgccttggactgtttgatggagaccctataagaggtcggtttggcaaattgggaccaaaggatgtttgcacccaagaacacaaaacactggcacttgatgctgcaaggcaggggattgtactgctgaagaatgacaagaagttccttcccttggatagggatattggtgcctccttagctgtcattggtcca

SEQ ID NO: 24684 - DNA, 254 bp, Glycine max
gctttattatggttgttgtcatgctctcatgttggtatcactgtctaatttactaattttacatgatggtagtgtttgaataatttgaataatgctatcaaagcttataaacaatatgatgacttgttaatttaatggaaaaggatcaatggaagaatattcatgtttgttcttggcagcaatatcatgagatttccaatctatacactactatttagtgtacgatgcatataagatgtcggatagaaatactg

SEQ ID NO: 24685 - DNA, 466 bp, Glycine max
attgaatgtttcttcaattggcaagctcattttttttttcattttcattttgttttatagttttggttttaatgtgcctaaatcatgatctttataagatatccaattttttatggctaatatttttgtgcaaatgatcatatattttgggaattcaagtaagttttgagctgttgagtggttgtagttgtgggtacaagtggtacaggcattgttacaaggttattcaatgtaaggtaacaatgatcgaagaattgtccatcagaaatttctgaggtttgacttgatgacactgaaggtgaattgattgtaccaatttcaggtaataatctgtgagcatgattgttctaattctctgaaggtttcttgctgttatcctgataggtttgtgagttctgtacttctttggcatatctgcaactaatatgatggtgtctactagtatatatgttctcagctaatctga

SEQ ID NO: 24686 - DNA, 885 bp, Glycine max
caccaagtacaatggcaatgttacagtgcttcctgctccaacttctcaatctcctcaagagggaggtgtcttgtccaccgcaggtccaacaccacttgtgactcaagctgctgggctgatgcaaagctcaatagctgttactcaacagcctgtccctgtcttccgacctagtggggtgcatatatcccattaccctcctaactacattccttatagtccctatttttcaccattttatgtctcacctccagcaatccatcaatttatgggtaatggtgcatttcctcaacaaccacaggccagcactgtatatcccccacccccagctgttgctcccaccggaatgaaatatcctcttccacaattcaaacctggtgcaaatgcagcaaacccaactcaccttgtaatgccaagtgcctatggtgtatatggctcctctgcagctggttacaatcataattctgcagcagctgcagggaattcaacctccaatgaggatcttggttcctctcagttcaaggaaagcaatgtgtacatcggtggacagcagagcgaaggttcagcagtgtgggtggctgcacctggccgagacattaccagtttgcccactagcacattctacaacctccctcctcagggtcagcatgtgacttttgccccaactcaggctggccatggcaactttgcgggcatgtatcaccctgcacaagcagtgacggcagcaacggttcatccactgcttcaacaatcccagacaatggctggagcagttgatatggtaggacctggaggcaacgtctatcagcagcctcagcattcacaaatcaattggccgatcaactactgaggccaggagtctttctgacagctaaaattagataattg

SEQ ID NO: 24687 - DNA, 1127 bp, Glycine max
cggttctcttggccgagtttacaaggctgatttcccaaatgggaaggtaatggctattaagaagatcgacaactcagctctgtcattacaggaggaagacaattttcttgaagctgtttctaatatgtcacgcttgcggcacccaagcattgtgacattggctggatattgtgcagagcatggccaacgacttctagtttatgagtatatagcaaatggaaatctgcatgacatgctccattttgctgaagatagcagcaaggcattgtcttggaatgcccgtgtacgcatagcacttggcacagcccgggctttagagtacctgcatgaagtgtgcttgccttctattgtacatagaaatttcaaatctgcaaatatattactcgatgaggagctcaatcctcacctgtctgactgcggtttagctgctttgacaccaaacactgagcgacaggtatcaactcagatggtcggttcattcggttatagtgctcctgagtttgcattatcaggagtatacactgtaaaaagtgatgtttacagctttggggtggttatgctggaactattgactggtcggaagccacttgacagtttgcgggttcgatcggagcagtcacttgtgaggtgggctacaccccaactccatgatatagatgccttggccaaaatggttgatcctactttgaacggcatgtatcctgcaaagtcactgtcacgctttgctgatatcattgccctctgtgttcagccggaacccgaatttcgacctccgatgtctgaggtggtgcaagcattggttcggttagtgcaaagagcaagtgtggttaaaagacgacccagtgaagaatctggttttggtcacaagaccccagaccatgaggccatggacatgccattttaaatgttagtgcctttaagtgatcttttacaattttgtgcagtagcccggctaaaaaaattactactacagaacccaggaaggaaggagtagaaaagtttgtgaaaatgtatcatcaatcaaacaaattacgtgttggaatttttcacaccccatttaatactctggaaaataagctgtatattttaattaacttgcaatgctgtaatataatgtaatttaattg

SEQ ID NO: 24688 - DNA, 449 bp, Glycine max
cagccggaacccgaatttcgacctccgatgtctgaggtggtgcaagcattggttcggttagtgcaaagagcaagtgtggttaaaagacgaccaagtgaggaatctggttttggtcacaagaccccagaccatgatgccatggacatgtcattttaaatgtcatagtgcctctagtgatcttttgcaattttgtgcagtttcccggctaaaaaattactactacaaaaaccctggaagtaaggagtagaaaagtttgtgaaaatgtatcatcaatcaaaaacaaattctagatactaattacgcgttggaatttttcacacaccatttaacactatggaaaataagctgtatattttaattgatttgccatgctgtaatataatgtaatttaattgaaagtccattactattactaccactattattaatattatttcttgccttgatgc

SEQ ID NO: 24689 - DNA, 275 bp, Glycine max
tatcccactatggaaccaaagtgggcaacttcattgctggatcgtgtgatcggcatggttgagagagataaaaatcacacatgtattatctcctggtctttagggaatgaatctggatttggaacaaatcattttgctttagctggttggattcggggaagagattcatctcgggtattgcattatgaaggaggtggatccaggactccgtgcactgatattgtgtgtcctatgtatatgcgtgtttgggacatggtgaaaatagccaatgatcc

SEQ ID NO: 24690 - DNA, 422 bp, Glycine max
gaatagatataggtgttgtgactcctaagatcaaaatcgccctttcccgaagcagagaacgccgcaagagacattctcaaaatcatgctgaaccacaaatgtctatacattctgttggcttactattggaagctgtattcctaaaagcaaaatctttgcaggttcttgaaaggtttaaagaggctgcccaatcttgcaaagttattctggatatagtggagtcttcattgcctgaaggcatgcctgataactttggtgctgaatgtaaattgcaggagaccctcaacaaggcagttgagctgcttccagaattatggaaacttgctgattgtccacgtgaagctattttgtcttaccgagagcactccttcatcattggaatcttgatgcagagactatagcaaagattcagaaagaattcg

SEQ ID NO: 24691 - DNA, 366 bp, Glycine max
ggaagatccagtgcatgctgttaagaaatcatgtaaagccacggatgatgagattgtagaaaacatagctgattcacgtggaggatcaacagctgttgcagcaatactagttaatggagtaaagctactggtagccaacattggtgattctcgagcagtatcgtgcaaaaatggtcgagcaaaaccacttactgtggatcatgaaccagagaaggaaaaagatcttattgagagtagaggaggttttgtgtctaagaagccagggaatgttcccagagtggatggccaattagaaatgacacgagatttggagatggaaaactgaaggagcacattacggcagaaccagatgtgacgattcggaag

SEQ ID NO: 24692 - DNA, 569 bp, Glycine max
ggaaaggctggcacagattgagagggctgagaggagaattgaaaatttggggagggagaaagataatctggaagctgaattacagagagtaagggattcggagaaggatgcacttaccagagctgtgaaactagaggagaaggtgcaacagagagagaaggatttagaagcccttttggacaaagataagacacacaggcgaaatagtgcccagattcttgaacagcttctggaaacagaacgtgaagcacatgcacaggcaaataaccgggcggaggctctctctctacagttacaatctgcacaagccaaaattgattctctccatcaagaactgactaaatttcgactgaatgaaactgcattggacagtaaactaaacactgcttcccatggtaaacgaatgagggtagatgacaacattggtgatgacatggatgtaagcccgagaattgtaaagggaaccaagagaacaaggagtacatacacacaaccagaagatggtgttccatctttgagggtgctgaagaaaatcttagtcagcgaacaagtgaggatgattatagaaa

SEQ ID NO: 24693 - DNA, 799 bp, Glycine max
tttactgagggtaaagacgagaggggtatctggcttcaacagctcacgtatggtgtttttggcttaggtaaccggcaatatgaacattttaataagataggtaaaatagttgatgaagaacttagtgagcaaggtgcaaagcgtcttgttccattgggactaggtgatgacgatcaatccattgaggatgattttgttgcttggaaggaatctctatggtctgagttggatcagttgctccgggatgaggatgatgtaaatactgtatctactccttataaggctgctattcctgaatatcgagtggttattcatgattccaccgtcacatcttgcaatgataatcacttaaatgtggcaaatggtaatgctgtgtttgatattcaccatccttgcagggttaatattgccgctcaaagagaacttcacaaacctgagtctgatcgttcttgcatacatttggagtttgacatatccgggactggcataatatatgaaactggtgaccatgtgggtgtttttgctgaaaacggcgatgaaactgttgaagaagctggaaagttgctgggtcaggatttagatttggtattttccattcacactaataatgaggatggtactcctctaggaagttctctgccacctccttttcctggcccttgcacactgcgctttgctttggcacattatgcagatctcttgaatcccccacgcaagctgtgcttctcgttcaggcttctttagtggctctggctgcacatacttcggaacccagtgaagcagatagattaacattcct

SEQ ID NO: 24694 - DNA, 382 bp, Glycine max
tgtttctattcaacctgaagttggattcaatacttttgcttctcggccatcaatgcctgttaaggtttcacagtatagtaatttgacggtgggaaatggtggcagtggctctcaattttcgcaacctgatttgattcatggaacgacggctgtcccaccagtctcagctcgccctctgttgaatcatgtacaatttccaaagcagcagggatggaacaattggtccagcaatgccggtttctgtgccccctcctgtcctaacaagtggacatcagcccttcgcacttcgaagccacattccccttctgcaacctggctttcctgtctctcgacctatttccgtccctggaccaaatggtttctatggcactaagtattagtg

SEQ ID NO: 24695 - DNA, 660 bp, Glycine max
ctgacgcgtgggttagcatcacaatattaatgtttaatgtccaatataatgaagaaaggcttgttctgtaattctctgttaatatatttactgcatttttgcctctttctgtgtcatgcaatgcaacagatgttacaaacacaaaagctttttaaatttcctaactgcattgatactccataaattttctcaattgggtttgcagaatctttttgtgatacatagtaggagaggtggaagcattcaaaagatgtatcatagtgaatggttggatactattgactcggaacctgatgtaatatcaatgcttcttctccctctgacatccctttggaatagaagcggcagaaatggatttgtgagccatgccataaatctctatcaccgttacaaacctccaattgaagaccttcatcaatttttggagtttcagctaccaagacattgggcacctgtagctagtgagataagccttggttctcatcataagcatcaagtgaacacctggatacgatttagtatcttgggtcccaggctttacataaatacaattccagtggatgtaggtaatagaccagtggttgggctaagattacaattggaagggagaagcagcaatcggttggccattcatctgcagcatctggcttctctacccaa

SEQ ID NO: 24696 - DNA, 525 bp, Glycine max
atgtaatatcattgttccttctccctctgacatccctttagattacttcctcccctggtcctactagtattcagcaacttttgaagcacacagctaatatgaagttcaaggattctgcagacaatcattgcctggcttctgaagacttatgtaaccaaaaagagaatctttttatggtacatagtaggagcggaggaagcaatcagaagatgtatcataatgaatggttggatactattgacttggaacctgatgtaatatcattgttccttctccctctgacatcccttttgacaagtatccgcgggagtggatttgtgagccatgccataaatctgtatctccgttctaccaagacaatgggcacctgtacttagtgagattcgtcttggttcccgttggaagcatcaagtgaacacctggctaaaatttagtatcttgggtcccaagctttacataaatacaattccagtagatgtaggtaatagaccagtagttgggctaagattacaattggaagggaga

SEQ ID NO: 24697 - DNA, 501 bp, Glycine max
gggtgaactccttgatcatgtcaaagaagcagtgccatcatcatgggatcctgaggccttggcaaggtttatagaacgttttggaactcatgtcatagttggggtgagcatgggagggaaggatgtgctatatcttagacaaggggatacatcatatcttggtcctactagtattcagaaacttttgaaggacacagctaatatgaagttcaaggattctgcagacaatcattgcctggcttctgaagacttatgtaaccaaaaagagaatctttttatggtacatagtaggaggggaggaagcaatcaaaagatgtatcataatgaatggttggatactattgacttggaacctgatgtaatatcattgttccttctccctctgacatcccttttgacaagtatccgcgggagtggatttgtgagccatgccataaatctgtatctccgttacaaaccttcaattgaagaccttcatcaattttgtgagtttcagctacc

SEQ ID NO: 24698 - DNA, 786 bp, Glycine max
gcgcacgcaagctcggaacctaagctcgaatcgagccgttcacgaacaagaactctactattactactaatcaacaacaatctctcttaactccaaacagaacacactagcgagaaaaaaagtgataagcccaaaaactctgcgttctctcacaaattaaacagcgtcactatcgcatagtgggctcgatcagtgattgagttttgcggtgtactgtgttgcgaagtctgtgtatcggatttgtggacatgggtgcttatgatcaagtttctcttaagccattggattcttctagaaagaggaaaagtaggagcagagggtatgggactagatccgtggctgagactattgcaaagtggaaggaatacaacgaacacctttattctggcaaagatgatagtagaacaactccaaaggcaccggctaaaggttcgaagaaagggtgcatgaaagggaagggaggacctcaaaattctcagtgtaactacagaggagttaggcagaggacatgggggaaatgggttggtgagattagggaacccaatagaggaagcaggctttggttgggtaccttctcttctgcccaggaagctgctcttgcctatgatgaagctgctagagctatgtatggtccttgtgcacgcctcaattttcccaaaatcacagattatccttctgttaaggaatcgttgaaggactcttcgatggatgcatcgtcgtcttgttcttcggcagcaactgcagcatctgacactactactacaacatcgaaccaatcggaggttt

SEQ ID NO: 24699 - DNA, 267 bp, Glycine max
atttacttcagtccaaactgaacacactaaccagaaataaaaccgataagccgaaaaacattgagttctctctcaaattcaacaccttcagtatcgccatagattctgaattcacagatttagtttctttgagtactgtgtggcgaagtttgtgtcttggattttgtggacatgggtgcttatgatcaagtttctcttaagccattggattcttctagaaagaggaaaagtaggagcagaggggatgggtccaaatctgtggctgag

SEQ ID NO: 24700 - DNA, 550 bp, Glycine max
tgaatttgagagacgccggataacaaaggaagatgtacgagagcttatataccgagagactttggagtaccatccgaagatgttgaaggaatttctagaaggagcagagccaacaggtttcatgtatccaagtgctgtggatcacttcaagaaacaatttgcatatcttgaggagcattacggcaaagggggaactgttgctccgcctgagaggcaacatgcatcattaccgagaccttgtgtgttgtattcagaccactcaatgcagaacacatctgaggttgcagatgatctatccaaatgttgcatcaaagaagttgagaaacaacccatagaaaggagtagtgctatccctatgtctaggcttcctttacaagctcctcaaaatattcaaggtgtgatgactgatcgtattgcttcaggtgttgctgcgcggcccggaaaagttgtaggttcaatattgcattacaacaactgtggggcagcagttacagctgatgctgagcagcggaggatgggtagaaatccatctgtttcagcccagtatgct

SEQ ID NO: 24701 - DNA, 528 bp, Glycine max
gctatttgactcagatgaaagggagaataaatctgattcagatgaaaatgaaaagaagtctggtgatgcaagtgaaacaacagataagactgaagaaaaagtggaacaaagtggtaaccaagagtctgatgaaaactccaatgagaagaaaacagatgacaatgccaacagtcagggttcaaatgaggtttacccttccgtggctcagtcagagcttctgaatgaaagtaccactcaaaatggttcttttacaactcaggcggcagagtcaaagaatgaaaaggagtctcaagtatcctccaagcaatctactaattggaaactgtgtaatgtcactgctggccctgattacatcccatgcctcgacaacttgaaagcaattaggagtcttccaagtaccaaacactatgaacacagagaaaggcaatgtcctaaagaatctcctacctgccttgtccctcttcctgaaggatacaaacgccgattgaatggcccaaaagcagagagaagatatggtattctaatgtt

SEQ ID NO: 24702 - DNA, 454 bp, Glycine max
gaaaaattgaaggaaaagtgaatggttgttgcgtttgtgaggttaccttgaggcggtggcagagagtgagaaaatcgatgaccgacgaagaagaagaagcggataacccaacggaggcatcacgagaagcgtgtttgttattgatgggttcgccgaagccgtccgaacctggaggctgcgaccgaaccgagacgtcgagcctgagggtcggagcagcgtcgcggaagaagaagattgagggcgcgagaaccgagcgagaaggcgaagcgcgatgcagcgattgcatgcaacaacgtgaagctgctgaataatgaataatcgccattttttttcttctttttcttttttttttaaaaaatcttttgtaatatttgatgttgttggagagagagagatcgaaggcgacggaaataattaggacaatgcttaggagtgtgtttggtttcgtcgcgag

SEQ ID NO: 24703 - DNA, 274 bp, Glycine max
ctcaggcattcgcatcgacacctcatctctgccattcgattcaacaacagcactcccgactcgcaaatccgagaaattattgttctctttggatgatctgaaagaagcgctgcggagaaggggtcccgatagttttggcgccaagaaagttcttcttcaattattaggtcaaaacggtgtctcttccttcacggtggaggaagacggcgatgcagcagacggtgctatcgaaaccgcgaaacttcatttcttcggtgccacactgcagctccgg

SEQ ID NO: 24704 - DNA, 406 bp, Glycine max
gtttcagaatcgcacccaacccaaccccgttttttctcttcactcacttgtcttgtgttgcattccttaattaccatagctcaactccttcccccaagccttctggcatctccatgatgacacaagattcatcagaggtgttggaaaaacatgcaagctcaggctctgttgtgagggggagtagtgaatatattagactggtcatatccgatgaaccaaagggcggttgaagctgaaaccttgctgcctcgagcagaatcaagaatcaagtctttctggtggtggatgaaatcctttttatggtgtgttatctttgtgttccttgcttttattcttgagaaatggggagtgtcacttttttttgaaaaggttctttacccaatcatggaatgggaagctactgcct

SEQ ID NO: 24705 - DNA, 400 bp, Glycine max
ctttttcctttggctcttcaactttttactggtcctaccaagcagaagccattccttgaggcatggggggattatcttagtgatgaaaaatgctttgaagatgctgcggcaatttatatgtcctgtttcaatctggataaggctctgaagtcttatcgtgctattaataactggagtggggtgcttacggttgctgggttccttaatttgggaaaggatgagctactacatcttgccagtgagctctgtgaagaacttcaagcactaggtaaacctggggaggctgccaaaattgccctggagtactgtggagatgttaacaccggtgtgaatttgttgttactgcaagggactgggaggaggctttgagggttgtttttatgcatagaagagaggactt

SEQ ID NO: 24706 - DNA, 408 bp, Glycine max
tcgctttcgcgtgggaaattttgagctacaatcaagtgatgatgaggccccaaaagaagaggaagaattggcattacaaatacaaagggagaaggcaaaatccttaacaatggaagactacgaccttgtggatataagtgaagacaaagataatgagaaattaactttgaaggatgcatcagataaaggaagcgaagcaataaagtcactggatagagatataaatttcagtgttgatgaactgaatgctttgtcaaaggaggagcaaatgaatgttttatatagatctgctccagaattagttgattggttgtcagaactaaatgaggcacacagacaactcgaatgtgaaattaacccatttttaagcaaggttaaaaagggggaaatagttatgaaaggagaagt

SEQ ID NO: 24707 - DNA, 710 bp, Glycine max
gaataaaactcaacttgtgtttattgataaaatggttcagcttatatagaagctttacagcaaattttagtaatgacccactaacctagaattaaaataacttaatgtcattaacctagggaattaaaaaaaacttaatggctgagtgtaactgaaattgtggcaaccaaaagtcacccccaacagccaacaagtcagccaccatttggtctcccaaaaggctgatgcctaggttgccaattgggcccttattacaacttgaactaaacctattaaagcccttttagttgattaacccaaaatatatttttggtcagccagctttacaaggattgagccattatttagacaaactaaacactctaaaattgagacaaagtggtgtcatttagtcctcctccatttgggccatgatacaactcacaaccttggactcttctccttgaaacttgggcttgtattcaaatagtatggacaacacttgttgaagagcttccttggctttccttgctctagcccttgtcataggccctccaagtccttcaagtggatccttgcccttgctcttggtcatgtcctcatcaacagatatgtgatcaaagctacaatccctatccagagcaatccttttctcaatgtcccccaaccctgcctgggtctctctaagagttggaatagaaagagagcagctgtacagtaaagaatcagca

SEQ ID NO: 24708 - DNA, 594 bp, Glycine max
atttttttcgtgtgttataggaactacgcccgaactcattaattaggcagcatggcagaacgaagggttttcactctctcacaggttgcccaacataaatccaacaaagactgttggctggtgatcaatggcagagtgttggacgtgacaaagttcttggaggaacacccgggaggagaagaggtgattctagaggtagctgggaaggatgcgaccaaagagtttgacgttattggacacagcaaagcagcacaaaatatggtcctaaagtaccaagtgggtgtcctccaaggtgccacagttcaagaggtagacttgaaggatgttgtggacaaggaatccaacaccaaagagatgagtgccttcgtgatcaaagagggtgcaaggtctaagtcccttgctttttacgagttctttgttccacttcttgtagctggtctatattttggttaccgatgcctcacttattagctcatcttataattgagactcgctgtctgaatgtttattgtatatttatattcgcttttaattgagacttgagtgtgtgattgttctactcattttctactttccaatacactttcaccgctt

SEQ ID NO: 24709 - DNA, 647 bp, Glycine max
agcagaatggtctccacatgctgataaggcactgaacagtgaatatcatttattatactttggcctacaatgatctcttgtgagaaaatggttaagaaatttctagtatgaaaaagggccgggaggtgtttggtgtgatgtggatgttgtggagttctcctattatggtgcacctgcacaaactcctaaagaacaattatatacggagcttgctgatggcttaaggggaagtgattcatgtgttggctctggttctcaggttgcaagccaagagacatatggaaccttgggtgctattgtcagaagccgaacaggaaatcgagaagttggctttctaacaaatcgacatgtagctgttgatttagactatccaaaccagaagatgtttcacccattaccacccagccttggacctggtgtgtatcttggtgcagttgagagagcaacatcatttattactgatgatctttggtacggaatttttgcaggaacaaacccagaaacatttgtgcgagctgatggggcattcatcccatttgcagaagatttcaatatgaacaatgtaatcacaactgtaaaaggtgtaggggagatcagtgatgtgaacatcatagatttgcagtctccaatcaacagtctcattggaa

SEQ ID NO: 24710 - DNA, 253 bp, Glycine max
cgagtggcgaaaacgcgactgcgcccgcgagtggtggggacaagaagaacggtgctgctggggagagcggtggggttgggttttacttttggttggttttcgcattgatgattggtgtcgttgctatttgatgtgattctttttcaccgttttaccttttaccccctggagcagggtcattcaataatttttactgtactgggacatttggatttttttttaatatttgttgtattgtaggtttttttttttt

SEQ ID NO: 24711 - DNA, 641 bp, Glycine max
gtagtagagcactgaattggatatgtgtctatcacctaatctaagtcatcgtgtggtggtggttttggtcggtggcaaagagagaagaaacaaagcctgttcttcttaccatgtcggatcatcttccgcgcgaagtgctaaccgaaatcctctcccggttaccggtcagatccctactgagattccggtcaacgtccaagtcatggaagtccttaatcgacagccagcacttgaactggcttcatctgactagatccctgaccttagcctccaacacgagcctcatcctccgtgtggactccgatctataccagaccaatttcccaaccctagaccctcccgtatcccttaaccaccctctcatgtgctacagcaacagcataaccctcctcggttcctgcaacggccttctctgtatatccaacgtcgccgacgacatcgccttttggaacccctccctccgccagcaccgtattcttccctctttgcccctcccccgccgccgcctccaccccgacaccactctcttcgccgcccgcgtctacggcttcggcttcgaccatacaagtcccgactacaagctcgtccgcatctcttacttcgtcgacttgcaggaccgctccttcgactcccaggtcaag

SEQ ID NO: 24712 - DNA, 565 bp, Glycine max
gttctgcaaacaacatgctctttactcaccatgtatctgatgcaaataaactcatcaaggacttaactgatttggagttcagatctggggcctcaccaattgagagtcaaaaacttattgcacattatatgtcagccttggatgctgaagttacttttcacaagttttaccctcaatttgatcagttccatccactgcacttctttaccagtcccaattcaggtataatctcagaaaatgcaacttgttcttcgtttggaatcaacactgttggaattatcagggcaccatgcggggatggcaaggaagctagtgtcttggtaacgccttacaatccaaataaagttggtctgggtgaggctttttccttgggcattgcttactcagtgttctcactgctttcacgtgttacttggctggcaaaagatattgtatggcttgtggctgattcacaatatggagaatattctggagtggctgcttggctaagagcatatcaggccccttctatccagagacttgacatagttaatagtgaaacatgtaatgggagcagcatttttaa

SEQ ID NO: 24713 - DNA, 262 bp, Glycine max
gcactcttatcctctcaatttgaaatgcctattaccaacaacacttctcacactatgaccaacaacaggttttccggaatgatagaaacagtagcaatgtgtaagcaactttgttttggcggttctgcacttggactattcacgaaaattatcaagaaagttctatttgctctatttacttgcattctggcactaggagggtcaatagtaggaacaattgcaggaggcatcaaagggcagaccacagaagctggttttcttg

SEQ ID NO: 24714 - DNA, 295 bp, Glycine max
gtgagttagtagcagtcaccggcggcggatagacatgaccggagaagagatttccggccccgccggccccaagctcctccgtctcgtttccttcgtcggcgccgcagtgatctgcaccgccgcaatcaacaagtatcgcgaatacgagaggaacaccatcatcaagcaacagcaacagcaagtggtggagacacgtaattcgtcggaatctgttgccgttcccaaaactctcaaataaaaaaggttagggttttttataattattattgttgttgctatccgcaatgtttggagc

SEQ ID NO: 24715 - DNA, 521 bp, Glycine max
ccctctcgtccgcggacgcgtggcccggtaggatcatgctgagtgggttcgtggtgtacaaggtatacagagccctaacccacggcctatcgccgttaatccgcctccacctgcgctggcggcgcttcctcggcctggagcacccgctccggtggctggagcgcctcggcctcccctctcagccccggcacgcgggtccactcctctggttccacgccgtttccttaggcgaaggaatgatcgccgttcccgtcatcaaacactgcattcggcgaatgcctcacttgaacgtgctcatgaccatcaccaccatgtcctcgtttgaagtattgagcaagttgcttccgagtggaatcattttacagttttcaccagttgacacccctacttgcatccattctttccttgattactggaaaccacatgctattgtgctgatggaaagtgaactctggccaaatcttatcatggatgcttgcatacatggtatagcactggcactcttaagtgctcggatgcct

SEQ ID NO: 24716 - DNA, 331 bp, Glycine max
cttagaagcagatgaaggaagagatcctggtagcaatggttcgcgtctataatgcgccttcctataatggttcatctgctcctacaacttcacaaccacttgcagatttggcatttccaagtactggcatatctggtcaagctcctgcttctagcttggcaattgatgatctgcttggtttagattttccagttgagactgcagccatgccttcacctcctccattgaacctaaacccaaaagctgtactggatcctggcgcatttcagcagaaatggcgtcaactgccaatatccttatctgaggaatattctctaagtcctcaaggagt

SEQ ID NO: 24717 - DNA, 247 bp, Glycine max
gcagaagtttcttccagacaatttcacaattattttattccattatgatgccaatatggatggatggtgggatcttaattggactagcaaggccatacacataactgctcaaaaccaaacaaagtggtggtttgcaaaaagatttctacatccagatatagtttctatttatgattatatctttctctgggatgaggatttaggggtggaacatttttctccatcaagatacattgaaattgtgaag

SEQ ID NO: 24718 - DNA, 259 bp, Glycine max
gtgctttcactgtttgaaactttgaatctgaatcacccatgtgaaagggattattattattagtatttcgttattctcattccattaatcccactacctcggcacttgaaattgaatcaattaaattaataaagtcgtcaggtttcggatgaagtgatgctgcagctgtggtcaaattctgtcactttataatctcatttagtaatatttattgcaattaattaataccgagccccatcatttaatttgagctcaagtg

SEQ ID NO: 24719 - DNA, 987 bp, Glycine max
ggatccaaaccaaaacaaaatccctttaaaaccctagtctcgcaatttcgaaatttatcactcactcagtcactctcatcatccactcatcttattctcaggccagaaaagagaagaagaaatggtgttaggcgtgagagagataagctgtagcggagagcctgtccttgacagtgataacggggaggagttgatgcaggtgcaaccgggcatagacatagtcctcggcgatcttcctcgccagtcccccggcacgctctatatcactaacaagcaagtaatatgggtgagtgatgtagacaagactaaaggatatgccgttgatttcttgtgtatatctctccatgcagtctctagagaccctgaagcctaccctcttccttgtttatatacccagattgatacaggagaagctgatgatgaccactctgattctgaatccattcatatcccacaagatttgtcccacatcgcagagatgaggctcattccctctgatcctactcaattggattctctctttgcaatattctgccagtgtgcagagcttaatccagaaccaaatgatggggaaggagaagaacatggttggttttttagtgctgatcagatgggagatgaagaagcagaggaagaaggttatatctctcaccatccagccaactctattggtcactcaaatggaaatcatgacctagctcgtacaatacttgaggttgggtgttcttccttgtacttctctatctacttctgtttttgcagtatgattctctgacacagggatgtagctcttctaataaaatgagagaataaggactttcgtttgaattaaagcattttgtaagcataatctgccaatcacaattatttggcattgtgcgtcaaacttttgtacttacgccccttaataacattctacagaatacgaaattaaacaatccaatggttaaatcatttgatattatctttgtgatcatgtatatcaaa

SEQ ID NO: 24720 - DNA, 1437 bp, Glycine max
cggctcgagaccacctagtatctctctaactttgagaaagtgtgtgttgtgtgttctcttctctcactaaaaaaggtttcattaattctatattatggctcagaccacagcgaatcacacagtgaccgtatctgggtgggcagctcatgattcttcgggcaagattaccccctacactttcaaaagaagggagaatggtgtgaacgatgtgacaataaagatactgtattgtgggatctgccacacggacctccactatgcaaaaaatgaatggggcattactatgtatcctgtagtacccggacacgagatcattggggtggtaactaaggtggggagagacgtgaaggggttcaaggaaggagacagagtgggtgtggggtgtttggcggcttcatgtttggaatgtgagcactgcaagaccgatcaggaaaattactgtgaaaagttgcaatttgtctacaacggagtattctgggatggcagcatcacctatgggggctactctcaaatttttgtcgcagattacagatatgtggtacacattccggaaaacctagcaatggatgcagcggctcctctgctatgcgcaggaataacagtgttcaatcctttgaaagaccacgatttggtagcatcaccgggaaagaagattggggtggttggtctgggaggccttgggcacattgccgttaaatttggcaaggcttttggccaccatgttaccgtcatcagcacttctccctccaaggaggctgaagctaagcagcgtttgggtgctgatgatttcattgtcagctccaaccctaaacaattacaggctgcaaggagaagcatagatttcatattggacactgtttcggcagagcactctctgttgcccatcttggaattgctcaaagtcaacgggaccttatttctcgtgggtgcaccagacaagcccttacaattgcctgctttcccattgatatttggcaagagatcagtgaaaggtgggatcatagggggaataaaagagacgcaggaaatgttggaggtttgtgcaaagtacaatataacgagtgacattgaattaatcacaccagacagaatcaacgaggctatggagcgccttgctaagaatgatgtgcgctaccgtttcgtcattgatattgctaatgctgccgcttccaacaactaaactagccttcaattcggatcaaattttacttgtttcgatatttactgtttaatagacccgtgattttacctctgcaattggacgaataagtcatatatttatgtcaatgactttttacttgttaaactgatctatcgtttaagtctgaattaattttttaagcttttagagaaaaaaattataatttaaacatttgtatgtttggtactctcgttttatttaataaaatgaatcaatctaaatgtatttataatatt

SEQ ID NO: 24721 - DNA, 255 bp, Glycine max
gaaactaaagaagatggtaacgaaaaacaaaagggaaaagagaaaaggaggtttatttgtttttccacttcattcgagggtcacaggagcaccatattcctatgtttggatgtccatggcacaagaacatgggtggcgtgttttgcttgatgtgtgtgggctcaaacctaaggaaatgggcaccttgggtatgtcactttttaagcctgatttcatggtttgctcgttctacaaggtttttggagaaaacccttc

SEQ ID NO: 24722 - DNA, 264 bp, Glycine max
gacgtatttgaaaccttaaaacctgtggaatcattaaatacaaatgttacaaataaccaacaaaaattggtacattgttgcaatttaaagaaagactaatttgggggaaatagttaatttaatccttaaattaaagtttagttgttaactaccatcagcatataaattaagatataaggtagagatgccaaattaccgtaagtagatggattgttgatcaagtcaagaactaacgggtaagtgtctgcaaatatgaattttgca

SEQ ID NO: 24723 - DNA, 436 bp, Glycine max
acagaatgaaattttgcttggatgcttctccaaaacgaaaggttacttctagagagttcaggagaggtacattttctccatgcagatgggattcaaatcagatctgggaactgaactccaatgggaccatggtaaatagtactccggtctttgtgcaactgtagagtatgttgaagcaaatgttaattctggtgggattcgctcttggatcgcaacaggaagaacaggggaaatctatcttgctttcttcaatctaagcgaacagaagacggagatatatgcaaagacatcatatctggctaaggttcttcctgacaaaagcatcacttcatgcaagggcgaggaagtgtggagtggaacagatgtaataacgccgcaagggacgatatcaatgaacgtggaaattcatggatgtgcactatttgttctaaattgc

SEQ ID NO: 24724 - DNA, 263 bp, Glycine max
gaagaaggataaggagaacagcgaggtggcctcttcggatgaggagaaaactgagaagaagaagaacaagaataagattgaagatggttcgccggagttagacaagtctgagaagaaaaagaaaaagaagaaagacaaagctgctgccgctgctgctgaaattagcaatggaaaggtggatgacagtaatgctgataagagtgaaaagaaggaggattaggaaaagggaaaccaagatgcttaaggaagaatagaggaaggca

SEQ ID NO: 24725 - DNA, 569 bp, Glycine max
gaaatctttcataaagaaaaaacgtggttatggctgtggccaccatatgattgtgcatatttaagccaaagctagaagaagtattatagagtgtgtgagaaaataatggacaacatttggattgtgtttgtgacagtgtttctcttatgcactgtgatcctctacaggaacaggcttagccttatgcttaaatcaaaacgtaagaagaataagcttccattaggcactcttggatggccttttatcggtgaaaccattgagtttgtttcttgtgcctactctgatcgccctgagagcttcatggacaagcgacgccgcatgtatggcaaggtgttcaagtcacacatatttggaagccctacaattgcttcaactgatgctagtgtgaataagtttatacttcaaagtgatgcaaaagtttttgttccttcttatcccaagtctcttactgagttgatgggagagtcttctattttgctcatcaatggaagccttcagaggagaatacatggactcattggagctttcttcaagtctcaacagctaaaggctcagatcaccagagatat

SEQ ID NO: 24726 - DNA, 337 bp, Glycine max
cacgttgattgattatggtcttctaatgcctcatcatagtctatctgtcttccgtttctattctcttctcatctcactattttattcattctctttccttcatccagctcactctcttccgtttctttccctataaaattaactccttaccttcctccaatatttctcttaatcatacttaacgtgcactcaaccacattcatcacaactcacacccttcataagctttgtgttttttcgtagaaacaaagatctgatcatgacgatgatgagcagcagcaacaacaacgttggagaatttggagacaccactctgaccaaggtttttgttgggggc

SEQ ID NO: 24727 - DNA, 256 bp, Glycine max
gggactgtatttatgcattggaggaagaggatgaagacggaatcatcgccggcgggatcggagaagacggcggtggagccgcgggtttgatttgacttctctgtgtagagcgtatcatattcaccagactttagggttagaggatcggtttaagcagtattattttgagaacaggaagcttcagttgacttcggattttcaggtttcgtcgatgactccttttctggagtctcatcaaacgttctttgcgcagatt

SEQ ID NO: 24728 - DNA, 435 bp, Glycine max
acgaagacgacagaagggtagaaaagataggtaattgttattccaagccagaacttcacaaggaggaaaagtttgttgacttgatcctcttagactctgtcttcataatggagctgtttttgagaaaagcaaacaaatctgaacggaagaatgatcacatgttcaccacatcatgggtgtgcaagatgactcaacgcgatttgtcactacttgaaaatcagattcccatgtttgtgttggaggaattgcacacaagggtcatccttggagacaatgacacaaaagataacagtgtcaaatttgttcagcttgcctttaactactttgaagattatttttcacacaagccaagttttaaagtggagatgatcaagaattgtaaatcttgcaaacactttactgatttgatcagattcacctcacttgcctacaaag

SEQ ID NO: 24729 - DNA, 338 bp, Glycine max
aaagtgcacaacacccaacgcaccatccaacggtttgaggagtgcagggacaccgtaaagaaccgtgcgctgggcagcaccaagaaaaaccccaggtgcgcaccgacggcaacgaactcttgcggttccactgcaccaccttaacgtgcgcactgggtgcacgtggctcttcctccctctgcgcctccgtacccggctgcagcgtctgcaccatcatcaggcacggtttccaaggcgggtgcggcggcggtggagaccacgcgagggcgaagggcgtgagaaccaccgccagcagcggtcgggcccacgactctgtggtgtgcggtgacgccacgcgc

SEQ ID NO: 24730 - DNA, 398 bp, Glycine max
gatctagcggctagggtaagagctttggcgagggaaaaaaaaagacgagaaattcacaagactacataccgaaaaaccctatttattgattcagagagggcagagcggacgccgatagagaggagctgccaacagagagcattgaggttccgcacaccacagcgagcaattgaccttcactgcttcaattttacaccctctctctgtttggtgatggattttgaatcaaattatgatattgctgcctctgccaacttcattcacactcacaacttcatcaaagttgctttacaatttccagataatctcctaaaacattcaactagagtggtcactgctctgcgcaacacacttcaatccacggaggtaggattgtttgtgatggccgacacggccta

SEQ ID NO: 24731 - DNA, 252 bp, Glycine max
ccaaggtagatgcaaataatagcatcaagcagcaaagttatttgcctcctgattcactcatgacatggtatcttgctcttgagactggcaatttctggtttcctgctcaggtctataaccgtgagaatggccatgttggatttatgttgtcatgctatgatgctgagcttagctatgatcctcacactgacaccttccaggccagatatccaccacatggaagaagggcagttgcagtagagcatggcattc

SEQ ID NO: 24732 - DNA, 277 bp, Glycine max
ggggagccggctcaccttcggctcagacttccgggtggggcatcgactgccacgtggcggccggctccgccgggtcggggtgctccgccttcttcgggccgcggctcggggtttccgcgccgtcgatcgaggtctacgtcgccggctgctgctccggcgtgccggtgattctgagcaagacgattcagttgagtccgaggaggagagtgccgcggcacgccacgctggatctatacctgaagatgaagagatgatggtgttggagaagaaccgtgtc

SEQ ID NO: 24733 - DNA, 265 bp, Glycine max
gttttcaacaatagaaggacatatgaaaatggcctatttccatagtacctgctttctggtttttatgcttatcgcatcactgttggtccccggcagaggcggtgactacggtcccgaagaagaaaaacttctatcaaaaactataggcattcaaggcattgtctattgcaaatctgcctctaaactcaccccacttgaaggggccttgacaaggatagcatgcgaggctgttgatgaatatgggtttgaaacgacaccgttttct

SEQ ID NO: 24734 - DNA, 616 bp, Glycine max
aaatttgaacagaaaggtttcactggcggcctaaactactatcgcgctatggacctaacctgggagctcacagcagcatggactggagtacagattaaggtaccagtcaagtttattgtgggagaccttgacattacatacaacactccaggtgttaaggagtatatacataatggtggctttaagagagacgtaccattcttgcaagaattggttgtgatggaaggagtagctcactttataaatcaggaaaggccccaagagatcagcgcgcatatatacgacttcatcaagaaattctaatccacgttattatccttcagaagtataccgtgcacaagtcattaataattcctgtaatcctgacttggatgcactgtttctcaagcttgtatcaatgtcatctacacaacttctggcgtaatgccaaggtttcttttcttaatttggcttgtataaaaataaaaatatttagtgcatttaactatggggacgtttggcaggaaagcactttttcatgttgggaaatcaagaatcttgagaatcatatttcttggaaaaaaaaaaaaaaaaaaaaaaagcgcaaaaaaaaatgggggccccgcgccatgagcat

SEQ ID NO: 24735 - DNA, 339 bp, Glycine max
gcaatagcctcatcctcttcaactcagagagagcgaaacgaagcgtctaaggttaaaaaaaactaaaaagggaaccacaaatactaccaccagctagcagaagttcagcaacgaaggtcatatattagatggcaataacaccttttagtagtacatctgctgcacaatggggaattcatcctcagctgttactaagatccagtatcacgggcaaggttgcatcatccagccacaattctactggcagggtaagttttatggctgcaacaagttcaagctttttttctcaagattccacactactcaatgtacaatgcaccccaaacttttaatcatcgc

SEQ ID NO: 24736 - DNA, 720 bp, Glycine max
cgtacgcgttttgccttttctgctgtgaccgcatctcagtttccctgggtgaaattgttcagggagtcaagcgtggctaagatcaccgatacgccactttctcacatatctgatgctgtatataaaacatcaatcgactggattaaccaccgttctcctgaggcacttagtacctttctgatttggtctttagatagcattcttgctgacttgggtagccagcaaaatgtggccaagggttccaaaaaggccgtgcaacaagtgtcctcaaaatctcaggttgcaatgttcgttgttttagcaatggtattgcgtcggaagcctgatgctcttatatctgtattgcccacattgagggagagtacaaagtatcaagggctagataagcttccagtcattgtatggatgatagctcaggctgctgtaggagatctctcagtaggtttgtatgcttgggcacggaatctcctagccatagtgattggcaaaggtggtaacccccaatccagggatttggttttgcagctagtggaaaaaattttgtctacccccaaagcccgacctgttttagtaaacagtgctgtgagaacaggggaacgattaattcctccttccgcgtttgaaattttggtccgggttactttccctccatcttcaactagagtaaaggctactgaaagatttgaggccatatatcccactctgaaagaggtggctctt

SEQ ID NO: 24737 - DNA, 256 bp, Glycine max
caagaacgctggaggctctgctgataaagaaaggtataattgaggtgaagaaagctgaggatgatgaagatgatgaatatcaagacagtacacgtagagttgtaagatcctccatgattgctggttctgattctgattctgattaaaattaatcagctggtggcattaaaagaagaatcctctgtttatcttcttcatatccttttggatttcgggcttgtataatctttgctgcacttgtggtttgtttgctttt

SEQ ID NO: 24738 - DNA, 317 bp, Glycine max
gaaaacaacgcgatcaggggaactcctacttctaccaaagtcgtacaattttgaacaaagcacgggagcttgctgcaaagaaagatattaatgcgattgaggaactggcacaaactgaggttgagaaagctatgtcactctggaacagtgacaaatcctttagggatgactatgagaaaagacttttgccatcactggacatgcgacaattatgtagggatggacggatgaggaacccagatgaaaagccactgctggaagaaccgaaacctgccgaaactgatacattgccgaaaagcagtgtaaaacagccaaag

SEQ ID NO: 24739 - DNA, 412 bp, Glycine max
  unsure (1)..(412): unsure at all n locations
tncaatcgagcggctcgaggtgaatagaaagaaagcctcgtctagtaaacccagtttttacaaagttaacataacaaaataaatcaccaaccatgtctatcatcccaaacttgttcggtggtcgacgaagcaacgtcttcgacccagtttctctggacgtgtgggacccattggaagggtttccgttttccacagccaacgctggcgaaagtagtgccatagccaacactcgcgtggactggaaggagacaccgcaggctcacgtgttcagcgttgaccttcccgggttgaagaaggaggatgtcaaggtcgaagttgaagacggaagggtgctgcagattagtggtgagaaaaccatagaacaagaacagaaagatgataggtggcaccgcattgaaagtagcactgggaa

SEQ ID NO: 24740 - DNA, 346 bp, Glycine max
gtgaagaaatctttgatgatccatccacttttgcattgttacaggtgggtttgctttatgctcaacgggatccaccattccttcgtcccatatctaaggggatacagaggtgtctagtgagatggcttgcacagcagtggatgcagctgaattttcacaactggattcattttgtgtggcacagaatgatacgcggacgctattatcgccatttgatggtacaaagagcatgaaagtaggtcaattactgataggagatccagtttgagatattgtccctttcttggaggaaacttatatcttggagaagtaaaacacaaaatgttgtagctcgatctagtgctga

SEQ ID NO: 24741 - DNA, 627 bp, Glycine max
ataaaatctgttggaacacaggaggtgcttgtgcaggtacttgcttttgttcctctcatgtttatgtgcatctgcacgtattactccttgttcaaaattggaacattggtgttttactcattgacaccccgacaaccagctcagttagcttgcttatgatatgctctatgattgctcgatatgctccccccgatcgcatacaacttcctcaatcttattcgccttggttctgataaaacaactatatttgaacagcgaatggggaacattgataatgctgtccctttctttggagataagtttaacagaatctatccacttattatggttatatacacccttttggttgcaagcaatttctttgatagggtatttgattctcttgggagctggaagagatatgttttcgaaactgaagctgaagatatggatggttttgatccgtcagggttaattatcttgcagaaagaaagatattggcttgagcaaggaggcaatgtaggcgagcaagttgttccactagtgaggaattttaatggaattgatgttgagtctagtgacaatattatggtgaagaatggtgttgaaatgaagggaaattctgctttagttaataaagaaacagat

SEQ ID NO: 24742 - DNA, 496 bp, Glycine max
ggattatgcggctgataagttgagggaattgttctccaagtttggtgcagtggaagatgttgtcatcaaagggagtaagaagaagggttctgctcttgttgttatggccactaaagaaggagctgtttctgctactgggagtgtgattggccatcttgctaatccgttgctggttttacctcttaaaccagcaactgtggcggattcttcgagtgttccaaaatctgctgaaaccaccaggatgagtaatctggtcggtgccgggtatcaagcttttgaggattctgttctgaagaaactgcaaaaggctgcggaaaagcaaagatgagtctgtcaggatgataatcataagattcaattgtttggcatggtcatccccaattctatttattaggtactgaaattaccattgtcattaatgattcatcattagtgatcagtcaaccggagtctttgtatccagatatactaattaaggaatagtatactagagaat

SEQ ID NO: 24743 - DNA, 577 bp, Glycine max
aggagttgtgtgctgtttctgctactgggagtgtgattggccatcttgctaatccgttgctggttttacctcttaaaccagcaactgtggcggattcttcgagtgttccaaaatctgctgaaaccaccaggatgagtaatctggtcggtgccgggtatcaagcttttgaggattctgttctgaagaaactggcaaaatgctgccggaaaagcaaagatgagtctgtcaggatgataatcataagattcaattgtttggcatggtcatccccaattctatttattaggagtctacaacctctggtgatataattgaagaaaaattccttttgatgaaaaccataaactgaaaatcgaaccagtttgtgtggttttaatgtcatctgggttctgtgccaattgccaaatgctgttgggttgcaaacagagaaaaccaatactaccgtgcaagcagatggaaagtcaaagaccattgattcccacgattgtttaaaattttagtctcagtcaagttctctgtgcttgcttattagtttggaattcactctgctgctgtctgtatattgtatacagcactt

SEQ ID NO: 24744 - DNA, 565 bp, Glycine max
atggggctaagagtaatgacatggaattggacaagtacaaaggacacattcctgaagctatttgaagaaagaagagttatgaagagaagcaccaaaagaagcgtgggaagcctcgttcatggaagcttaaatcacttgagatggaggttgatgataagggaagagttgatgaagataaaatggtctcagaatatgaacaattcattcaagatctggaagaaaaccctgaaatgaggttcaacatatctttgtaccgaaataaagagtacaagccttctgatggtgatgactcttctgttccattggaggagttgctggctgatcttgatctgagtgagcacgaagatcaagaggataacatgtcggaatgaacaaaagcttcttctatcttgattagtattttaaggaattttggttttttgttcatgtcaaaggctcccccctcccatttatgttgtgtaattttgcaatctctaatggtttgtttattgaaagcctgataagatagtaattttgcaggcagtagtaccaatacttataaataactttggtgttagcattcttt

SEQ ID NO: 24745 - DNA, 663 bp, Glycine max
cgggaatcacatgaggagcaagtcattgccgtgtttgacctcaactcaaaaacagccttgtattgtattgtactcacacacgacacaaaatacacggcaacgcaactcacgctgccctcaacacaaaaactcagatttgattctctctcgcaatttcattctcccctctgcaaatcatttcccactcctttatgctcctctctcaccatttttcggttaagatttttctgatcgctgaaagagatgatgcgaagaactaatgccaatgatgccagagctgataacaacactttggatactataaacgctgctgcttttgccatagcctctgcccagaaccgcgtttctcaaccttctacccagaagaaaagatggggaagctggttgggcaaaattcgggtgttttggatataaaaaaacccgaaagcgcattgggcatgctgtcctagttccagaaccaaccaccaatggagctgatcctgctgcagctgctagttcaattcaagcacctagtataacgcttcctttcgtagcacctccctcatctcctgcatctttctttcaatcagaacctccatcaactgcacagtcaccaattgggaaagtatctcacacttgtgtgtctgcctgcatctactctcctggtgcccttctgtcgtcttc

SEQ ID NO: 24746 - DNA, 274 bp, Glycine max
ggagcaagtcattgccgtgtttgacctcaaaaatcaaaaacacgacacaaaattctcggcaacgcaactcacgctgccctcaacaacacaaaaaaactcagatttcattctcctttatgctcctctctcaccatttttccgttaaaaagattattattctgatcgctcaaagagatgcgaggcactaatgtaaatgatggaagagctgataacaacaacactttagatactataaacgctgctgcttttgccatagcctctgcccagaaccgcg

SEQ ID NO: 24747 - DNA, 240 bp, Glycine max
attggatccatcccttttgtttggaactttcttgaggggcataacagaattgttggtaatgatcccactacttcgcctaaggccatccattatactcgtggagggccatggtttgaagcttggaaaaactgtgaatttgctgatctgtggcttaacgaaatggaagattacatgaagcaagctataaaagtacaatcagcttaggcttttgtcatccgtggccatgtattattattcttt

SEQ ID NO: 24748 - DNA, 320 bp, Glycine max
attgaaagcacttgggcatatatatgttcaacttggtcaaactgacaagggccaggactttattaggaaagccacaaagattgatccccgtgatgcccaggcgtttcttgagctgggacaattgtaaattctttctgacacgggagctgcactggatgcattcaaaactgctcgtactctatttaagaagggaggtcaagaagtaccaattgaattactcaataatattggtgtgcttcagtttgaaaggggggaatttgagcttgctcaacaaacatttaaggaggcactaggtgatggtgtttggctatctttcatca

SEQ ID NO: 24749 - DNA, 182 bp, Glycine max
cccaaaaccggtggtttagatggagagatgccaagtggccatggtcatagaaacatgttaaggttactagttgcggcctttgaaaattgaaacattttacgattacctttatttctttaggattactcttttgttaattataacatgttgacaattattatacccactttaaagcttcaaaa

SEQ ID NO: 24750 - DNA, 271 bp, Glycine max
gaagcacaagaaggttaaggatactggtcagagtgtaacaaaaattttggttcacggcaaggatattgttgagaggaaaacgaaatgtgttgcctctgaagttagggacaggaacggtactgtggatgagaatacttcttcagctttgggaaaatatactccatgtaaagaaaggaaatctgaagatgagcatatttccattacgaaggatatggggctatgaagttgaaaaatatgaaagcagaagctcctgcggtgacatgtttacaat

SEQ ID NO: 24751 - DNA, 484 bp, Glycine max
gacaaagaaaataatcccattccctgaagtcacaagtgtaaggagggcaaagacggctgggctctttcccaatgccattgagattctagccggaaacaagaaggattattaatgagggatggtcgcgacatggcaatggagccatagcaattatggaacagaaggaatcaatgtcagagtccagctgccaagagaatggatttgtagctgttgaaaatgtcaaaagttcttatataactgacaacggatcactttctactgatctgagcaaagatacgacgcttacatccattgttggggatgatcctgtatcgacggcagattcagagaagcaatgcaatgtaaaacaggttgctgaacctgaactgaataatgatgccccaagtgctgcaagtgtgagttggaagtggaacgaggaggatattgatgccccatcaattcttgaagcatatacatgtgttgcagattcagtgtttccgatgaa

SEQ ID NO: 24752 - DNA, 259 bp, Glycine max
catatttggagatgagacaaagaaaagaatcccatgccctgaagtcacgagtgtaaggagggcaaagacggctgggctcttgcccaatgccattcagattcttgctggaaacaagaagtacgtcgttgcatccttcctatcccgtgatgaagctttcaggattattaatgagggatggtcgcgacagggcaatggagccatagcaattatggaacagcaggaatcaatgtctgagtccagcagccaagagaatggattt

SEQ ID NO: 24753 - DNA, 748 bp, Glycine max
tgtttttgagaatcttgttccaaaatttatcaaggtgttccccaaggagtataaacgagttttggcaagtacgaaatcgaaggaagcttccaaagatgctgcggagtctgcttctaaccatggagaggagcaagatgaaattgaattggtggaggaagatgcttttgaagagcttaagaaactggctactgcatcgataaatgggaagcctagtgaggctgaatcatccaagaggcctagtcaagtcattgatcctgttaaacacagaggttttgttgcttatgagcgggaaagtgttcagtacagggatcccaatgctcgaataaatgactggaacgaggtgatgaaggaaacaaagcctggtccacttttgaaaacccaatcagcccgttgtatggactgtggtactcctttctgtcatcaggaaaactctgggtgtcctcttggaaataaaataccagaatttaatgagttagtataccaaaataggtggcgtgaagcattagagaggcttcttgagacaaataacttcccagagtttactggtagggtatgcccagcaccttgtgaaggttcttgtgtccttggtattattgagaatcccgtatccattaaaagcattgaatgtgccatcatagacaaggcttttgaggagggttggatggtgccacgacctccagctaagagaactgggaaaagagtagccatcgttggaagtggaccatctggcttggcagctgctgatcag

SEQ ID NO: 24754 - DNA, 329 bp, Glycine max
tagaacagaagaagtgaaagcggagaggagaaagaaggatatggaagcagcgtcagagttagaccaaggtatgaaggtgttggattcgtgtttagcgaatatcaattggcgcctcaaaccttcttccaagcgtcgcttacaattagatgttctcgctctcattacaagaatgagagcggttgtaatggtagactacggtggaatcatgcctcagctccagcaccacctctcttccctcctccaactcgcactaagggattccccctctattttcgagcacatacgagttatggttatacaagacatgatttacttaatacacataaccg

SEQ ID NO: 24755 - DNA, 238 bp, Glycine max
aaggaactgaaggatccagaatatgcaacaggtaaaaagagaaaagctagcaaaacaacacctgttccggtgcctaaacgtaggcggtcttcctctgctcatggaaaattgagattatcaactagtatatcaaaggcatctcgaagagtttcaggagtagactcccctcaacccaaattaccgcttgatgaagaagttaaccctgatgcagatagcaaaaccatgcagagaaaaatgg

SEQ ID NO: 24756 - DNA, 291 bp, Glycine max
tgatggttcttccagagtagtaattccacatggttattcaaataccagatactgggtaacttttgaaatatagtccttgcgacgattgtgttgggctgatggttgtcattttagtttctatggtttttcttcttcggtagggatgattctgatggttctttatttacaacatggaagactgctttccagagtagtaattccacaagtgaaatttaagaacttctgatatcaacatggctgtatagcttctgctgaatcctgatatttttcacgttgatgcattgactgggt

SEQ ID NO: 24757 - DNA, 594 bp, Glycine max
ggcggtgccggtgattcgcactttcgggaatgtggatgtggttggcaatgctgattatgtcacctacttgggatcctccaatgttgccatcactctccgggctgccgccattatgctcaaattggatagtgggtggaattggttcatcaccttgagtgcacgggattatcctctcataactcaggatgatctgtcccatgttttctcttctgttagtagagacctcaatttcattgatcacactggtgaccttggatggaaagagagtgataggttccagccaattgtagttgacccgggactatatttagcaaggaaaagtcaaatttttcaagctacagaaaagaggccaacgcctgacgcgttcaaactctttacaggttcaccatggctcatcttgagccggccctttctggagttctgcatttttggttgggacaatttacctcggaccctactgatgtattttacaaatgtgaaattatctcaagaagggtattttcactcagttgtttgcaatgtgccagaatttaagaacacgacagtaaatggtgacttacgatatatgatctgggacaatcctccaaagatgga

SEQ ID NO: 24758 - DNA, 434 bp, Glycine max
  unsure (1)..(434): unsure at all n locations
tttcggttcaaaataaggaggtcccaatttcttctgaagaaaatgttgtgaagtatatggattgcatgaaaaaaccgtgtgaaccaagggcaaattatggtactgaagttgatggtggcctccttacaaatagtactgcactaaatattgctttgactaatgagggacaggatgacagaagtagttcttcatggctaagtttagactcatgtacggcagataatcctgtgctttcaaaggccatacttcaacagagtacgcttggtgaagcttctgcttccaaaaacttttcaattggtaaagctgtcagagaggagagacatactgtagacatggtacatcagctaagtgtaggtcctcatgtgtctaccactccacgaaaactcaggaagcgttctagcanatcaaatgcaaatttaaatataggattgact

SEQ ID NO: 24759 - DNA, 399 bp, Glycine max
atcactctcaataaatgtgccatttatggtccgatttctcctggaggagtgagaattggtactcctgcaatgacatctagaggctgtttagaggaagattttgaaaccatagctgattttcttcgtagggcagctcagattaccagcattgtgcaaagagaacatgggaaatcatgcaaagatttcctcaagggtcttcagaataacaaagatatttctgagctcagaaatcgggttgagacattcagttcccagtttgcaatgccaggcttcgatatttgatttgaaagtgtaaaacttctattgcatcattatgatgcgtcttggcttaccatcatttgaattattttagcatagtaacccataggttttttccacttggtcttatacttatcaagt

SEQ ID NO: 24760 - DNA, 236 bp, Glycine max
cagcacctggtctcttggcgtgaccttccagaagaaaagataaaactgtctagtggacaagttgttgatttgataccatggtgcttgccaaacacggctaagcggcacaatcaatggaagggactgtttggcaggttggattggcaaggaaatttcccaacttccgttacagaccctcagccaatggggaaggttggaatgtgcttccaccctgaccaagataggattcttactgt

SEQ ID NO: 24761 - DNA, 420 bp, Glycine max
agcagcgcaagttgccgagcccattctcactgccatcaaggaccagttgaaggaagtagatctatcagattttattgcgggaagatcagaagtagaagctcttgatgtcatgaagatattctcaactgccctagaaggaagcgtcttgaggtctttaaacctttccgacaatgcattaggtgaaaaaggtgttagagcatttggagcacttttgaaatcgcagaaatgcttggaggagctttatctgatgaacgatggaatctcaaaggaagctgctcgagcagtttgcgagttgattcctttcacagagaaactcaaagttcttcattttcataataatatgactggagatgaaggggcactagctatagccgaggttgtgaagcgttctcctttgttggaagattttcgctgttcctc

SEQ ID NO: 24762 - DNA, 258 bp, Glycine max
ggtcaatacaaaccttaatttctaatcttcatttctatgagattttgaattttccaatgctttttcaatcatttcaggtgcaagaccaaaagtgccttggagtattttaattttgaattttccgaaatttctttagcagtcaagtattttaattttgaagtgaaacttttctcttctttaaatgaccaaaaataacttgtggagagggttagatatgactgacacgtcagtgaggactgagttccttaacccccaaaa

SEQ ID NO: 24763 - DNA, 258 bp, Glycine max
atcgtagtggatcattatcacctcatttgttgacccaattgcagcaacagcagcatagattgcatcatcccattctgcaatcaggaagctacatgtcaggtttccaatcccatttaattaaccctcaactttcttctggatcatccatggttagcaaatatgaacatatgcttggtcttgctgatgttagagaacccagaccaaaatcaactcataagggtaaacagagtcatcgtgtctttcaacaggggtccgatg

SEQ ID NO: 24764 - DNA, 317 bp, Glycine max
accagagcaaaagttgatctagtttaatctggcgccaccaccaaccaaccactctcagtctcacccaaaccaaaacatgccgaacctctgcactgttagttctaatgcttcttcaaacttcatattcggcgttcaacctcacaacttctacaatgtttttgggtcaaggagaacgagacctcggtgcagggtcagcatgtcctcctccgatcctcaaaacgccgtcgttgtggggggggggtcggtgaccatggatttcttggccacggttgcggcttaccctaagccggatgacaaaatcagaagcaccagcttga

SEQ ID NO: 24765 - DNA, 206 bp, Glycine max
aaaacttgtaaatttcttattttcatacaaagattgtcttgtcctgacgaccgtctttgtatggttggtgctggctttaaacctcgctctcactcgcatccctccttattagctttaatttaaacctctcgtgcggtgttgtcgtctcgcgtccccaaatctctcctcatctcgttcctcattctacttctctcatcgttccaccc

SEQ ID NO: 24766 - DNA, 264 bp, Glycine max
cttatgctgaaccttctcaaattcatgttccacctgctcatgatgataagggtccttccaatttacatgcttcctcgcaagttaaaccagtgcatcatgcatctacaaattcatatgagcagtctgcaagtggtgctgctagaaaggatcaatcaacaacatcaggcgtgtccaatttagaagtcagatcttcaggaactggaagtcaagaaacaaaattgcaagattcatactctggaaacaatagttcttttcctatgaata

SEQ ID NO: 24767 - DNA, 262 bp, Glycine max
cggagaaaataaatctaatatctgcttgcattattgtttgttgctgctaaattttgaggaatactctgttaatttttccatttcagtattctttccttgggcgttaattaactagtttgaactctgaagtaattgcttgtttgattaaatttattttgaatgaataatctcttttttttcaacttttttagaaagcttttaaaaagtaagtattttctaaaaatagtccatttcctaacaagaactaaactagtcttagtga

SEQ ID NO: 24768 - DNA, 342 bp, Glycine max
gacgaagacgaggtttatgtgtagaatgaaaggttcatgtcttcttctcacgtcctctttcaccggaatcaggacaagcaaagagcttcggcatatgctgtcactgtgtgagttgaaaagcataacatgcttctcagtttgtaatcaaaagcaaaaatacaatcaaaagctttacattattcccgttagaactgtttgtgttcggttctgcatctcaagatcctcagttgggtcagtggaattgagtgggacaggcacacacagtgatgcttattcaggattttcagctccaaatgactatcagagaatcgacagtttagaggaagagttggaagaattatt

SEQ ID NO: 24769 - DNA, 416 bp, Glycine max
cccacgcgtccgggtccagcgaatatggaggaggagtgcttgaaacttctgaaaggagagcgagacgaacagcgtctggctgggcttcttctggtaaccaagttctgcaaagctgaggatcagtcctcagtccgtagggtctacgatgcgcttggacctcactttctctatcgcctcctcagaaccgctatggcaagtggaggaggaggcctcaacgataaccggaacgcctacttaagcttatccatcacgcttcttgccgcattttgtcgtgttcccgatattgcttcctcggaggacatgcttttccttatcccccttgtcttggaagtaatatccaccaggtctgtcttatctgttctcgaagaatgctatgagtttctatacttggtgtctgctgcttctgaaagtggatt

SEQ ID NO: 24770 - DNA, 443 bp, Glycine max
atgaactggaaccagaagaagcagtggcgataatgtcagcttttgtgttccagcagaagaatacgtatgaaccttcactcacacccaagctgtctgaagcgaaacacagattataccaaacagctataagacttggagagctccaagcacactttaatctaccaataaaccctgctgagtatgcccaagaaaatctcaaatttggtctcgttgaagtggtttatgaatgggcaaagggtactccgtttgctgacatttgtgagctcactgatgttcctgaaggtctgatagtgaggaccattgtcaggttggacgagacatgtcgggagttcaaaaatgctgcagctattatgggtaattctgctctctgcaaaaaaatggaaattgcttctaatgcaataaagcgtgacattgtatttgcagctagcttgtatattactggc

SEQ ID NO: 24771 - DNA, 746 bp, Glycine max
caaaagtagatctatagaaagtaaaggggaaaatattggtgtgattaatggtcatgtgcttaattcaggatcttctggagataatgcagcacagcaggttgaaaacaacgagaatagtgttatcccctcttgtgagacttcattttacaaattggagatgattaagattcaagtgttttctgcacaagggcaacctactgcccttgaattagaagactacatgaatgcccaacctgatattattgcgcactctgcttccaaaatcatatctcgtttgaaagctgatggagaaaagaccttggaagcccttaagtctctgtgttggagatgcaagggtattcaagtggaggaggcacaacttatctgtctagactcccttggttttgatctaagagtttgttctggaactcagattcaaacactgagatttacattcaagaacagggccacttccgagtacagtgctgagagacaactcaacgatatactatttccaagaattcacccaaagcagcaaaaaatgaagcaaacacatcaaaatgaatgctgaaatcgtctaaatgtcatcttacatgaattttgtattgcttgtatgccttggccagtgattgtgtataaaagtgaaaggcaggggaaaagatcccatgcacatgtcaatcaggttatgaagttggaattgcatttaatcattattttagttagaagtaattttttccccagttgcttccttagtcttgactccggac

SEQ ID NO: 24772 - DNA, 170 bp, Glycine max
gcttgatttcaaatttcacatcactttggctttatcttttatctatggcacctacagcagcaatgcttttgctctctcacaatggcaaaacacacgcaccctcatcatcatcatcatctgcaacaacttattattctagtttgaaagcctctgcattcaaatgggttgcc

SEQ ID NO: 24773 - DNA, 320 bp, Glycine max
aaatggtgaagtttagatagttgacagacttagattaaatttgggggcatgctacattcactaaaattggattgttataagttgcacatagtttgtgaatggagaaggtcacttcattatgaattcaaagttgagattgtctcagttcagagtgagattctttttgttatggagatgcgtgctatacaggggtgagtttattttttgctggatctacttattcttgattataagtaacagtatttactagatttacatagttacttaagaaaattgagttgtccattcatttaaatattgtgttgattatgtaactcttt

SEQ ID NO: 24774 - DNA, 442 bp, Glycine max
ctgttttgtttgaccttatgtgttcataccatgaaattatggaattccagctagaaagaaaggactcagcagcacaaacttcaaataagtgcaatgaagagatttcctgtagtccaggtgagactcaggaagttgattcagatgtaagagcctgcaataattctatgtccagttccagagatgtaatacatggctcatcttctagggaggaatctgcaacagtgagctcactgactgaaaccagtggttcaccatatagtgattctcatgatacaattaaggaggctggaaaggaggacagtgcaacatcaagcatgagtccccttggtaccatcttcgcaaagaagctacaacatttgtttcacagacccttcagagaggacgcaggaatctgtggcaactcactgcaagtcgtgtggccataatgccttcctccggtaac

SEQ ID NO: 24775 - DNA, 269 bp, Glycine max
ctggagatgcagtataccatataaaggaaaatactagtgcccaagatatatgccttcttgcagccatattgaagttgatgagtgtttcattgctacaggcaattaagtatctaagcaatggtagtgattcagattgtttaaaaacaatgggtagtgcctctgtgcgtgagacatatgatttcttgatcagcatcattgacctttttcaacaatttaagttctgcttaccaattcaaactttatttaataatgtgatgaaaactcagaaa

SEQ ID NO: 24776 - DNA, 959 bp, Glycine max
tgttgacctggatgactatgcagcggatgatgatcaatatgaggagaagctcaagaaagagactcttgcatttttcatgctggcaacttatggagatggagagccaactgataatgctgcaagattctacaaatggtttactgaggggaaagatgagaggggcacctggcttcaacatctcacatatggagtttttggcctgggtaacagacaatacgaacactttaataagataggtaaagttgttgatgaagatcttagtgaacaaggtgcaaagcgtcttgttacatttggattaggcgatgatgatcaatccattgaagatgattttcctgcctggaaagaaactttgtggcctgagttggatcagttgctccgagatgaggatgatgcaaatactgtctctaccccatatacagctgctattcttgaatatcgagtagtgattcatgacccgactgtcacatcatcctatgataatcacgtgacccgtggcaaaatgggaatgctgtgtttgatattcatcatccttgcagggcgaatgttgctgtacaaagggagcttcacaaacccgagtctgaccgttcttgcatacatttggaatttgatatatcagggactggcttaacatatgaaactggagaccatgtcggtgtctatgctgataactgcgacgaaactgttgaagaagctgggaagttgttgggtcagaatttagatctattgttttctcttcacactgataaggaggatggcacttccctaggcggttctctcctgcctcctttccctggcccttgcactctgcgtactgcattagcacgctatgctgatctcttgaaccccccacgaaaggctgctttagttgctttagctgctcatgcttctgaacttagtgaagcagaaagattaaagttcctttcgtctcctcaggggaaggatgagtactccaaatgggt

SEQ ID NO: 24777 - DNA, 265 bp, Glycine max
cgccgactctgtggaaaaagaaaaaatctggaaggaacaaacagatagaaagacgcaccacaacaacgagaaaacagaatgtgaacacatgacatatcgaatgaaataaggttgacttgacgcgcttgtgaagctgctaaacgctaattctttcacaatcctcatcttcaactcaatgctcctatttgcacccctcaaacctgcttgcaagcatcatactcacacaaccaccatggccctgcctcaatcgtacgctacaaaattt

SEQ ID NO: 24778 - DNA, 325 bp, Glycine max
cttttatataatagcccccccctccacacgcataaatcccccttaccttgttctcattttctgaataataattcaattactcctaaattaaacaagatttcaattctagttcgttcatagggatttcccaatccctattccatggacgtcgaaaacgaggaagctccattccaacaacactctgattcacaatgccacaccgacctgccaaatctcccctacgcctctgccgttgaccttgaagaggcggcggcaacgtcgtcggaggctgtggcggttgaacccgatgcgctggcggtgtccgacgatggcgccgaaacgcaag

SEQ ID NO: 24779 - DNA, 761 bp, Glycine max
gttgaattgaacaatctcagagcaaatattgcagtttctgaagctgagaattgctctgttggccctgggcatgaatcttcatccttaactgaagtcttcgaaaatgattttgctgcatcactggctctcatggataaaaccaatgatctcgttgattctatccactcaaatatattgggcattccaaatgctgagaatttgaatacaatccctattctagaggatgactttgtggaggatcaaagtggtaaaaatggagtaggtgctattgaatgtagcatggaaactggaacacaagttcaaacagatggcgtggctgccaatgatttatatgcatccttggccactggttctacagaaactgatgaatttactgatattcaggcttcctttaatggtgacctaccattggaggaaaatggaaacagcttgctagggcagttaaatgaggatcaaattgttgcttctggcatggattgtgatgacaaggatgcaaggcctgactgcatatttattgaaaatgctaaagtagattgcttacaatctgaagcacttggattagatgaaaaagagagtttgttgaaagatgaagaaatccctgtctgtcaggaagctgaactacaaagtacaatgtgccctgaaattaggagtcctttagtagatcagaatgatgaaaatgacatgattgctaatgacacagggtttttgaatgttggtgatgatgagataattgaggatgatgatgattatcaatcatgtgc

SEQ ID NO: 24780 - DNA, 686 bp, Glycine max
cggtcgcgtgggcggacgcgtgggcttagagctttctgcggcgccctctatcattgtcgtcgtctcggtttcttcccttctcgtggcagatgaggttggaaggtcagaaaccgaaccgtctaacccacacaaacacaacccagatactataattgactagcacttttttgtttattcctaaatacatggacactgatgccactggagatcctgttgacaagctcaaggctatccagaatgatgatgtagaatatcaagacgaagatgatgattttgatgacgaagaagaagaagaagatgaccctattactcttggtttcgttgacaaacccaagaatgaatggtctcttcgccgtcaatatttcccaagcaaaactggtggagtcccggcttggcttgaccctctgaatataccatcagggagatcatctgtgtgtgacatttgtggagatcctttacaactcttgcttcaggtttatgcaccaactgacaaggaaaccacatttcaccgaatgttgtttgtttttatgtgtccctccatgaaatgtcttcttagggatcagcatgagcaatggaaacgccatccagagaagccatctagaagtgtgaaggttttccgttgtcaactaccccgcattaatccattttactcacctgaatgccctcagtataatgagagccacgaa

SEQ ID NO: 24781 - DNA, 357 bp, Glycine max
gcggcgccctctatcattgtcgtcgatatggttttttcccttctcgtggcagatgaggttggaaggtcagaaaccgaaccgtctaacccacacaaacacaacccagatactataattggttgggttcgaaccatatatttctggtttactgctgaaatcctatgtgccactaacagaatcagtctttactatcttgcagactaccacttttttgtttattcctaaatacatggacactgatgccactggagatcctggtgactagctcaaggctattcagaatgatgatgttgaatatcaagacgaagatgatgattttgatgacgaagaataagaagaagatgaccctattactct

SEQ ID NO: 24782 - DNA, 308 bp, Glycine max
aaagaggctcctttgtactttaaaaaggcgattgatgaagctgaagatgagtggagccagcacaatgcaaagaaacttattgatacaagtcaaaagggactgcgcaattcaatacctaagcactttccatattttcacgttgaatttggtctaaacaagggttttgtccatgttattgatgatgaaaagcagtttaacatcagccttggcttgaatgtcataagaggcatgctacatttggcagaggaggacatgtataggcgacgacgctacgaggctgtggaggtacaaaagcaagcagttgaaag

SEQ ID NO: 24783 - DNA, 362 bp, Glycine max
cgcaatcgtcccaacggcaatagcaacagcattaataataatccctcccttggtcaaaggaatttgatctgtttgaggagaaaatcgaacaagttcctttgaccaagtgtgaatggttctctgatttccatccaataatcagtcgcaatcgtcccaacggcaatagcaacagcattaataataatccctcccttggtcagctggcttcacattacatagcggttaagtttaaaaggctttattcatctcttacaggacgaaagttgtatgtgtcgccggtgaaggggttggagcctggtagtgttgatgcatcacttaaatacgccaaagaaattttgaagtggagtgaagagagaccaaac

SEQ ID NO: 24784 - DNA, 279 bp, Glycine max
aattttcggggtgggggtgataaaagcagaattattcgtggcaaccacgaaattgtggaatcatatacgtagtttattacgtttacacatgttattgttgctctctaacagtctgtaaacaatgaacaccaaagaatactgctttagatattgcttttattctttcaatgaatcgggtacataagcctcaatcttgctacaatcgcatgtttggtagtaattttgagtgcctctagttcaataattttaaggataaagatacatggacaccttcatgtt

SEQ ID NO: 24785 - DNA, 269 bp, Glycine max
aaatgagctttggcagtaccaaggctaggcttcacagatttggccaaaccagctctacactcctccacgaaacccaaccccaacccaagatgtgcgatttggcgacgatcagaatgaagcaaatttccagaaattaaaaaatcagacgcggtgtggttgttgatgttgagaagtggcaacatattacttaaaattcgtcgttgaaatcaaaacgaagagagagaaatagggcttgattatgggttgtgactgtgggggaaagttaaatg

SEQ ID NO: 24786 - DNA, 210 bp, Glycine max
caatcgagtgcccttctttattgggttctttttttgtttctttcttctcttctctatccatttagaacaattctattttgtcacattgtagacgcctgctgttcaagacaaagtgggtctaactcacccatgtccaaatgttaattatgaatataaggatggtgtgtaacacaaatatttatcattcaaaaaaaaaaaaaaaaggggggc

SEQ ID NO: 24787 - DNA, 971 bp, Glycine max
gttttggggagagttcatccaagcaaggaactcactcattcactcactagtcactaccaatgccgaaacaaaggttggagggtaaggtggctcttatcactggagcagcaagtgggattggagaagagacagtgagattgttcgctgaacatggagcacttattgttgcagcagatattcaagatgaacaaggccaccaagttgcagcttcaatagggtcagagagagtgacctaccaccattgtgatgtgagagatgaaaaccaagttgaagaaacaatcaagttcactttggaaaaacatggtcgcatagatgttttgttcagcaacgcgggaataataggttccttatctgggatccttgaccttgatctgaatgagtttgacaacacaattgccacaaatgttcgcggtgtagccgccacgattaagcacacggcacgtgccatggttgctaaaagcacccgtggatccatcatatgcaccacaagtgtggctgctatgattggtggaactggacctcatggctataccacatcaaaacatgctcttctggggttggtgaaatcagcttgtagtgaacttggtgcttatggaataagagttaatagcatatccccttttggagttgcaacacctcttgcatgcaaagctttcaactttgaacctgagcaagttgaagctaatagctgctcacaggctaatctaaaaggtgttgtgttgaaggctaggcatatagctgaagcagctttgtttcttgcttctgatgatgctgtttacatcagtggtcacaacttggtggtggatggtggcttctctatggttaatagaagttattccttcacaccagcttaattacatgtagagccaaaaaactatagttttgtggctgattggcattaatttctttatcctcatcaagtagagaacatatatgatgtcaaaaaaaaaaaaaaaaaaaaaggcgaccaa

SEQ ID NO: 24788 - DNA, 400 bp, Glycine max
ctactctgccgattcggctcgagccttacccttttttctgtctttgcacctcttttcaaggctaattcgtggcctcgtcttctctttttctgtatcgtttttactttcaaccacttccaattttctttttcgtcagatcttaataccatcatggaggatgctgctgcttctgctgctactgctaatgtattggaagccaaagatggtactatttctgttgcttcagcatttcctggtcatcaagaagctgtacaggatagagaccacaagttcttaacaaaagcagttgaagaagcatacaagggggttgaatgtggtgatggaggcccatttggagcagttgttgttctaaatgatgaagtagttgtaagctgtcataacatggttttacgaaacactg

SEQ ID NO: 24789 - DNA, 525 bp, Glycine max
gatccactgccagaagcaaaggggacttttggtcaagttactggctgagattcaaagtaatcacttatttgttgctaatagcagtgtcctaccctttggtaattctatccttgacattaccattgttgctcagatgggagaaagttacaatttgaccactaaggaacttgccaagaatctacgcgtggctgcattgaagatattgtcataacatgaacgtggcttgagtatggagaataccctcatggcatatggcatggatattgaaactctgaatcacatttaatgccccagccaccgagtaaatcacacccaaaatggaagccttgttattaatgtgtgatttctgctgcaacctgcagtgttccccgatatgtagattcagcttgacccccaatgatcttgtcttcttcgtgttatgttttggtttctgaggccttcagtgtgtgcctgctagagagggaaaaataattgacccatttcgtagagatattaggaataatttcaatctgacatgtcttaatt

SEQ ID NO: 24790 - DNA, 311 bp, Glycine max
ggaattgttgctgcagccacaggcatggatggacaaataaagacatctgatagggatgaaagagtgatctgttacattgtaaattcagctgaatattgccacaaaacggctggtgaactggctgaaagtgtttctaaaataattgaccctcaatattcagatggggtggatatgtctgaagtgcaggatgaattctcggccgttataacaaaatcattggtgaccttagtgcatggcctggaaactaaatttgacatggaaatggctgcaatgacacgtgtcccttggggtactcttgagagtgttggtga

SEQ ID NO: 24791 - DNA, 533 bp, Glycine max
gagaagcaatagtggatggccccgatttaggtcgaagtgtatgactactgaggaaattgagaatattcttagaatgcagcttgtagcaacacacagtaatgatccatatgttgatgactattaccaccaaggctgtcttgcgaaaaagtcatctggtgctaaattgaggcatcacttttctccagctcaaataaaggaactccctctacgaccctcttctaatgctgaaccacatgcttttcttcaggttgatgcactagggagggttccattctcatcaattcgcaggccccgtcctctactggaagttgatcctcccaattcctctcatgcaggttgccccgagccaagcatttcacagaaaccccttgaacaggaaccaatgcttgcagctagggatacaattgaagatgggatttatcttcttcttgatgtagatgatattgaccggttcctacagattaatcagcttcaagatggtggtcttgtgttaaaacggaaacggcaaggtcttatggaaggacttgctacct

SEQ ID NO: 24792 - DNA, 585 bp, Glycine max
ttttatactcaatcttcgccgcctttcttccccgcaccggctcacagactcaccaaacacagattttccccttctctggtagtactgttcaaccgtgtactgtctgttaaggatagcaataaactacttgttgcttcactgaagatacagtcatctattgatctccagcgtcaccgcaaacacaccaacacacatttcgttatttgcatctttcgagcgctgcacagactcatcaaactcgttgtgactgcagctgcacagattttcctcttctctgtgcctttgcgagaacgcgcgtttggtttcaattcaatggcgggaggtaaagcgaagaaggaaaaggggaagccccatcagcagcagaagcacatgccctaccaaggcggaatatcgttccacaaatcaaagggtcagcacattctcaagaaccccttgctcgtcgattccattgtggagaaggccggcgtcaagagcaccgacgtcatcctcgagacggtcccgggaccggtaacttgacgaagaagcttctcgaagccggcaagaaggtcatcgacgtcgagatcgatccccggatggttctcgagc

SEQ ID NO: 24793 - DNA, 443 bp, Glycine max
ctctgagttcaaagccggagctagcgtttacgattattatgcaaccactccaagggactttgttgatcatgcagattttgaagatctacatgtaaagaagctttacatgaggcttcaagcacttgaggctgatagggaatcaatgaggcaggcaatcatttcaatgcgcactgataaagcacagcttgttttgctgaaggaaatagctcaacatctgtgcaaagagatgtcaccgcagagaaaaatggcaaggaaactgtatttttctggcaactctaactcttcgtttgtttcaatttttaaggtaatttaaagatgaaagtagttaatagcaatacgttttatgtatttcttccatatatctgatgggggaagaatccatcctatttaatctatccatctttttgtctcaggtttgcatttaaataatcaatcattgttac

SEQ ID NO: 24794 - DNA, 428 bp, Glycine max
taatgcatcggatgacgatgatacgagtgacagaatttatacaattgactctgttcattgtggggcaccatataatggtttcacagattccaaagctggtgcttttgaagattatgcaaccactcctagggagtcagggaatcatgctgctgattttgaggatccctacataaagaagcttcatatgaagcttcaggcacttgaggctgatagggaatcaatgaggcaggcaatcatttcaatgcgcacggataaagcacaggtggtgttactgaaggaaatagctcaacatttgtgcaaagagatgtcaccaaaaagaaaaatggcaaggaaaccgtattttgcaggcaactctaactctttgctcttttcaattgttaagtggatctcatcaattgttttctggagaaagagagctcaccaaagca

SEQ ID NO: 24795 - DNA, 278 bp, Glycine max
catatcattctgagtttgttatttggtcctgaaattcaaaaggcattgaaaatacaagtatgaacaactgtttctctgcaccacatgttgactgtaattattggcagtttggcacaaaaagttgtaaaagggtggtggctgctaggttagaggtcttgtgaaatctctctatggagggtgagaaaaggcgcggtaaaaacaatacaaattatggactataagtgggttcccaagcttaacaataaaagtgaaactaaaatcagaggggaattgtgatt

SEQ ID NO: 24796 - DNA, 470 bp, Glycine max
  unsure (1)..(470): unsure at all n locations
catgttttatgcaaagcaactgaanaagtagttgggtatgtaaagccttactctattactgggagtttgcctctcattcgggaactacaggaagaaggttttgatgttcaaacttctggctacggcctaatggctacttaccatgcccagaatgagtactgcctctttacggatatgtcccaaggatatcgggtcttcgcgagaatcatctctcaattggaagagtgagaatagcagaggaactaataattctggtgtctcgtgggctatgaagatgttcgtgttcagatatatgaacataatttctgttatattgtgtagagggttcggtattactgacttttcttcagcatgataggcgaaactagttttttccacataaatttctccggggaaaagtacgtttttgataccatgaaaaaaaaaaaaaaagggcggccgccgacaattaacctcttcacccggggatt

SEQ ID NO: 24797 - DNA, 532 bp, Glycine max
tgaagctgctgctgatcttgactcagggagaaaatcaactaagaaaaggaagagaactgctgatgcatccaataaggaagacagggttgctgatgaggaaaagaaaggtcataaaaaggacaagacagatagaaaaaatgacggtcctgagatggataataaatcaactaagaaaaaggcaaaaaaggatgacaagcccttggacaagggatttgctcttgaggagaatgtttctaaggttgagaagaaactgaagaagaaacataagaatgaggaacaaagtgagcttgatgttatcgatgatgcagaagcttcatttgcggagctttttaaaatcaatgatgcagaaaatctgaatcttgttgatgaaatgagagcacgagacaaagtgcctaaggatgtgaaattggcaggtgacacagtgacctcatttgcgaaacgtaagactgctaaaatgcagaatattgaatctctatcagctccagaagcagaagttggaatgggagggccatcaacatggggtgatgagtga

SEQ ID NO: 24798 - DNA, 261 bp, Glycine max
tcaacatctacagtccatgaagttccgttattattgcctccaagtattccaccagatgagtcaaggagatgcatgtttcttatactatactttgaattagtctcgtcaaggtaatatctgatatgattgtgatgaactttgtcacatccttgaaatacttgcaagtattagctctgtgctattgttttggtgatatatccatgtcaagcttcaaattccctatgcaaaatctaagaaagttgaggcttgaaagaataaccc

SEQ ID NO: 24799 - DNA, 774 bp, Glycine max
ggtggcatgacttttttctccaggtgacacgtgtgacatacaacgcacacatttgcgttagatcaacgtgatgattctgaagatgaaattgaagttcttgcttaaaagaaatttgaaatttgaaaaaccctagttagatttcagaattggaagaaaaaacagcatggggtttagagtgcgaaatctgaatcccgtattccgaacttgcataacaaggctttcgtcttcaaattttcttcctccggtgctggaatcacttaattcccatccattagagtcttgtttaaccgaaaatcccgcgttcaaaatcccaaggagatggcatttgggtcatagtcattcacaccatgatgaccgccaccactaccacaaagagggagagaacattttccggttgggtctcgccgccgacatcggtttggccaccgtaaaagccttcaccggctgtctttccggcagcactgccattatcgccgatgccgcgcattccgtatccgatgtggttcttagtggcatagctttgttgtctttcaaggttgccaaggcgccgagagataaagaacacccatatggacatggtaagtttgagactctaggagctcttggaatctcttgcatgcttttggcgaccggaggtggcattgcatggcatgctgtagacattttgatgggattgttctcatctggtcctgaaatggttagccaggcattggcacatgggcacgggcaaagccacggacatggtggacatcaccatggaattaacatggatca

SEQ ID NO: 24800 - DNA, 613 bp, Glycine max
atcaagtcgaatgttttgggtggaaaccgatgaaaaccgcaacacccttccctctcctctcccacataaaacccacaagccccttcttcccattgggtaccgcagaggcatggccaagaagagaaaatccatatccacaagcctcgacgaggtggatcgaaccatctactcttccttctccagtgccgccaattccctctctcacctctacactctctccatgaaccaccagaaactctccttccaagccggtgaacgccactcccttgaaaaactctatcagtgggtctggaggcaacaagagagtggatcaagagttgcaactgttgatatactcagctacattcagaatgagctggattactgtggagaggagccatgcatgtcccctagagctccactgcatcaacaacagtcacaaccggtaatgcaagtcactactggtgcaggttttccagtaactacaggattttctggccaaactattgtggggcaggaggtcagacctgagcactgtgataatcaatcaaagaattctatgttttcaaatgcttcgtcaaaccctgttcgtcaaattggcgagggagggtaccacccaagtggtctctccatg

SEQ ID NO: 24801 - DNA, 478 bp, Glycine max
ggaggtcgttgtttcttgattctgtgcccaagcaagtttttatatcatcaagcaccataaagaaacatttcaagtctgatggtcataagaaaagaaaaacggtcaatgcaagcaaggaacatttgaatagtgctacttctggactgggaagagtgaaggaaggagcaaagagttcttctgaagttcctccggtgattggaaagtatacctattgccgcaagaaactgtcaaggaaggagttaatttcctcaaaatctgtagcagaaaatgattctaggccaggtaagcagcctgtggccaagttgaggaaacatttttctggagatgttggtgaggctgcagaggttaaaatagcttctgttatacatggaaagacaaagatgattaaagggaagaaggatacaacttctaagggcaaatcttctgtcagtgtcaatagtagctcacacaatgatcaattatctttaaagaataaagc

SEQ ID NO: 24802 - DNA, 259 bp, Glycine max
gactgaacctggtctcagtgttatcatcagtgctgtattgaccagtcgagcaatattccaaaggatgaagaattacacaatctatgcagtttccatcacaatccgtattgtgcttggtttcatgttactggccctcatatggcaatttgattttccaccattcatggtgctgattattgctattcttaatgatggtaccattatgacaatatcaaaggacagggtaaaaccatctccatatccagatagctggaagttg

SEQ ID NO: 24803 - DNA, 1680 bp, Glycine max
gagaaggccggaacagaggacgccgaacttcgcgtacttctcgaggcacaacacgagagccgcggagccgagcgtgaaggccgccgcgagggaatccacggtggtggattcgtgcgatacggaggcggcggcttcgagagtttcggagacagtaaggagcgcggcggaaggaggtgccggcgttgcggcgccttcgacgagtgccggcggtggaaggagcacgatgatgtacgatttgacgatgacgtcatcgcctggcggttcgagtagctgcgacgagccggttcaggtagcggcggcggaggaggatcggaagcggaagggacgggaggcggaggaatgggagtgtcagagcgaggatgttgattttgaatcagaagcaaagaagcaagtttgtggatcaacatctacaaagagatcccgtgctgccgaggtccataatctctctgagaggaggcgtcgcgatcggattaatgaaaagatgaaagctctgcaagaacttatacctcgttgcaataagtcggacaaagcttcaatgctggatgaagcaatttcgtacttgaagtcattgcagttacaagtgcagatgatgtccatgggatgtggaatggtacctgtgatgtttcctggaatccagcagtacatgccagcaatgggaatgggggttggaatgggtatgggtatggaaatgggaatgaacagacctgtaatgccgtttcccaatatgttacctggttcggctttgccagcggcaactgcagctgctgctcatttgggaccaaggttttccatgcctcctttccacatgccccatgttcctgctcctgattcatctagaatgcaagcagcaaatcagtcagataataatatggtcacgtcagctggtccacctgatccaaatcagtcacgtatcccaaacttcactgatccttatcaacaatatcttggtccccaccagatgcagttccaattaattcagaatcaggcaatgaaccaaccaaatgttagcaagccaagtaacaatgggggccctgcgaatccagaaaaccattagtcgggttagattttccggctcctatactacagctgcaaagttttgtagtgttaagagaacgaactttttagctgttctcagtagcaagctaatcgatacacggctatcatgttaattattgcaacgaagttttctccctcttttatcatccttttttcccgttttaaaatttctcttttcgagattctttgatgtgggaagaggaactcgatagatggcacaatagatgaacgtgcattctacaccaaacgtggaggccacttacgtttagtccaattcctgcttcagattcttgttatgttcttcatttaccatcaattttctcctattaggcgttacagcagcctgtgaacctcatcgctgttatttatggagtgaaattgaagcagttcttgatctacatgcccagatggctctgttacaatgcacgatgtgcttagtcaattaaagaaaggaaattgaattattaaaaatttaaaatttatagtactacacatagcagaatttgtacaatagactgtgggattaagagattaccataaaagttatagctatttgtatggcgggtgcgcctcagggaccttgcaatctcttaatttaaagttaaaataatgatgtattggtat

SEQ ID NO: 24804 - DNA, 283 bp, Glycine max
ctcgagcgattcgcttcgctgatttcttcgtttggaggataccctcaaaggtgttctactgtgaaagttagccaattttgaagatgaattgttataatcttcagaagaatgccttctcagcctgtgaagagatgagaggctctcttcccattgctgatcagaatggacctgtcttttgccctaagccacgccgagctggggttttaatgaacttgcctattcgaccagtaaaatggcatttaggtcaacaaggtgaggggtctgattcaaaagctggggcaga

SEQ ID NO: 24805 - DNA, 263 bp, Glycine max
attcatttaaggttcaacatatctccatttgatgtatcattcctaaattgaagaacctttcctttaacaacatcaaaccctcgttctccaacaatatcaagccctcgatgggaatgctctaccactactatcatttcctcaagttattatatagtagtaatgtattactactaaacttagttatttaagtattgtaaaatttatggtttagtattttattttattatgtttgttgaaatgtttaattagtatgttatttataa

SEQ ID NO: 24806 - DNA, 318 bp, Glycine max
gttgatggcactggagttggcaaaagcaggcagttcccaaccttctttcttgatcctccatctgaaacatttccggagatctgaaaattttgtgcgagtgataaaatgcaatagtgtggaagtgtttgaaggaagagaaccccaagctattaagatatgttcagtggtgcgtagagcatggaagacatatcagtctaacatgaaaaacttgattctgaaggttccttcaagtcagagacaagtgcatttttcctggactgaagttgatagtagagaaccacgaatccccaataaggccattattagttctagggagat

SEQ ID NO: 24807 - DNA, 390 bp, Glycine max
acaatagtggtcatcacacaattgaatcttgctatacctcgatatgagcaacatttgcgggctgttgttggtcttccacttggtgatccatcactgaaaactccagctgctatcatgtacaatatattgggtgaagaagaggggggtcttggttttcaattagctcatcaattgatcaaaagggcattgaccatccctggggcaactgttcattggtatgataagccagagatgagaaagcaacgaaagatgggccatataaccattgttgggccttcccttagcaatattgaaagcaatcttgctgtattggtggaagggaaagaattagatggcaagactgcagttgcaccacatgtggggatcataatgggttctgattcagatcta

SEQ ID NO: 24808 - DNA, 268 bp, Glycine max
gaggaattcaacttctgtgcaagctactgccccacagttggggaataggcctgatagtgggtctcaatcttcatctcccctcgaaacatccatgccaataagttcacatgattctggggaagtggatgcagcatcagaatcaggtaaagtcaaaggtgctatggttgggaagggaagggaaggttcccaaggtgcaggaaggggctctttcatttatggtggggcacaggtaatgggcaccacaggaaatgcggctgttagtcatgga

SEQ ID NO: 24809 - DNA, 833 bp, Glycine max
aaattttagcagattcaggtgctgacctgctagcatttgaaacagttcccaataagcttgaagctgaggcttatgctcagatactggaagaagaggacataaaaattcctgcactggccttcttttaactctaaggatggagtataatgttgttagcggtgattctttaatggaatgtggctctattgctgaatcatgtaataaagttgtcgctgttggaatcaactgtactccaccaagatttattcatggtctgattgttttgcttaagaaggtgactacaaaaccaattgttatatatccaaacagtggggaaacttacgatgctgacctaaaggagtgggtgcaaaatactggtgttacagatgaagattttatctcatatgtaaataaatggtgtgagttaggagcttcccttgtaggtgcctgttgcagaacgactccggatactattaggaagatatacaggaccctgtctagcagtcaatcaatctaatttacatgtcaacaaggttggcagctgcactggatctagttgcttctctgggctaagataggaccataggatgatttggctaattcattatgaaatattggtcaatgcaacttggaatatgctttgcccttggagctagcaacctgaaaatcgcaatttgtgatcaagagaaaaatgcgtgttgtccttctcgttgattttgaaaaaaaaaaaaagaacgtggcaacttatgcagaattttagtaattgttatgtttattataacataatttaggattattagtatcttaaacattttcctaactaaaaatcatgttgagtggagactcacgagatg

SEQ ID NO: 24810 - DNA, 417 bp, Glycine max
gacaaggtggaccccttcgatcagcgcctctccaagtggcacaactgcgccctctccaacgaacccttgagagagccctgcgtgatcgataaattggggaatatcttcaacaaggaatctctggtggaagcgttgttagggaagaagcttcccaaggaatttgggcacatcaagggtttgaaagatatgattaatgttcagctttctgcgattcctggagcggaggatggggcaaagtttcagtgccccattgcagggcttgaatttaacggaaagtataggtttttcgcgctgaggaattgtgggcatgttttgagtgccaaggctctgagggaggttaagtcctcttcgtgtttggtttgtcacaaggagtatgctgacttggataagattgtgctcaatggaagtgatgaggag

SEQ ID NO: 24811 - DNA, 418 bp, Glycine max
gttcattactcattactcaatgagtttcactgcttgaatttttctaattttctgcagagaatctgaactctgcatcttgttgtgcaaatgaaatcaggtgtttgggtttgtgaagtatagaatagaattttgattattcaggttcttcaaaggggctgaatagaatagccagtgattgggagacccttttgatctaaatgtgtgctccttacttgagatctattttgaatggtttattcatattagttgaatttcaatatgggggtttgttatgctacttgggaattgattggattatagtcaaacatgttttattgcaaatgagactcacctggctattcctgaagcattggtatttaaccatgccgaatgacgtggtgtggtccatgtagttgacctcacctagtgaaataaggct

SEQ ID NO: 24812 - DNA, 311 bp, Glycine max
gctaacaattgctgttgaactcgtagctaatccgtcaatcatttttatggatgaaccaacttcaggtcttgatgcaagagcagcagccattgtgatgaggactgtgagaaacactgtggacactggaagaacagttgtctgcacaattcaccagcctagcattgatatctttgaagcctttgacgagctgttgttgatgaagagaggagggcaagtgatctactcaggaccattaggccggaattcccacaagattgtagaatactttgaggcaattccaggggttccaaaaattaaagagatgtacaacc

SEQ ID NO: 24813 - DNA, 600 bp, Glycine max
ttactgagttcaaaaattgaagagaagagatattttgtagaagttgtgaaccttttggataagcaagtgcaggaaatgaagttgatgactaatgcaataggaagattggaagcttctggtggactctctgtctcaaagcaagaagaccgcttagtcactcaaacaggttcaaagacacagcaactgatcgtgaatgggaagtcagactatgagtcccgatcagtgagatcttcatcccctcctgtatctgttgaaccatctagtgctcctcatcctaaatcatatatggagataatggccatgatccaaagaggggagaagccttctaacattagggaaattgatgattcagcccccaacccttatcagcaaccatcaaatcctcgcttagcacctagagccaagccttgggaggttagtcaggtgcaaaacacctcaacccaagtccttccgtatcaagtaaatggcaagatccaagataatggtgacaacacagtaccctggtggcaaacatagaacgtcagaatcaaagagatcgataatgaaattgagtataatggagcacctgctgcatccagtccgcagccagtccaacgagcg

SEQ ID NO: 24814 - DNA, 502 bp, Glycine max
gtttgctggaggaggctttggaccttaaaacccaaatggtccacaaagggattaagcttgacgtctttacctacaccacccttttgtccggattcgagaaggccggtaaagatgactttgccatccaagtttttctggaaatgagagctgtgggatgcaagcccaatatttgcaccttcaatgcccttattaagatgcatggcaaccgaggaaagtttgccgagatgatgaaagtttttgatgatatcaagctctgcaattgctcccctgatattgttacttggaatacccttttggctgtctttggacagaatggaatggactctcaggtctctggaatatttaaggaaatgaagagagcaggctttgtggccgagagggacaccttcaacactctaattagtgcctacagcaggtgtggttcctttgaccaggctatggctgtttacaagagcatgcttgaagccggtgtcgtaccagatctttccacgtacaatgctgt

SEQ ID NO: 24815 - DNA, 465 bp, Glycine max
gtcaaagttggtatggtggtaaatggtggatgactttcagagcatacatgataatgttcctcagaagcccgaatctcattactgggactcgaagaactgattccccaaagcctgaggagaacttctttagtgacctttcaaaggccaaagaagacaatgcttctttgaatttaaacgggagagggtttctggttgcaaacagtaataaacctgttgaaattgaggaagataaaaggtcagaggcagcaaataagcgaaaaatgccttttgatgagatacgtgatcaaaagaagcatgacagtgatgttcatgccgatttacatgacagggctagagcctctcatatatctataacagaggagggttcgactgcagaaaatgaagatgtggctgactctgagactgagaactccacctccaggcccatctcacaccacagtgatggttccaaaggatttattagag

SEQ ID NO: 24816 - DNA, 330 bp, Glycine max
ctcctcgttagcagttttcgttctccattctctccattccttcgccatgtccgatctcggctccgatcttcctgctgccgccgccgctcttagtgctgaggatcgtgctggtctcgtgaatgcactcaaggacaagctccagctcctcgctgggcaacatgtggacatcctggagacactgccacccaaagtcaggcaacgcgtggaaattctcagagatctgcagagtcaacatgatgaggtggaggctaaatttttagaggagcgatcaaagctggaggctaaataccagaagctctatgaaccgctttacacaaaaaggtatgagat

SEQ ID NO: 24817 - DNA, 1100 bp, Glycine max
cggccaccggcttctggtttatgaattcatgaaaaatgggtctcttgataattttctattcctgacagaactgcattcgggaaattttttgaactgggagtatcgatacaacattgccctgggcactgcaagaggcatcacatacctacatgaggagtgccgtgactgcatagtccattgtgacataaaacctgaaaatattctcttggatgagaactatgttgccaaagtctcagattttggtcttgcaaagctcattaatcctaaggaccaccggcatcggaccttgacaagtgtgagaggaaccagaggatatttagcccccgagtggcttgcaaatcttcccataacatccaaatctgatgtttacagctatggcatggttttgttggagattgtgagtgggaggaggaattttgatgtgtcagaggacacaaataggaaaaagttctccatttgggcttatgaagagtttgagaaaggtaacataagtggaattttggacaaaagattagctgagcaagaagttgaaatggagcaagtaagaagagcaattcaggcaagcttttggtgcatccaagagcagccatctcagagaccaacgatgagcagagtgctgcaaatgctagaaggggtaacagagcttgaaaggccacctgccccaaaatcagtaatggaaggagctgttagtggaaccagcacatactttagtagcaatgccagtgcattctccacagttggagtctcacccgctggtccctcctcttcatcatcatttcagactagtgttgtttcaaccttcaccttgggaaggaaccctgagaaggcaacctcgtcccttttacaatcagacacatgacagaaattgcttccttttttcctttttcatattttcaattagaatcgattgaaagtcacattcacttgggacttagagctggaacagcagaagtaaaaaagctttgcctgtaaagccgtgtattttatttttttggtaagagaccataggtatcattcagataatgcaaccctgctcgaggtaggtagaatcactatgaatttcagatttcttcttccgtgtataatatgatattgattgt

SEQ ID NO: 24818 - DNA, 553 bp, Glycine max
aagctcttgacgaagctgggaaagttaaatttgttaacgtatcaggagatcatctagatatctctcgtagtgacatgaaaacttatatagtgccgtatttaactcatgaagcatcaattgttccaaggccaaaactaaaacattcttctggttggatttcttccatttggagctctctgtcggaaatgtttggactcagcgaagatttggaagttctttcaaatgatatttagattgaaaaaaaggtgtaaaagcaatgattttttttttgtgtgtgtgtgggcatgaaactgttggtctactttgagattgaatgagcaaccaggaagtcaagtttgatgatgaagagtgataaagtgtcaagtagatgaaaatttggaaacaagaatttgaaaattccaagtcagaaaatagttaccagcagttattgagagtgtttctcaaatcaactcagatgtaaagatcttagataatcgatcctgggcatttagatgtgcttgcataaggtttcttgattgttaagagccaaaaatctatgaataggactctttgt

SEQ ID NO: 24819 - DNA, 290 bp, Glycine max
ctcgagccgcacggttggatttgaagtttcagagtctagaaaagcagaaattgaaggttttgaatagaaatcagcaacgactttccctatggctggaacatcatggttggtggacaaaagtagaattgcaaccaaaataaaatgtgcatcaggagcttgtgatcatggaaaggttatatggaaaagcaatcctaccaaggcttgcccaaattgtcaacatgctattgacaacggtgatgtagcacaagagtggcctggcttgccaaaaggtgtcaaatttgatccatctg

SEQ ID NO: 24820 - DNA, 661 bp, Glycine max
tgatccatccatgcagtgcagatgtagttacaaaatagctgattttccaactctgcgttgactggtctcccacaaacagcttccaggcaatgacaatgagactttccctcccattttgttttctactccactctacccttccttaatcattccactctctctaaattcgctcaatcaattatctctctaaacccatggaacacgccttcctagccatcgtcgccgccaccgccagcttcttcgtggtcatgcttctccttgccgccgccatcctcctctgccagcaccaccgcaactccaccaaagccccaacccgagcacctcccttatccgaacccgctccgccccccaccgtgacgcctcctcccgctccgtcctggaaaactggtcctccgaccccaacctgatcaagatctcctgggaggagctcgcccgcgccaccgacaactctccccctcacctcatcgtcggcgatggcagcttcggcctcgtctacaaggcccgtctctccaacggtgccaccgtcgccgtcaaaaaactctcccccgacgccttccagggcttccgcgagttcaccgccgagatggagaccctaagccgcctccgccacccaaacatcgtcaaaatcctcggctactgggcctcaggcccggaacgcctc

SEQ ID NO: 24821 - DNA, 416 bp, Glycine max
ctgcaagggaattgcttaggcataagactatagacaaagttgtaatgtgtgacatagatgaggaggtggtgaatttctgcaaatcgtactttgtggtgaacaaggaagcattccgtgacacaagacttgaggtcgtgataacgatgccagggttgaactagaagccagagatgagagctatgatgtgataattggcgacttggcagacccaattgatggaggtccttgctataaactttacaccaagtccttctatgagttgattgtcaagcctagactgaagcaaggtggcatatttgtaacacaggcaggaccagctggaatatttagtcacacagaagtcttctcatgtatctacaacaccttaagacaagttttcaagtatgttgtgccttattcagctcacatcccatcct

SEQ ID NO: 24822 - DNA, 358 bp, Glycine max
tgcttccgaagaaaacttaaaaaaatatatatttttttaagttttacttcggaagcttttgatccaaacacgcactgcaccttctagagatgtcttgatgaattgatctgatcagtccatatgaaaacttaaaaaaatatatattttgtttttcaactttaatctttaccagacatggtggaagagactaatttccactttgtccatatgattagtttgtagttcgattgttatcggttcatttccgttcaacatttgggtttacgtgttattttaaccacacccattcaatttgtaccaaatttctacttacgaatacaattgataaaaaaatgattaaatattattttggtccttc

SEQ ID NO: 24823 - DNA, 497 bp, Glycine max
tgggaagactcaatatgtcaaatgggcatggcaagaaggggttggcttaagctcatctaacgattctttcttctttgatccatcaatccgtagttatttcaagaattatgtcaagacaattttgacaaggaagaatactataactggaattgaatatagaaatgaccccaccatttttggttgggaattgattaacgaacctcggtgcctaactgatccttctggtgatactctccaagattggatagaggaaatgtcagcttttgtcaaattgattgacaagcgccatcttgtgactgttggacttgaaggtttctatggtcctaatgatccgaaaagattgactgtgaaccctgaggattgggcatctagacttggatctgactttataggaactccaaaatctcaaatattgacttcacctctgtccatatctatcctgatcactggtttcatcatcaggtatttgaagactacatgaaatttgtctccaagtg

SEQ ID NO: 24824 - DNA, 353 bp, Glycine max
atgaagagcaactcccgccatccgagcacccatcggaaactggagaagatccacttgctgtagttgatcgtgatcctccagatgagaaggattcttaacattttgtaggtatacagacctttcaattcccaaatatccaacattacattcactgtatggaatatgatgtcatttttgtgaatctctgttcgatgatgtgaatgagatttatgagctcttttggaagtagtggccttggagtgctaggttcaaaatgattgtaacgtgtgaaaaccagtttctttgagtgaagctttgcaatgaaaaccaaattttatgtattatcacactttttcacaaatcatagtctttat

SEQ ID NO: 24825 - DNA, 271 bp, Glycine max
cagatgtgccgcctgccttgacaatttattccgtatctttacctaaggggcttgggaagggcgatattctgacgctggatgtcttggctgtctttacccactcattgcaaccatttccagagaaaatcaatcacgctgacatccagcttctactatttcaagaaagtgcacgctatctctccccatatgcagtcaaggtccaatcactcactgttaaattgcctgatgcaagactagagtcctatacaacactaggaaatgcacaacttca

SEQ ID NO: 24826 - DNA, 468 bp, Glycine max
ggaagagttgaaaaaacaggaaggagacaacgggaaggaagagttgaaagaactggaaggagagaaaggaaaggaagagttgaaagaactggaaggagaaaaaggtgaggaagagttgacagaactggaaggagagaaaggaaatgttgaattgaaagaacagaaaggagacaaaggaaaggaaaagttgaaagagcaggagccagagaaagcaaagggagaggaaacaaacctttttggacatgaagagaactctgagtcttttggtgtagaaggtgaagcccagttgcaaaaagaagatgctaatcctattaaagatggcggtgaaggaccaaagattggtgaaaattcagatcttggagaacaagggaaggtggagcttgttgaagatccagaagaaaaccctgaagaagatccagaggaacctccagaagaaacttcggcattggaggaggagcatagggaatt

SEQ ID NO: 24827 - DNA, 365 bp, Glycine max
atttggtgagtctgagcctgatgatgcagtgagagataatgccgctggtgccgtggcaaggatgatcatggtacaccctgaatctatcccattaaaccaggttcttcctgttttcttgagagttcttccattaaaagaagaccacgaggagtctatggctgtctatagttgtgtcttctctcttgtattctcatccaatccccagatcctctccctagtccctgaattagttaatctttttgctcaagtggtggtatcacctgtggagacgcctgaagttaaagctgtagtaggcagagctttttctcatctaatttcattatatgggcaacaaatgcaaccttttttgagcaattttccacctg

SEQ ID NO: 24828 - DNA, 970 bp, Glycine max
gaaagatgcgcctgcctatgaactattacgtgaagatgaagactggggtcctggcaaaagaaagcgaagagaaaaggagtctgatgctgttgattctcttatgactttgcatgaaagtgagaataggcatcccaataatgagcacaacatgacaagtaaagattcttcaagcataaagatcaaaaggcattgttttaggattccacgtgatgcagttgagaggcttcgccaagtttttgctgagaacgaacttcctccaagatctataagagagggtctttcaaaagagctgggccttgacaccgagaaggtcagcaaatggttcaaaaatgcacgttacttagcacttaaaaacagaaagcatcaagcagaaggagtagcagatcagcttcagagtatcacttctacaaagaacagattacaaaaacaggagaatgtcgatcctttgaaatcaaagaccccaaaaattactaggacacattcccagaaggatgttaaaaatgtcaatggaagaaagaaaatgaagtcatctaacaagaaaagacaaccagaaattcctccacctccaggagaaaatggcaagaaggactttatggagatcagtgatgatgtgagcttgaagaaactgttgaagaaaagaaagaagaggttgataaattttacgtttggaggagactctcagttggcagagttggaatttgaaagactaagcgaattgaagactaaagtagatagtatgaagcaaaaattaactgcaattcaaaattacagagttaagggttcaccctattcgaatgaaccatccattgtatatgtacccacagctgtgttaagggaaaaggttgaatgataactttaattgaaaaatgcacagtgggggaatacatgatttgtagttagttcctgtctttcctttgtagtattcaaagaaaggaactgttttgaagttaatgatattaatacttgtctc

SEQ ID NO: 24829 - DNA, 736 bp, Glycine max
tgcagaaggtgttgaaacaaagcgatgtgggaagtttggggagaatagttttgccaaaaaaagaggcagaaacccatttgccagagctggaggcaagagatggaatttccataacaatggaagacattggaacttcacgtgtttggaacatgcgctatagatactggccgaacaacaaaagcagaatgtatttgctcgagaacactggtgactttgtgagagccaatggactccaagagggagatttcatagtgatatactcagatgtgaagtgtggcaaatatatgataagaggagtgaaagtgagacaacaaggtgtgaaaccagagaccaagaaagtaggaaaatcgcagaaaaaccagcatgggacagggacaaatgcatcaactacagcttgtactgctgctaataatggcacgccatcgtcaccgaaaaccaaatctgaaaaaagtagtaaattaatataatacatagaatatgtatgtacaatatatattatattatattatatataataaaataagagactctgaagtctgaacacggtgctcacataatgttgaggagttttagcatgccctgcaatggaggctgtcaaggatttgtataacagtattttgggtatatttcttttcataatttattttgcgattgttatgtgaaaataataaatgggtttaacttggatgtacatgttacgttattagtggtctatgtgatgttcatttaagacttg

SEQ ID NO: 24830 - DNA, 489 bp, Glycine max
ccgtacttcatccaacagctccattatttgatcaagactcacaaactctaaagcctcgatgcgtgcgagccttgaagcggatttttatcctttgtgatcatgacagagatggtgccctcagtgatgctgagctgaatgattttcaggttaaatgtttcaatgctcctttgcaaccatctgaaattgtgggtgtaaagaaggttgtacaagaaaaattgtctgaaggggtgaatgaacgtggacttactttgactggattcctatttcttcatgccctcttcatagaaaaagggcgtcttgagacaacatggactgtgctcaggaagtttggatataatgatgatatcaagcttgctgatgatctaattccacctataaaatgtgctcctgatcagagtgtggagctgacaaatgaagcagttgagtttttgagggcaattatgatgcgtttgatggtgatggggatgggatgttgcgacctcgtgaact

SEQ ID NO: 24831 - DNA, 485 bp, Glycine max
gtcacatcaaggtcgtcctcttgtttcagtcaaatcagaaggagctgcaactgccaagaaggtccatgaggtcacaagacatgttacaaatccaccttcacaaagcacagaacgaagacagcatcaccatggagataattcaagtgatgattctggtgctgaagaagaagatattattgtgaggattgactcaccaagcacgctatcttttcgctagtcttcagggtgaagaatcttttgtgattatttgtttgttgtgcaataaatggtgcctctgtatcaccaacattgtacattagaacaaataggtgtatagaatagaccacgaggctgtattttatttacaataaacgtatttggaaatgggtgttattacttgaagttttttaagttgtaccaacattgttatagaaatacaatacgtttgagtttggtagacactcttcaatcacaaatcccctgggaagtttttctccatttaagtc

SEQ ID NO: 24832 - DNA, 333 bp, Glycine max
agaagttagaagtgatagtgaagaatctcatttccagcttccattatcttctcatctcaatcaggggggaaaatgagcgggcggtcaagccgcacaatttatgttggcaatcttcctggcgacgttcgcttgagagaagtagaggatctattctacaagtatggtcctattggtgacattgatttgaagatacctccgagaccaccaggctatgcttttgtagagtttgaggatgctcgtgatgctgaagatgcaattcaatatcgtgatggttacaattttgatggttttcggttacgagttgaacttgcacatggtggacggggatattca

SEQ ID NO: 24833 - DNA, 641 bp, Glycine max
tcttcatctaccccggggttttcctttggaggaacatccacatcttctgttacttcttccagttcccccatgatgtttggatcatctgctgttgcatcaactcctcagttttcattcacttctgctacagctactaccaacacacagcctgcttttggaagttctactcctgctttcacatttggtggttcagctctagctcctgttaataatgatcagatgagcatggaggacagtatggcagaggacacagttcaagcaactccacccgcaactcccgtatttggtcaacaacctgccccacttcaatcaaattttgcatttggagcattagctccaacaggagtgagtcctttccatttcgcaactcaacagaacattgctccacagaatccatctccatttcaggcttctggcagtcttgagtttaatgctggagggagtttctcattgcgcactggtggggctgacaaggcgggtcgaaaatatgtgaaagttagcataatagaccgcggaagaagtaagactatttgtttatgaaaattgttatttctgtcgctgctgcaggctgcacttcattaatgctactaattaataagctctaaaggggagtggttcctgagtttgtgtcctgttaggag

SEQ ID NO: 24834 - DNA, 1141 bp, Glycine max
cggccaatatggccttgatgacagcaataggaagtatcggtactctcttagctgggaatagcataccttcagaggatgaaaagattgctgtcttttctgatgcattaaatcatgcatcaataattgatggcattcgtctcactgagcggcagaaaagtgttaaggtgtatgtgtatagacattgtgacatgtcccacctcaatatgcttttatctaattgcagaatgaggaagaaagttgtggtgactgacagcctttttagcatggatggagattatgcacctatggttgagctagcagaccttcgcaagaggcatggctttttgttagtcattgatgatgcccatggaacatttgtttgtggcaaaaatggtggtggtgttgctgaggaattcaactgtgagaaggatgtagacatatgcattggtacactaagtaaagctgctggctgtcatggaggatttatagcatgcagcaaaaagtggaaactattaatacagtcaagaggtcggtcatttatattttcaactgctgcactagttccagttgctgctgctggtcatgctgcgattaaagtggcaaaacttgagaaatggcgtagagaggctatttggaaccgggtgaaagactttcatttgcttacaggaatacccgttacaagtcacattatatccctagtagtaggcagtgaagacaaagcacttcaagcaagccggcatttattgcaatctggcttccacgtgactgcaatcagaccacctactgtgcctcctaactcatgcaggctgcgggtggccctaagtgcagtccatacaagggaagatctggaaaaccttgcagctgcactctcacgttgcatcaatttccaagatacccgcatatatgattccaatgcctatgcaagactgtagctagctcttgatttttcaggatgaattgcgtcatcaacgattttgtgactatacaggtaataagtacacctttagttcctcattagcaagttcaagtcaattacattccaattagagtggtagcttatattccctcatgttatatcaaaatgacaagctattttgtcaacatctagataaatattgttaaatattgacatttatattttatatgtatttaattatagaat

SEQ ID NO: 24835 - DNA, 665 bp, Glycine max
aagataaactttacttcattgattatgaatatgcatcgtacaactacagaggctatgatataggagaccactttgcagaatatgctggctttgaatgtgactacgacttgtacccaaatatgaatgaacaatatcatttcctcaggcattacttgaaacctgaaagaccccaagaggtgtctgagaaagatcttgaaactttgtatgttgaggcaaatacattttcccttgcttctcacattttctgggcattgtggggtctaattcaggcaaagatgtctgcaattgaatttgattatcttggttactttttccttcgataccacgagtacaaaaggcacaaagagaagtatttcttgctggcacagtcctacctttcaggatgcaagaatgagatgagtagatagatagattatacttatactcagtcactcgtgggatttttgtacgtcatgtttgcagcatgagtctcctgattcatgtagtttaatgtttgtgtaaaatatcatttttagacgctagtcacaataatggctaattaatcgtttagtttgagctacaggctcttctacattctatgttgtaatcctagaacataggctatataaattgatatatcattctttttcttgtattgtgatcatcataaattttgatctgttatc

SEQ ID NO: 24836 - DNA, 366 bp, Glycine max
gctggatttactggaggggttttaccccaccaatgaaacttcccaactaaaagataaatctggtgcttccctacagggcatgcgctaatcctgtattataattttggaagccatggccaccttattggcaagggctgatccaggtgcagatcaccttctgaaccctcaaaccaagcagcatgccaaagcaattgctgatgagtggaggcccaacttagctagagcagatactgatgctgccaatggaaattcattggaagcaaaggcattcttccagcttatttcaacttttaagattgcttcagagtttgatgaagaagaactctgcaagcttgtacttgcagttgctcagcttaggcaggcacc

SEQ ID NO: 24837 - DNA, 720 bp, Glycine max
tctcgagccgaatcggctcgagggcaacattaccgttcacaagttactgggtaggttggacacacagtgcgatttctgccacaggtgcaaagttggcatttaagtccaatgaagagatagcttttcaagtaaggactgttcctcttgatgaagtgattccgaaatcagagcgtgtgcttctgcttaaaatagatgttcagggctgggaatatcacgttcttaaaggagcatcaaagttgctctcaaggaaaggaagccaagccccttatctcatatacgaagaagatgagcgcttgttacgggccagtaatagcagtgcaaaagagattcgagacttcctacgtagtgtgggttatcatgattgcacccaacatggcacagatgcacactgcgtcaagaaggattgatcataattttggttttcagtttctgctgcccctagatggaaaaccaagttattgccagttgactatgtcagctaattcttgagtggtggattggttgccgatgctgatggaaacgagttaagacgggtggcaactacatcgctaactgcaagctgcttcgtgatctctctatctgtccacgtagtttgaaatgcatgtgttattggacaagcatcacctatgattcttgggtaggtctgtttgggtttaggtcttgtatacatgcctttatttgtaggcatttgtttaatgaaatccacaatattccaattat

SEQ ID NO: 24838 - DNA, 314 bp, Glycine max
aatagcacgcagtccaacactcctaaaaaggaacatgcagggcaacggtctccagggaaacattccaaagggctagctcggtggaaaggcagggcatctttaagaaagactcaacctttgtatgcaagtatcagctcggaagctctttggttagacattcaagaatgtgcaatggttaaatataagtttgaattgccagcagatgctaggtcgcgtgtcaagaaaatttctcttatacgtaatctctgtctgaaggttggtataactgttgcagctcgtaaattgatcttagttctgcaactcccgtccacaca

SEQ ID NO: 24839 - DNA, 349 bp, Glycine max
catagagaaagcaactgctgagattagtatcttgaaggtagctgctacatcattgaaattggaacttgaacaagaaaaagcaactcttgcctccattaggcaaagagaaggaatggcctccgttgcagtggcatctctggaagctgaattggaaaagaccagatcagaaatagctttggttcagatgaaggagaaagaagctaaagagaaaatgaccgagcttcccaagaaactacaactaacagctgaagagactaatcaagccaacttgcttgctcaagcagctcgggaagagctacagaaagtaaaggcggaagcagagcaagccaaggctggagtaagtaccttg

SEQ ID NO: 24840 - DNA, 323 bp, Glycine max
gctaaatccaatttgaatggagacgataagaatataaatcactctgttcccccagaaccacagccatggagtccatggactgcacctaaaaagtcatggcagcaattatttactcgttcctcaactgttgctcaaccctcaaactcaaatgtaatatgtagaccaaattccaaaattcaagctgaagccaaaagcccacagttatctggccagtcaccaattacacagccatttcacaatccaattcaatttggtcttccatcaccttttaatatctccagctatccaattggatcaaccggtagcagtcaaggtttttctcc

SEQ ID NO: 24841 - DNA, 375 bp, Glycine max
gtcgagtggtggaggatgttgcgaagggataacatcactcactcccacccaaaagaatcaagaagagaagaaaagcaaagaggaagaagacacagaaggagaggttcaacatcttcttcatctatggcgacgccggattctgacgctaccactcagcctcaagattccgacactgctcccaattccagtcctcccaacgccctcgtccccgccgctcccgccgtttgcctccttcgcttcgccaccgactccgccggcggcgctctcatgggctccgtctttggatacggtgctggattgtttaagaagaaaggttttaaaggatcctttgtagaagcagggtcttatgcaaagacatttgcagtattgtctgga

SEQ ID NO: 24842 - DNA, 394 bp, Glycine max
gagaaaatgaaatttgggaaagggctgaaaatttgttggacacattatctaacaaggagggaaaaggagatggattcttggaggagaaggtgtgtaagctgcgagatgcaactagggatgaaatgaagcgtcgtgctttgcggaagagagaggaattgcttcaggggcttagaatgcgtctagaaccgtcttcagaatggaggagaacgtattgttgtttcccagcctgtccttgcaggtttagaagatgtccaggaggaggatgggctggcatgcatggtatgccaggaaggatacagtttaagacctgctgatttattgggtgcttactcttatagtaagcgtgtgaatctaggggttggttcttcgggaagtgctcgtggaggagagtgtg

SEQ ID NO: 24843 - DNA, 306 bp, Glycine max
ctcgtcgtaagtatgccacggataatgtaactgcttcaagttttcagaccatatatggtatggcagagtgcacccctgacttgtctgagaaagactgcaatgactgcttggatggggctatctcaaaaatcccaacctgttgtcaggacaagataggtggtagagttcttagaccaagttgtaatattagatttgaaagcgcaacttctacgaaaatacgcctattttaaacccagatgtaccaccaccatctccagcagtagcaattcctccctccatcaatagcacttccccaaaaggaagcag

SEQ ID NO: 24844 - DNA, 512 bp, Glycine max
gttctagatcgcgatctagaactaggagtctgtctgccagaggagtgatgaggaagggaattgttcccctcctacacaagaggaattggcggcagaaattcataggttagagttgcatgcctatcgttgtacaattgaggcattgcatgcatcaggccccttaagttgggaacaggaagcattaatgacaaacctccgtctttcgctccacatatcaaacgatgaacacttaatggagctaagaaatttgatttcttctgaaaacagcattcctttcagatgacaggaatttttttcctcttcaatttaatactttttccctaggatagagtttcggaatagtttgatctcagcctcattcaactgtaagaagaaagatgaaatatttcggtccttcatttatgttttatgacttagtgatatagtttgatgtgaatgtacactgctaaacttcgtaaataagtgatcatttctgaactctgtaatcagttcatctatgatatatcctctta

SEQ ID NO: 24845 - DNA, 392 bp, Glycine max
tctcactgttgcacttactacatctggccgtgtctatacaatgggtagtcctgtctatggccagttaggaaatcctcaagctgatgggaagctaccaatccttgttgaagggaaattgtcagagagttttgtgcaggagatagcttgtggtgcatatcatgttgctgttttaacttcaaggactgaagtttacacttggggtaagggtgcaaatggccgtttaggccatggcgatacagacgatagaaataccccaacattagtagaagctctgaaagacaaagatgtcaaaagtattgcttgcggaactactttcactgcagctatttgtttgcataagtgggtatctggtgttgaccagtctatgtgttcaggctgtcgcatgccattta

SEQ ID NO: 24846 - DNA, 301 bp, Glycine max
ctctgttgggcctgctcatgatgtgcctttcgacacttctgcccatgaggaacagttaagcagttctgcagatccatctgaacagaaaactccttcaggcaagacccttaagttgatatcaggatcatgctacttgcctcatcctgataaagaagaaactggtggagaagatgctcattttatatgttctgaggaacaagcaataggggtggcggatggtgttggtggatgggcagatcttggtgttaatgctggatattactctcgtgagctcatgtccaaatcagtggaagctattcag

SEQ ID NO: 24847 - DNA, 265 bp, Glycine max
cagaaatccattcactgcatgaacatgaaacttaaggccagcagaagatgtcagtacttcctctcttcagatccctatagcagtagccttattcaacaaagagcagtatatggactaggtttaaacaaacttggtaaggcaaatacggctcgtgttcattacaagtctgaggagcatgatataacagaagcaaagatggatcctctggaatcaactgaagggacaggtgaatccattctcctggaaggaaatgttccacaagtat

SEQ ID NO: 24848 - DNA, 392 bp, Glycine max
aaagtccattgctgttagagattattgaaggactacgaactaagaaaaaaaaaaggtaaattttgaagaaccttagaatgagctgagactatgcagcaaaataatgttgggaccaaattaattgggtaatgttggtgttggggctttagtggggcgggtgttacttggttgccgtctctgaggcataggaaattgcaatgcttcatccggcggcaggcagagtgacagtctgaacgggaattctgaggggcaaaggcaaagcgtttaataatggtggccaagcaaattaggagagagctttctcatatgcttccagttagggaagcgtatcaagttgcgcttaactcctgaggatgaccatgctttcctagctccacctcaccgcttcatat

SEQ ID NO: 24849 - DNA, 383 bp, Glycine max
gcgaagggaagaggctggtaaacttggctgttttctccattatcgcgtgctcggtttttgatcttttctccgtttgtttgcggaacaacgagtttcgaaatcccgtggagaacgtaacattctttggtttctggatttgaagatgaaggccacaaaggaattgagccagcatgtggaggaaaatgaggtcacggtcttggttgatgaggaggaggacgaagaatacgagtccgaggatgaagtagtagacgacggagaggacgatgaagacgacgacgacgacgatgacgatgacgaaggagacgacaatgacgacgaggaagatgatgctcctgacggcggtgacgacgacgacgacgaagatgatgaagaagaaggtgatg

SEQ ID NO: 24850 - DNA, 260 bp, Glycine max
gcaatccttctgctctacgtgaaacggttgttgaagtgcccaatgtcagctgggaagatattggtggtcttgaaaatgttaagagggaactccaagagactgttcaatatccagtggaacaccctgaaaaatttgagaagtttggaatgtcaccttcgaagggagtcctcttttatggacctcctggttgtggtaaaacgcttttggcaaaagctattgccaatgaatgtcaagcaaacttcattagtgtcaaaggtcct

SEQ ID NO: 24851 - DNA, 275 bp, Glycine max
gtttcagacaacgttgtaagatctctttccgggttcgggtgttttttggaatctgtcggcgctgcccttaagatcgccttcccctattccacgatggaagcgttttgagtcatagcagcgctacattaacaccccttgaggtttctctttagggttttccttctgggtcctcttttctcccaccttgttcttctaatcacgagtcattgacacctttctagctcactggagtttgtatctctatatgccaattgggcttttgccctctttagatt

SEQ ID NO: 24852 - DNA, 467 bp, Glycine max
cccatattgaccaatggctgcaaccatgttctcaaagcttttcaatttaatgaggttccatgccacacctgcttggtaccaaaagcgagcaatatgttgatgcaccttcaatacttcattcttatccattgactctcttatgttcatttgcctcagcatctccatttttctccgattgattgcattttctggattcttacagaatttgtccattggtccttttttagtcccacactttgtctttgcacttgcagcagcattacaagagtccgcaaactcatcttcttcacttccatcacatccaatcggttcaccaaattcaaaatctcttatatttgccatattaccactgccagaagtactgtaagtggttccacttttttttgtagccatatattccttcaaactcttcgactacatttgggggagttttcttgcaagctgcaacgttgcccgacttcccaatc

SEQ ID NO: 24853 - DNA, 401 bp, Glycine max
gagaaaggcactgtcctgaagaacctcctacctgccttgttcctgttcctgaaggttataaacgcccaattgagtggcctaagagcagagagaagatatggtattacaatgttccacacaccaagcttgcggaagttaatggccaccagaattgggtgaaagtaacgggcgagtaccttacttttcctggtggtggaacccaattcaaacatggggcacttcattacattgactttatacaagagactgtacctgacattgcttggggaaaacgcacacgtgttatactagatgttggatgtggtgttgccagctttggaggtttgctctttgatagagatgtacttgcaatgtcgatatcaccaaaggatgaacatgaagctcaggtacaatttgcgctt

SEQ ID NO: 24854 - DNA, 416 bp, Glycine max
gaatgatcgaggtaggactaaacgagagcgttccttttcatccaaaggttctgaccattctaggcatggtaggagtagacataacagaagaaagcatgtttattcatctgaagattctgacagtcagagggatgatcaaagtagaaagaatatacaaaagcataagagcaaagatagcaaaaaaagacattcatattcatatgagaattctggtcctgcccgtgatcatgctgataacaagagcagggatgcactttcttattcatctgatgattctaatcatcaaagacaacccaaggttaagaggagcagcctgaagcactcatcaactgcccattgtgattctcaaaagcatgacagaaattatggttttgatcgctaccaaggagatcagagcagagctgtgtctgaagatt

SEQ ID NO: 24855 - DNA, 513 bp, Glycine max
aagtcaggtcccaaaccaataattgtgcctattgttttgaagatggctgaatttgaccataaggcattacttgcggagtggatctctgctcgcacatttaatgacaaatgtcctgacctggataatgagaagcttatagccaacttgaaaaccatacaggattatctgtgctcattcacatcgcaggggttgactgtggtcaatgtatcggcaacaacatttcctcaaacattggattggctgcatggttaccttcttcagtgcatcgagcaaggtattaaagaaaatgttacaccagtagctccatcatagttcatgtaatgaatgcttccaattttgacagagtcggcttctcgttgcaaatggatgatgctggagaataacttatcaaatcaaaaggatcatggcttggggaaaagatagcagcataactgaataatagatgttgtaattattggattatcaacatttgctaccaaattaattgtatgatctatcatgtgttttgatgag

SEQ ID NO: 24856 - DNA, 426 bp, Glycine max
ttccatggtgaattgcttacatttattaactaatgaatgtgaaactgttgatacaaaatcttattcactgactgtagaattacctaaagaccctataaattttagattttgaaattttatcatctgcaattatttttcttaaattattgtcgtttgatgttacaggggttgactgtggtcaatgtatcggcaacaacatttcctcaaacattggattggctgcatggttaccttcttcagtgcatcgagcaaggtattgaagaaaatgttacaccagtagctccagcatagtccatgtaatgaatgcttccaattttgacagattcgacttcactttgtaaatggatgatgctggagaataacttatcaaatcaaaaagggaagtacgatcatgttcaaagctatctactcaactgatcgccagcc

SEQ ID NO: 24857 - DNA, 610 bp, Glycine max
ctgggataggctatgtgctgcaatttctgttaggaaggttagcgcgatggatttgtccaagaaatttgggctggaataccggttgcttcatgcaatcaccaacgggcattcctggtatggcaattggggttatgaatttggaactgcagctatgctcttacgcaagatgcgtacaagaatgcagtgaataccctgtcaagcatgcccttgtcctcattttcattccacggtcggggaccaagaagccgcctggagtgtgtcatttctctttaccagtctttggcagaaactgaacttttgacgattaaagatctattttcctttttgttgacattgattcttgaatgtcgtaagccagtggccatgaggacatctaagcagaccagtaacttgttgtgtgcttggacgggaaatgatgttgaagaggtgcaacatgctttgataaaggttttgcttgcatcgggtgcttgtactgaggctaaatgggtgacaagacgtgctctcaagggtgcagtatgcaggggtgtttcatctccagagcttctagactactgtcttaagcacttcccagggaaattaactgccaatggaatgatagtttgttcacgat

SEQ ID NO: 24858 - DNA, 262 bp, Glycine max
atcaggaggacaatgagagtgccaggattgctgcaaggctggctcttgatgccaacaatgtcagatcagccattggagatcgaatttcagtaattgtgcagaacactgcacttgatgctagttgcctgtactgctcggtctgtgttgcagcggcgccttgcccttgtcctcgttgcatgtctttcctgttgttgttgcagccactgctttgcagaaaatgttcatgactggtttttctggggacctggaagctgctcatgcc

SEQ ID NO: 24859 - DNA, 577 bp, Glycine max
tttccttgctagctagttgataccttcaactgggaaccgtacgagagagattgagattttgattcatcgattggaagcgtgtggcgctggcattccttcctggagcggagaagatgaccatcgacttggattcgatcgctcgcagagtcgaggttgataatcgcattccaatccgctattactatcggattgccgataacctcctcaagcaggcaactatctaccgggaggagcataatgcagttgacttgtacatcattctccttagatttttaagtttggtttctgaaactataccatatcatcgagattatcaagcttcactgcccaacgaaagagcagcatataagacgagatcgcgagctgtgttggatgagcttgaatctttgaagcccgaatttaaacgccgggtggaaaaaatgaatgactcacatgtaaaagctctattgcctgaagaaaatggtttcaataaggctttgcagagttcagtgaattcatctttgcaatggccggctgtcaataaacagcctgctgcgggattcagttcacagtcttcatggaattatgataatatgtt

SEQ ID NO: 24860 - DNA, 321 bp, Glycine max
gtttgttatctcaccatgtcgggtatgaaatgagaagaataagagtagcttggtctctttcgtttgaaacgacgagtttaattacacgcacggcgctttgatccttccttccttccttgatagttgctaccgtgcgagagagattggaagcgtgtggcactggcattcctttccggagcggagaagatgaccatcgacttggattcgatcgctcgccgagtcgaggttgataatcgcattcccatccgctattactatcggattgccgataacctcctcaagcaggcaactatctaccgggaggagcataatgtagttgac

SEQ ID NO: 24861 - DNA, 271 bp, Glycine max
atttgctttgagtcagtaaaataaatccatcagtcactgacttgatttctatgccaagaaaatagtcaagtttccccaactgtttaagggaataatgagaatgaagcttggtggtgagttgctgaaccagaacattggaggtacgagtaataatattgtcatctacataaacaagaatgtagatgatatgtcctttgtctttataaacaaacaaagtagggtcacactggctaagagagatgagagagaagggaagagagagaaacaggga

SEQ ID NO: 24862 - DNA, 296 bp, Glycine max
cagagaccacagactagtttttcttccacctctatggtcataggccaaaatggtgtcaccacatctaattctatacataactcttcccatgcttttgttgtccttctaccaatatcgcagagcgttcaagaactcaacccttccacctggtcctagaggccttcccataatagggaatcttcatcagctaaatagttcttctctttatctgcaactatggcaactctcaaagaaatacggtcctctattttctcttcaattaggtttaagaccagccatagttgtttcctcccata

SEQ ID NO: 24863 - DNA, 436 bp, Glycine max
aaaggtttgtaggtcaaatagcgatgtttctagttcacaaagggtggttggaaatggtgaagggatggttagttttgggaagttagctttcagtgataggaggaagttgcttgaggttactactagtcaggttcggcaaaaggttccagataagatgatcggaccgttgtttcctgggttgagggatgatgaggagaattttcagaaggatttggtgcttctgtggaaaaggagatcacttcttagtcaaatgtataaggttggtagtggtcagaatgatgagtataagacgagttctcaagaggcggttgatccaacgcagttagaatcggatgatgttagggcgagttttgatcgttcaaggtctatctctcatcctctgcctgaggaggatggtcacactcaatgcatcaagaggaagggttttcggggatat

SEQ ID NO: 24864 - DNA, 561 bp, Glycine max
caccaacatcctgatctaactgttccattcctaaaggcagtagtagaaattgtgaaggcatcaaaacgtgaagcttgcctgtggcccactcaggcagagtcgtttgccagatatgtcaggtctatggtctctaattcagaagaaacaacacaagacctgtgggaggacattttattcaagttaaatgattctagaagatatagacgaacagttggtcctattgctggttcatgtattactgctgcaatcccacttctagcatcattcaagcaagaaatatgcttggccgctctggatataattgagggtggcaccgttggcaatagcaaaagtagaagcagcttataaacttgaaagagaaattaaagaagcaacagaagaagcgctacaatcactatcattgtatcaactgaaggatactttggaagctaatgaagaagcggctgatgaaaacaggctgcttccggcaatgaataaaatatggccattcctggttacttgtattcagaacaggaacccagtggctgtccggagatgcttgaatgtgatcagcattgtagt

SEQ ID NO: 24865 - DNA, 272 bp, Glycine max
gaaacggatgcagggtctctccaacgagggtccttctgcttcggatcagttatttgcgtcgacacctgtgcctcagagcttgcatgactctgctcctcccagtaaccatagcaatggtcatgggcatgggcatggccatagcaatggccgtggtcatggtcatggtcatggtcatggtcatctctctgttccgatgatgtccatgccatatccacctcccctgatgtccatgccatatccacctcccatgatgtcgggcatgccccatggcc

SEQ ID NO: 24866 - DNA, 509 bp, Glycine max
gaaaattattgccgatgtcatagtagtgacactgtggtgctagagttcaatcattacactcctgctcacgatggaggctgaccactgtcagtaggaaagaccatagggaggaggggaacgaggctgatggattttatggcggaataagaaagattaccagcgaggcggagattgccacttggaaacgcctttggccatcggaagtcttggattagtaggcactggcactggatcggatcaaattctctacaacttagcatgatttcaatatagaagctttgtttcagcaactgaagcattgactggttctgcattatacatggcaatatacaacctgaagtggacttcagttcagatatttaggccaacccgattttcttctcttttttgtcacattttttcatgaaaaaatttatgcatattcatgtggtttccctcattgtaaattgttcatttaagcacaaatgtagaatattcattccactatatatagaacctagctgatgatc

SEQ ID NO: 24867 - DNA, 271 bp, Glycine max
ggcggagattaccacttggaaacacctttggccattggaagtcttggaatagtaagcactggcactggatcggatcaaattctctacaacttagcatgatttcaatatagaagctttgtttcagcaactgaagcattgactggttctgcattatacaacctgaagtggactttcagatatttaggccaacccgattttttcctgtcctttgtcacatttttttatgtggttttcctcattgtaaattgctcatttacgcacaaatgtagaa

SEQ ID NO: 24868 - DNA, 650 bp, Glycine max
agataatattgacatatatggagagaatgtagtttcagacagcaataaattatattcagaggaagtgaagaaggataatatcattagccctaaaatgaagaatgtagctgtgaaatggaattcctgttctgagaaagagcatcagttatatatttcagaagctgaactgcaaatgcatcaagctaagacaccattgtggggaaaaactgggatatattttcattcagtgggtaaagaggctattctgatgatggatgaagaagctgcttccggaggggaatttgagattgacaagattccaactcgtgtaatacaagctaggtcaaaagacttggttccaatttttgattatattcagacctcaaaatttcaacaaataaggactcctgctgtgggtaacgtgttatatgaacagcttctgcgtcaaagttcctttgaaaatggaaggatttcaaccaggggttttttgagttctcctgattgcatacctaattccgaatttaaaagtatgattgaaggaagtgagtggggtgatagtttgctttcagcaaaaacaaaggctttcgtaaataaaaacaacacccttaaaccaaatacttggccagagattgcaaataatagaagagagaacgtaaacatgaatgctcatc

SEQ ID NO: 24869 - DNA, 361 bp, Glycine max
ccatactcgtgctgcgcgcgtggaccccaacttccctactccaacagcatttctcgagtcttcaccaaacaatcgtgtgaccacgacgacgatggagatgcttcgcagaagcagcagaagactcttcgtctccgcgtgtctgtcgttgcttctgtcaccgtcaccgtcaccgtcaccgttgagtgtcgttagcgccgcccacggcgtgttctacgtgaagtgcaagtatcaggaccgcaccctctccgccctcaaagcccacgactaccgccgccagctctccctcctcgccggcgtcgacctccccctcggaggctccggccgccccgacgccgtcgggctttattacgctaaaattggg

SEQ ID NO: 24870 - DNA, 551 bp, Glycine max
ggaccaaaaatgattattttttgctggtacttaatcttagtaccacctagctcgcatttttgaatctggaatgatgtttagttagcatttttaatagatagaacgaattcggagtcataggaaacgtgatatttgttctttgcagatttatcataatgcatcttccaatgcgatttggagaggtcatgaaaggttgatctttgaccctgcaattaataattcaagttttatagcctgaattggcatcatggcaaatatccttggaagttgactccaaaggtggcaaccacgatgtcttacatctgtagttctgtttctcctgccgaaatgacacaagtcacaaattttggtttctggggatttgtatatatcttggagtttataaggggtcgttcaattttgtttataacagcctgtaatttgtgtaatcggtagatgatatgatatcattgtaatcgatgtgaaaagttatgaaagctcgattgtatcattttttccatttattttcaatgttgcctgaaattttaaccgatgtcttgtctgagactttc

SEQ ID NO: 24871 - DNA, 466 bp, Glycine max
attaataattcctttgtgattgttccaaatccaattatggcatttggactcaggacaaagagctttgggttcatagaaggagaggctcatgagtttgtgggtgcacttcaatggtggaaccagattgatgactcagatcaatggcagagaggcacttactatgccctttgtgccgcttatacgttggtctcctttgttgccctggtgcaactggtacgaattcaaaggagggtacctgagtatgggtggacaacgcagaaggttttccacttgatgaattttgttgtcaatggattgagggctgtccttttcggtttatacagaaatgtttttgcaattagaccaaaggcactagatcaggtgctaatggaggttcccggtcttctgtttttttctacttatgcattacttgtcttgttctgggctgagatatatcaccaggccagaagtgaaccggcacagaaac

SEQ ID NO: 24872 - DNA, 274 bp, Glycine max
gaggaacgggagcctcaagtttgagcagaatctgaaccacagcgacgtgagtttcgttgaatcgtcgtcgcagagcgtcagccacgcgccgccgaagctggaggattttctcggcgactcctccgctgttatgcgttactccgacagccagacggagacgcaggactcgtcgctgacgcacatctacgaccaccaccaccaccaccaccaccaccaccaccacggttcttctgcgtacttcggcggtgaccaccaggatctcaaggccattact

SEQ ID NO: 24873 - DNA, 254 bp, Glycine max
attatttggaatggatagcttcatgtctgtagaagatgattccaagcagagacaagaaacagttctcctccgaaatgttagtgtttctcagcatcatcaaaaatctcatagtgatcagagttggagagctgggttctcatacaggatgcgtgattatattgatcagatggagcttgtgtcttttgctgcgagaggtatatttatgaataatgaaacgaagaactctgctggccgtagcagagagatgggccctt

SEQ ID NO: 24874 - DNA, 427 bp, Glycine max
  unsure (1)..(427): unsure at all n locations
gtttatggctaagtggatgtttttctttgatgtggatgagtacatctatgtgcctcccaagagtactattaagtctgtgcttgattcgctctccgagtactctcagttcaccattgaacagatgccaatgagtagcaagctctgcctcactgcggattacggcaagacatataggaaatgggggtttgagaagctggtgtacaaagattcaaagaaagggattagaagggatcgaaaatatgcagtgcaaccaaggagtttgtatgcaactggggttcacatgtcacaaaaccttgcaggaaagaccactcacaaaactgaagggaaaataatgtactaccactatcatggaaccatagctgaaaagagagaatcatgtaaaatgcttataaattcaacagaaatcacnatatgacaaaccccctat

SEQ ID NO: 24875 - DNA, 543 bp, Glycine max
cttatgaaagtgaaaagcttgatgtgaatactatatcagaagtgattgttattgttaataacatatggaaggttggggacttggtagtttggtttgcagatggttgctattggtctggaggtgtgaccaaaatattgggaaatgataaagttcagattgatttgctacctcctccaatgggtgaagggttatcttatgatgcattaagcaaggatctgcgcccatctttggactggtgtccagaagaaggttggactgtgcctgttcctatgcctatgggtggtgaatgcaggcaaccttgtgctcgtataatgaatccagcaaattcagatggaacagtaaaggttggccagcatatggcaaggacagtttcttctcctttgtctttaaatttgaaagactgtccagaaagatccactgcgaggagaaagcaatgcaacaatgctagaaatgatatggagattgatgagtctggtagtaaagttgaaagtgtttgtttctcaagtaaccgttcaaattcgcacataatggatgcatcaattg

SEQ ID NO: 24876 - DNA, 251 bp, Glycine max
ggtgtgagagggccattcactccgtcacagtggatggagcttgaacaccaagccttgatctacaaatacatcacttcaaccgcccctgcgccaacccatctcatacccattagaaaagcacttgattctttgggcttctgcaacttttcaactggactcctaaggcccaacgcattgggatggggaggtttccatctgggattctcgaacaacacagaccctgagccaggcaggtgtaggagaacagatgg

SEQ ID NO: 24877 - DNA, 262 bp, Glycine max
cttttgaaaaggatgattgaaatacttggtggacaaccacctgattatgtactaagggatgccaaaaacacaagtaagttcttcaagtgtattgggagtctccagaacattgagagcagtgagagttctaaaaatggaagaagtgtttatcaaacattgacagtggaagaatatgaagctagagaattgaagaagccatcaattggaaaagagtattttaatcagttgaaccttgaagcaattgttacaaattatccctaca

SEQ ID NO: 24878 - DNA, 257 bp, Glycine max
caccataagaataggatgaaaggcaagaagcagaagctgcaaatggaggcagctagggagttggagcagggcataagtctggtcaaagctccatctgtgcttcaaaaggacccttctctcactttacccaagatcaaagttggggtttctcaacaacaatcagaggacaatcatcccatggaagagtgatgtcatgtcaatgctgcactttcaaccccagttttgtgattttgtgcttcataggtggattcgttgtc

SEQ ID NO: 24879 - DNA, 560 bp, Glycine max
ctcgctcaaagaaagtggggatgatgattacaatgagaagaagatcaaggtaggggatttgagtcatatattatttggtgttgaaccgatgaagttgacgagtccatccactgatgctgaagttgcgctcgctcttagagtcttggaagggtgttgtttgcttcaccctcagagtacggctctcgcccatcaacacaacgctattcaggttttaatgaatatattatccactcgtggagtgcttgagcaaggtgcatgcttagatgctctaatctcattgatggtggattcatcatccaatcaaatggatttcgagaaatgtagtggtattatggaagttgctgaccttctaagagaccaagaactggatgaagatctcaggttaaaatgtggagagtttttgctgctgctcattggacatgtcaatggaagagatacgcctcctttagcaactatacacgaagatacaaggcgccttcttggggagaaatcagcctccttgatatgggctgctagtcagttcggctcaacactagatccagagcagagactaacctcgt

SEQ ID NO: 24880 - DNA, 353 bp, Glycine max
gtgaggcaaaaaaggtcctcaaaaaaatgaaaatgacaagaaagaaggagaggagacgttgatgatggagaagttgagaagagtggtaaacgagatagcctatgctcaaacactctctcaccttcctcctcttcaccgctctctcgtccctttcctctccattgcctcatctctctacaaactcgctgtctcgcttcgctgctcactttaccaacgccgcttctttcaactccaccggttgccggttccggtgatcagcgttggtaatttgagttggggaggctacgggatgacgccgatggtggagttcatcgctctctgcttttgtcattacggaatttcacccctcgttc

SEQ ID NO: 24881 - DNA, 280 bp, Glycine max
gttcctctcacaccatcatctccactaccaacccacaatctcataacattctaactattaatttaatacaataaaatccaaaaaaataaataaataaccgttatttttttggttctgtgcagctcctgcgttctgctaaggattgctcacaccaaaaatcattgctttttagttgattctgtttcccttttgtttggttgattgagatgtggagagatccgggagtttcagctgattctttctatgaaatccgccccgaatgcaccgatgttcccgttac

SEQ ID NO: 24882 - DNA, 422 bp, Glycine max
gttcctctcacaccatcatctccactaccaacccacaatgtcataacattctaactattaatttaatacaataaaatccaaaaaaataaataaataaccgttatttttttggttctgtgtagcttttggagctggatccttgaattcttcacttgacaagtttttgtttctgggtttgcttgatcttcccaaagggtccagctcctgcgttctgctaaggattgctcacaccaaaaatcattgctttttagttgtttctgtgtcccttttgtttggttgattgggatgtggagagatccgggagttccagctgattctttctatgaaatccgccccgaatgcaccgatgttcccgttactcgatttaagatcaaggctggtaaaacactaagtgcaagaaaatggcatgctgcatttactcc

SEQ ID NO: 24883 - DNA, 267 bp, Glycine max
ccaacatcaacctctgttccttcaatcctacgacctccatcaagcggctccactttaccctcctcctcccaatccaccacgtttacggagtcagagtgcttgcctactatggcgggaaggtggaaccgtacggggccatcggtggtggtggtgctcctccccctgcgacggcgacgaacaaggttgttaaagcggtgccgaaggtggacgccgagggagacgcgaagagcggagtgcagaagtttcgggtgaagctgttggcggaaa

SEQ ID NO: 24884 - DNA, 293 bp, Glycine max
cgttactggtgcaaagcagtatacttttgagggtcatgaagcacctgtatattctgtatgccctcatcacaaagaaagtattcagttcatcttctcaactgcaactgatggaaaaataaaagcatggttgtatgataacatgggttctagggttgactatgatgcacctggtcattcttctactacaatggcatatagtgctgatggaacaagattgttctcgtgtggcacaaataaagaaggggaatcatttctagtggaatggaatgacagtgaaggagcagtaaagcgta

SEQ ID NO: 24885 - DNA, 432 bp, Glycine max
caactttgccctacctgcaagataataagacctgtccgatctaagcattgcccaacttgtaagcgatgtgtggaacagtttgaccaccactgtccatggatatctaactgtgttgggaagaggaacaaaagggatttctttatttttatctgcctgggaactttgacttcttccctttctggtgccgttgcagttcaaagaatttggacatctacaccagcattactggcaggagaaacatggatccattatgcgttagtaaaacatccagggttagttgtgtttttggtgatggatgctgttgttttttttgcagctacgacattaacgctaacacaggcttccatggtaattgcttaatccatagttgccattttcccttcccaataataatttagttctgtatcagcaaatatattagggaaaattact

SEQ ID NO: 24886 - DNA, 251 bp, Glycine max
gaaaaactccagaaaaaaaagcaagaaggtaaactgttaactggtaagcagaaggaagaagcccgtcgtctagaggcaatgaggaagcagattctcaataacacagggggcatgactctccctggtggggactctggtgctccagccaaaaaacccatatatcaaacgaagaaggtaaaaccaaataaccgtaatcagaatggtgctgctgctgctcagattgctgaaagtgttgaagcaaaggagactgc

SEQ ID NO: 24887 - DNA, 489 bp, Glycine max
ctcttctctttctcagtctgctccaaagccacaaatgttgtctctcaggctaacctcggtcacccacctcttctccccgccctcttccgccgtcatctctcgccggtccacggcgtctctgcggcggcgccaccacccccatccacggccactctccgcctcgttctccgcccagagcgcggcggcggagacccaggaccgagtcgagaactcgaagaaccgagtcaccgaacgagtcatcacgccaaggtcacaggacttcaacgcgtggtacctcgatatcatagccaatgccgagttggccgattacggtccggttcgcggcaccatggtcattcgtccctacgggtacgccatttgggaagccattcaggagtatttgaatgtgaagttcaaggagactggacatagtaacatgtattttccgcagtttatcccatactcatttatagagaaagaagcacgtcatgttgagggttttagtcctga

SEQ ID NO: 24888 - DNA, 724 bp, Glycine max
tccacgcgtccgaatctgctttgtggtttcaaagtaattttgtgggggggaacaagacttattcattgcttaagtaagcgttcctataaaatatagtactcaacagccttgtatttggtctttaccaccaaccttgaataactacaaaaacaaaaacaaaagcccacatgcatgccaattcctcctcgttacttttacctgcaaaagtgccaagtccttgcatcagttctctattgttttggcctcaaagttcagatcatgctttccttttcatttaagaatatctcagaatttgagtacactgctaatgtccagatggaattggagtaaaatgtggataacaaacactttaaatagaagttactgacatttgttgttccaaaaaagagagaaataattttggtgttgtttgcatatattcaaagaaccagttacttttcaaatgcaaatgtctcagaaacataaaatgtcctatgactctagcaggttcaccagtgagcctgtgcaaaatctggggtcatgttgcttcctgcaaagtgggaacctagactactactcatcctctgataacagtagccatgcaacctacccttctgtttgtactttcgaacaatattgcaccctggaaatcttctacaaacaacaatttaccttccctaaattcttcatctactgtcagtttctcacctaacaatagcccagtctcaaagctgcaatcaaaatc

SEQ ID NO: 24889 - DNA, 480 bp, Glycine max
tcggcttttacctgcaaaagtgctaagtccttgcatcagttctctattgttttggcttcaaagttcagatcatgctttccttttcatttaagaatatcttagattttgagaacactgctcatgtccagctggaattggagtaaaatgtggacaacgatcacggaccttaaatagaagtacctgttgtttgttgttcaaaaaaaagagagaaatcagaaaattcaggagtgtttataccagacaaacattttggtgttatttgcatatattcaaagcaccagttacttttcaaatgcaaatgtctcagaaacataaaatgtcctatgactctagcaggttcagcattgagcctgcgcaaaatctggggtcatgttgcttcctgcaaagtgggaacctagactactactcatcctctgataatggtagccatgcaacctacccttctgtttgtattttcgaacaatattgcaccctggaatc

SEQ ID NO: 24890 - DNA, 632 bp, Glycine max
tcgccctttcgttcgacgcctcattggtcgtcaagttaatgttcaaatggaatattctagaaaggtttctcccacagatggatctgtagttccatcagcagcttctgattcccgagtaatggattttggatcagtcttcctattgtccggtgcaaaggttgacaatgatgatgccccatcatctgctccacctgctggaagtcagcaaaatggggtgaatgttgctgagttaatagttggccgtggctttggaactgtcattagacatcgtgactttgaagagagatctaactattatgatgctcttcttgctgctgaatcacgtgcaatttctggaaggaaaggcacccactctgccaaggatcctccagtgatgcatataactgatttgaccacggcatcggctaagaaagccagagacttcttgcctttcctgcaccgaagtagaagagttcctgctgttgtggaatatgtgctcagtggccatcgttttaaattgttaattccaaaagaaacttgcagcattgcgttctctttttctggagtcaggtgtcctggtcgtgatgaaccatattcagacgaagcaattgctctgatgaggagaaagataatgcaaagagatgttgagatag

SEQ ID NO: 24891 - DNA, 392 bp, Glycine max
gagttgaaaaaccagctccatatgctcgcgaagcaaaggagttcttgagaacacgcctcattggtcgtcaagtaaatgttcaaatggagtattctagaaaggttggtccagcagatggatctgccggttccatcaggagctcctgaagctagagcaatggattttggatcagtattcctacccagcaccgttaaggctgatggtgtatgatgccccttcatctgttccacctgctggaagtcagcaaaatggggtgaatgttggggagttgatagttagccgtggctttggaactgtcgttagacaccgcgactttgaagagagatcaaaactactatgatgctctccttactgctgaatcacgtgctatttctggaagaaaagggatccat

SEQ ID NO: 24892 - DNA, 589 bp, Glycine max
ctcgagccgaatcggctcgagcacacacatcttctaattcgcttttagtcaacctctttattaactggcacaacccgtgatggacaatataaatagcaaaaccaccagcaacaccaccctttgtccacgagagaaagaaatcaatcacatcctatccaaattcaaatcacgaagaacaagtaaaaaggaagagatgggaaatgctatggggagtaaaaaagcaaaggtgatgaaaatagacggtgaaacgttcaagctcaatactccagcaagagcaaacgacgtcgttaaggactaccctggacatgttctcttggactctcacgcggtgaaaaacttcgggcctcgggccaagccacttgagcctgactaccagctcaagcccaagaagatttattttttggtggagttacccaaggttaagcccgaaccattagtaacgaggagggtgcgatccagtggaatccgtggcatgaacgcccaggataggcttgatttcttgatgctgtcgaaacgctccgtttcggaccttaccatggtgaagcatgggcccaagccagaaaatggtgggcccacgagggtcaaaatg

SEQ ID NO: 24893 - DNA, 279 bp, Glycine max
ataaaattctgagataagtgattctctgccttttcaattttcattttaaaaaaaagaaagaaaaaaaaaagaaagaaagaaaattgtgcatgctggttcttgaatgatcttcgtcctggattcagaattttcggtgacagatctctgctcggacttccataaatgcatatctgtggatgtgttccaccttggctctgtcagattctcgcttgcatgggagcagagttgtctgggatgcttcccaaatcctaaaggccaatcaacaaacaaagacaacag

SEQ ID NO: 24894 - DNA, 277 bp, Glycine max
gtaaacttcgttcatattatggctgtcttttgtgatggtgggataggggcagatatttattatatgtagagaacgggtcaagttttttggccaattttgtcttaggcacaactgccaagtgttttatcagttgtgaacaaagtcttattttgtgttgctaacggctatggatgtaagcacttgaaattattcatattttgctactcattgtgcaaaaaaaaaaaaaaaaaaaaaaaaaaaaaaaagggggggcccccaaccatggtcctcgtccccc

SEQ ID NO: 24895 - DNA, 562 bp, Glycine max
ggaataggggatgggatcagtttgaaacaaatgaggcattgtttggtgtaaaaagcacattcaatgaggacctttatacaacaaagcttgaaaaagggcctcagacaagagaattggaaaggcaagctttaagaatagcaagagaaattgagggtgaggaaacccaagatcttcatcttgcagaggaaagaggccttcacttacatgaagactttgatattgatgaagaaactagattctcttcagtctataggggtaaaggtgttgatgatagtggatatgatgaaaatgaggacaggctcttggattcacacaattctgaaacttttgataatatttatggtttagtcaataagagcccaggtgaagcaagtggtcggaaaggcagtaatggagctcaaacgtggtcaaatttctcctctgtgtttcatgcacagaatcactcagagttatctcagtcaagttctggtgtggatttatgtcgctctggttctaatgatcatgctaagcagttagcatctgaactccctgccctgagttgctcattttcagatggagaaag

SEQ ID NO: 24896 - DNA, 308 bp, Glycine max
cgttagtgttagcagcagagacagagaagtaaacaaaccctagtgaaggaagagatgattcgcagaatcatcgcagtggtgagcagatcatactacacgagcaggtcgaagaaaccgagcctgtactcgaaaatcagccccctcgggaatcccaacactagtgtggtaccggtgctcgacgatgggtgttcaaggggaacaagcttcgtgtcgcagaacttcaacgcatcattcgtgaccttcgcaaacgcagtaggttctcccaagccctccagatatctgagtggatgcacaacaaaggtgtgtgc

SEQ ID NO: 24897 - DNA, 393 bp, Glycine max
ttggctcctattcttcagtttgctattttgggcttgagcttagtatttgtttttgtatgacattcctgaaaaataattctgtgttttcccctgctccaaaaatttacctcttccagctcatttatttacaaatttccgccagaatgtccaagtgcgggtgaggggttatcattcatgttatataatattatttacccttctcagtatttgaacttcgtgatagagggcgccaatatcttgccctacacaggttttccgtgtgttttttccccctttcttttttcggtggtgggatgtgttggtaggaaaacatgcagtgagtatctaaggcccatttttcactaatgtagggaatcatcagccgttgtaaatctgtattaaactgttgagtat

SEQ ID NO: 24898 - DNA, 335 bp, Glycine max
gcactctttgtttgtcctcagcttctgaactcaaccaagacaaagccatgcatgaaacaaatatgatgaaggccaattctaacttgcataaaagaaagtctagcttgattagtggtggacatccttctgcattcaagaagaggatatcaagaaggggaagctatgaggattctcttgaagttgaaagaaagcagctagaggataattttactacagaagacaattataatgagaatgaggataagaatgatgttggtgacaacacggatgcagaaaaagcaagagatgatgatgatgtagtggatgaccatcaagaggcagcagagtacttacca

SEQ ID NO: 24899 - DNA, 460 bp, Glycine max
gtaggattgtcatgttcttgttctgtagtaatttctaattacctactactccattctggagtatggagtagtaggtgatttggaattactacagaaggattgtcatgttcttgttctgtcccctactactccatactccagaatgcatgaatctgagctttggatgttctggatccgcaaaccccctttctggatctgggtcatttacatctaggcctttgaaaagtagcttggaggatacatctggtgcaacagatgtttcaacaattgagaactcagacactagaaatcctgactattacggggatgagcatctttctactactgctactactacctcagatggaaagttagttcaaggaactggtgtaagtgctgggacctatgaacatacttccatttcacaacaagaggctttaaaaccggacccccctgaaattgctcaggaaatcagtattca

SEQ ID NO: 24900 - DNA, 370 bp, Glycine max
tgcagatgttgatgcccatgcaaattctgagtgctatgcaaactcgtcaagctttgctgaagctgattggcagcagaaaactcacttggatgaacatggagctgaagatggttctgttgagaatgcagacaatgttgaatctgcttctatatctgctaaaagtacgtcagaggataacacaggagctgaagatgatgtttcgtcagtggctgcaaacatagagcagctaaatatacagagagatgatcaggggacagaacaagaacatgacaatccttctgtagtaattccaaatcacctactactccatactccagaatgcatgaatctgagctttggaagttttggatctggaaacccctttctggat

SEQ ID NO: 24901 - DNA, 408 bp, Glycine max
gaaaaattcaaggttcaatgcgacgaggattatgacccttgagagtcctgtgaaggatgaagcacatgaaacttataaagatgaagattcaccattgatcaagagagaactctctgattttgatctccaagatcacgaagctgtggcaagcaacgcacatgatacaacagataaagaggtagagtaccccattttgtatgaaaaccaagtcaacaatgaattggaagacaaaagtgatagattcagccgaaagagtgttgatacaaccgaaagcggacacaccagtgatcctggaattggcatggctgattcctgggcttctccaaagttcaagagatacttatccaaccttgaaaagtttcatgagcatgggaagattactcgtcacttgccagcggcttcaaagtc

SEQ ID NO: 24902 - DNA, 307 bp, Glycine max
ctactgtgtaaatttcacccattaatatgaatactgtctaattgaatgtgttgcttgcttttaatttacagaaaagagatgatgagaaatggatgaaacatactttggggtaagtcatgtttcatttaaattgttatttacatcagtagacatttggatttagccggttctcttcatttctagtgggaatcctgacccttttagtgtatacaagctttttttttttcttaagtgcatcagagtttgagtcttgattctcttgtattggtagagaaaccaaacagtaaataaaccgtgacgcaagtga

SEQ ID NO: 24903 - DNA, 293 bp, Glycine max
caatattggtattattctgataacccaatattgagagtgtgaaaaaggctgctgttattcactacaatggccagtcaaaaccttggttgcaaattggctttgaacatcttcggccattttggaccaagtatgtcaattattctaatgattttttgaggaactgtcacatcctggaagcatagtctgccaatgtggagcacaatgttttgtacaacagtgaatgtgaaagggacgagtaatattggtttcatctaaatttttgcagcttgaaattttcttcaagtgaatttgac

SEQ ID NO: 24904 - DNA, 356 bp, Glycine max
atagcacagagccacttcctctgatggaaggtgaaggaaaagcattcagagtccttggttttaatcaaaatcagagggctgcatttgtgcaaattttgatgaggtttggggttggtgattttgattggaaggagtttacttcccgcatgaaacagaagacttacgaagaaatcaaagactatggaacccttttcttgtctcatattgctgaagatataactgattccgccacattcgcagatgccgttccaaaagaaggactccgaatccaagatgtacttgttaggattgcagtcctgctcttgataagggacaggtgaagtatgcgtcacacattcctcaaactccattgtttt

SEQ ID NO: 24905 - DNA, 388 bp, Glycine max
agataaaaagatcacgcttagccagctaggtgggaggacctggctatagcaaaaacttctccaccagagacagtctttttggtttgaaatcaggaaaggctgcccctggttttggtattggagctcttgaggagcttgatgtggaggatgaggatgtctatgccactggttatgaatttgaagatgcttatgttcaagatgttgaagaaccttcaacgttgagattagaaaaccagagaacgaaagagcagaaggaccagggtgatctgcgtggttttagagttgcatccaattctgactttaaaatggaaagattcgaggctcctctgattcccaaggattttgtgccccaccatgaattttctggacctctaacattaaccgcaag

SEQ ID NO: 24906 - DNA, 574 bp, Glycine max
cggttacttgtttccttgtagaatctctccccttccttctaagtagttccattattattattattcctaaccctaacctaacttaaactaaactaaaccctttcacacacttgttcttcactcaagtttcttccctgggcgaccatgccgtttccgtggaagaaaaaccgcgtcccccgaatctcccaattcgtcgccgatctccaatcgccacaacgcggcggttccctcgtcggcgagaccggcttccccacctccctcatcgtcctcttcgtcaaaaaccaaagccgcttccaaaaacaccgctccaaaaaaaccgtcaccgccaaaatccctctcctgcaccgatcctccgccgcctcctccacctccaccgccctctccggccacttctccgcctccctcacgcgtccccgccgtcccaaccactccagtagagcaagacgacaccgccgtttccgctccggatcgaattaccgaatgctctggctctcactggtctcgtgtgaacgccgtcgtcctcgttgcaaagattctgatggtgttggtcttagtcgcgagcgggagaggctca

SEQ ID NO: 24907 - DNA, 293 bp, Glycine max
actaaagggttttattcattcagggacgggggtttggtgaaatgtgagatctatggtgaagtccaagtaaattcccggatctcaggttttcctgatttaaccctttcatttacaaatccttccatcctcaatgatgtgaggttccatccctgtgttcgttttcggccttgggagtctcatcaaattctttcctttgtgcctcctgatggacaatttaagcttatgagttacagagttagaaagttgaagagcaccccaatatatgtaaagccgcagttaacttcagatggtgg

SEQ ID NO: 24908 - DNA, 257 bp, Glycine max
tggattatcagagtcgcattgtcgattcagagaaaaaaaaattgaattcaatctgatagatcctatcacagcaaaaaaaattggattgaataaggtgtttccgattgcaaaaacaatcacacaaatggttaataaaagttaggtttcttaatttctgcttcttattacatcatcttaaatctttggttttggatccatccaataatcatggagagcataataagcaagctccgcaacctagacgcctaccctaaaat

SEQ ID NO: 24909 - DNA, 332 bp, Glycine max
tggccaccggtggcgatttgtgggtcagagttggcggcggacgcgagattggtggcggtttcagccacgagagcgagcatgatttggcgctcatggttagcgattttttagaaaatggaagtagtggcgcagagtcttggtgtagcagtgatagcgatactggacattctgatttcgctcaactcgccgagaggattcagatctgtaagctgtcagtggctcaacatgagagtgacttgctttcagttgtccattccctcatacggtcaatgaatgagaccaaccttcaagttatgaattctggtccatgttatgctagctgtatcaggttt

SEQ ID NO: 24910 - DNA, 256 bp, Glycine max
gtcgattgcgcataatgactgcagcactagccaaaccaaaacacagaaggcatctaaatgattgaaacagatcctggtgttgcttccccccctcttacaccaatgttggtattgatgctttttcttgataaaattggatactgttaaatttattcattgaacagtactccaaggctgtattttattaccaggggcaatgctatctggtaactattattcttcttgatgattcaatgctcgcctgattaaatttttg

SEQ ID NO: 24911 - DNA, 472 bp, Glycine max
ccaaattccaaaccatatgtaaacagtaaaccaaactggactgaggcgagaaggagtagagcatagtatggagcacacagtctcaaactcaagcagtgtcgagcagattctgaatcttctctacgcagccggctacgtcgacgccacaaatcccgatgcgccgccgtctcagaaaatcgccgccggcctctcctggtgcatcgccgccataacaggcgacgacaacacacgtgacatcgaggaatcgtttggattagttggatgcccgcaccctctgcgatcctctcacattcaggatcttgataccgatgctctttttcctgtaattcagtggcttgcgtcacacattcggcaaaatcaagaacactgtgtcaatgaggttcatcatgctgaaaataccattgaagtggatgagtgtagaacttcgattcaggcattaagtggcaacttggatgaactggttggtgagatg

SEQ ID NO: 24912 - DNA, 298 bp, Glycine max
gtgagttgtctatctttctcttcagatggagccttcctctactcaggtgggaaggaaggagttctcgtgatttggcggttagacacaaaaaagaattattgcttaccaagatttggatctccacttttgtattttgtagattctcctgatcgatcacttttctcaatatctcatgcagataatcaaatgcttatattgaagaagccttcaaagccaatggaaataatcagctgtatttctggtatcaagccccctttgtcttctcaagatatatgtgaaggtctttccagccgagttg

SEQ ID NO: 24913 - DNA, 293 bp, Glycine max
  unsure (1)..(293): unsure at all n locations
gcacattctacaattcgctacgcattcattccattccattccattttgtgtcggtcctacgaatgaggtacgagaagaagcggtgctagaatagatagatacatagatagagaagagacatcatcgaacatctcgaaagagagggaaaatgggtagttacgaggcgttgacggagaagccggcgacggcgacgaagtgggtggtgacgtgcatggtgggaggggtgatcgtgggggtgtcactgtgggtgcatactcgagcnagctctggaagagccgaagacgcaacaagag

SEQ ID NO: 24914 - DNA, 467 bp, Glycine max
tccgggttctggcttatctgcagagattttagctccagatatgaattgcgacctaacagcacttcaaaaatctattatctttgactctatgcacgtgtctagtttgcaaatagatggcttttgtgttgagttgaaatgttcctataattcatacctgcttgagagagatcagctaacttttaaagcttatatccagcaaggcacaaggaacaaattaaatcaagtcttatcaaaatcagataattcatgggactcctatcaatgcaaaatgtcttccaaaacaaaagctgaccttttggctgactacattgcatttatgaaagatagacagtacatatttgttgattcatgctgggacgcgactaccttaatcttagattgtattatccatcaagctttctctcaggatgccattggagatgcagtataccatataaaggaaaatactagtgcccaagacatacacc

SEQ ID NO: 24915 - DNA, 478 bp, Glycine max
gtagaattacactcgacattttccatgatcctgtaatcactccaagtggacttacatatgagagagcagtgattcttgagcatcttcagaaggtgggtaaattcgacccaatcacacgggaaccccttgatccatcacagttagtgccaaacttggccattaaggaagcggtcgaggcattcttggacaaacatggatgggcctacaagatagaataacggaagatcaccttgcaaattaacaatgtcttggtaggtttgtctgttgagcaatgcagcaggatgttgtgttctgcaagtgtggccaaagttgtttgctttaattgttaattatgtatgcagtttccttgggggcctgacttttgaacatcttattatgaagtatatatatgcatggttgactgtcatacattgtgtaaatatagtagtaaacataccaatgcctgatgagactgtttcatttgtctcataaaatcaaa

SEQ ID NO: 24916 - DNA, 1047 bp, Glycine max
agacaaaatgttgtgacccgacccaaatgtgggtgacggaacgtagggttagggggtagggttaacataaacgaaatcggcggtagaaagaggaatgaacatcagggttacaaaatgctgagaagaaagccaaccaaaatcgaagccaagatcgaagacaaagaagaactcgaggaagctcgccgccgcaacgcttcagccaccaccaccgcccccgctggcaccgccgctcttctccgtcagctggatcgcggcggcgaagatccctctttccaggcgcatcgcatcggcctctcctcgtaaaaccctaaccgcactctccctcctctcttccccaatggaggtcgaagtcaagctgcgcctcgccgacgccaacgcccaccgacacgtcaccactctactctccccctttcacgtcatcaccccaccgccagcagaacctcttcttcgacggcgccgcctccgagctctccgcgcgccgcgccgtcctccgcctccgcttctacggtgacgacgagcggtgcgtcgcttcgctgaaggcgcgggcggtgctagtggacggcgtgagccgcgtggaggaggacgaggaggatctggacccgaggatcgggcgcgcatgcgtggcggagccggcgaagttagggtcggtggagtctagggttttggggagggtgaaagaggaattcggaactgaaaaggggctagtggggctgggggggtttgggaatttgaggagtgtgtatgattggaaggggttgaaattggaggtggatgagaccaagtttgactttggaaccctctatgagattgaatgtgaaagttctgatcctgaaggagctaaacgcctcctcgaggaattcttgaaggagaatgaaatcaattattcttactccactgcttccaagttcgccatctttcgatctgggaaactaccttagtgagtcaaattttatgtcattttaaattatgctcctttggtcaagagtgtttaataatctttattgtttatgtgccaatttctttgtttatgtatgtttgatttattgg

SEQ ID NO: 24917 - DNA, 269 bp, Glycine max
gtgaggtcgcaccgccgtcgcaggaccaccaccgcactaggccgcgtcgaacatcgcactaggtcgcacgctgctgctctgcaccgccgtcgccgatttcgcctccgttttgcgaactgaactgcacttctccttattcccaaggtttctctacactgttaatttgttctcttctctcatatatgattttcactgttcacttggtctcgcagctcttttgtgtgttagtattttgttctttgttctcttcagttggattgttctcacag

SEQ ID NO: 24918 - DNA, 290 bp, Glycine max
cccggcctctcctgagtctccttcctccaacaatctcgcggcgcctctgtctctctctcggtccctccaagtccaatgagtctgcgcctccgctcgccacctctatgtcgttgtgctacgccatcgaggtcaccctcacaacctcaccttctacctctgcctcagtgagtcttccccgccgctgcgccatcgttcctcagcaacttcgggtcgtccttgcacaacgccgtcgaggttgccctcacggcctcagcttctacttctgctttagcgagtcttcccctccgcta

SEQ ID NO: 24919 - DNA, 371 bp, Glycine max
gggatatattgatagaatattgggacaaccatcattgatccgagagtcatccagagggaaatacccatggtctggcatgttttctcgcaccatgagctccctatcacgacatactaatccaggatctgctttgaaaaatggaaatggttttggtgatgtgattttgcatccttctcttcaaaaaagaattcagcagttgtcttctgctacggcaaatacaaaagcacatcaagcgccattcagaaacatgctttttttatggccctcctggaacaggaaagacaatggctgctagggagttagctcgtaaatctggattagattatgcattaatgactggaggtgatgttgctccactgggatcacaggct

SEQ ID NO: 24920 - DNA, 486 bp, Glycine max
cactctagccgaatctggcatgaatctttcagatgatgtgatcgaaagtattattgacaagacatttgaggaagctgataccaaacatgatgggaagattgacaaggaagaatggcgaaaccttgtcttacagcatccatcccttctgaaaaatatgactcttcagtatctcaaagatatcactactacatttcccagttttgtttttcactcacaagttgatgatacttgaggcaaaccacagcatccatgtcagtttcagtgttcttgactgggaatggtcttagattgacttgtgaatgatgaggttctatgtgaaggattcggtaaggggtggatatggagtttatttatattttcattatagtagaactttgtctttccgtttttggatgaatgaggtttgtagattgacaaatgggtttgattatttatttatttacttcatttgagaataaaagggggaacagaatagaatattcaggc

SEQ ID NO: 24921 - DNA, 280 bp, Glycine max
ctttgagagggttaacgggaagcttgtgaacattcttggagggcttgagctgcacactgggattttcagtgctgctgagcagaagaggattgttaattatgtcgcctcgttgcaggaaatggggagaaagggggaattgaaagagcaaacgttttcagctccccaaaagtggatgaggggtaagggacgccaaaccatccaatttgggtgctgttacaattatgcagtggatagagatggtaacccacctggtattcttgggaatggaatggttgatcct

SEQ ID NO: 24922 - DNA, 358 bp, Glycine max
gctgaaaccaagaacgtataccaaatatgttgcttggggttttcctgatcgtagcttgagatttattagctatgaacaagataaacttctttcaacacatggaaatttacatggaggtaatcaaattcagtgtgctagtgttagccatgatggtcacattctggttacaggggctgatgatgggctagttaatgtatggagagttagcaagtttgggccccgcgccttacgacgcttgaagttggagaagccactttgtggtcacacagccaaaattacatgccttcaagttagccagccttacatgcttattgtagtggatcagatgattgcacagttattatatgggatctcagct

SEQ ID NO: 24923 - DNA, 790 bp, Glycine max
cctcgagccgaatcggctcgagcaggtgtcaccaagagttccagctcgtagctatcttgtcagcactgtttcctacgagctgaatgtcctatgcactagagggccaagaagaatgtactgtgtcatgaactccatacctgtctcagctattcaggaaggcggcaatgccccaactccagcatcttaccctcaaatatttgatgaacatttttctccatcaccagcactgaaagaaaaagttccagtcacagatttaaactctgcaagcttatcagagccaccagtatcgagccaaggctcaaccgagcaattagcactgaaaaacagggctcccagatggcatgagcagcttcagtgctggtgtctaaacttcaagggtcgcgtttcagtggcttctgttaagaactttcaacttgtagctgctgttgatccatctcataatatttctgccgaggagcaagaaaaggtaatcttgcagtttggaaagattggaaaagacatatttaccatggattactgttatccactctctactttccaagccttcgccatctgcttgagcagctttgacactaaacctgcctgtgaatgagaggtgttgcattactacattgtaatcgtcatctgctgagttgttgattgccaatcctggtggcatacagctgaaatcatagctgtgctgccgttggaatcccccccttataaattggttgttgattctggaatttattctgtcttttgttttgtggtcctgtaaaattaaattaaatgaagtttagtgaattctatg

SEQ ID NO: 24924 - DNA, 475 bp, Glycine max
gtaggttcaatattgcattacaacaactgtggggcagcagttacagctgatgctgagcagcggaggatgggtagaaatccatctgtttcagcccagtatgctgctccaagcagttcatatccaagacgaaacccaagctgtaaaagtgagagggcagaagaagtgatcgaaggtgctaatggacttcagactaagcctcaacacataacacaaaaagttgctgctgctgctctagggggacctggtggtaattggtattgattttggaaatgttgaatttgtgtcctgcaactgctttgtgtcagcatatcaggtttcttggcctacacggaacgcagatcaatcatctgaattgaataaagatatgagaggccatagcatcgacaatatcgccggatgagagagctaaagggatcagaatacaaggaagtctctagctgattttttattagatcttgcaattcgggccaccaat

SEQ ID NO: 24925 - DNA, 291 bp, Glycine max
ggcgccatcagactccccaggagataatagagctaaagttaggatgcagtcatacattgaaatgcaggtttttggtaaaaggtggaaagatgcagcagagaaagacaaatgttggattgatccgtatgaacaggcaaacaagacaagccattagtgtattttgtgaggctttaagtgatcaaaatccaagtacagtgtccatgttcataatcagcttttgttttctagtcttcgttagagcttttgatttgatatctcaggtgtgggatctcgtaagagtttgcaggaaca

SEQ ID NO: 24926 - DNA, 432 bp, Glycine max
ctgcgctgcttcgcggcgttgtcaacttcccttcacccaaccaccttccatctccaaacaaacatgggtcggaaacacgacgccgttttggccagcgaacctgtcgccgaagaagccccctgcagccctgagctcgattccgagaagaagaagaagaagaaaaagaagaacaaaaacaaagacaagcaccaaaccgaaagcagccccaaacgaaagctcgacgaacacgacccccaaaacggcaccgaatcgaagaagaaaaagaagaagcaccacgagtccaaggggaacgccgaggaaaccaacggcgatagcaacaacaacaacggcgatggtgctaatcgcgaggaaacggcgacggatgggtctgttgtggtcaccggtaacaatgcgggagaggcgaaatacgccgcggtgaagagcttcgcggat

SEQ ID NO: 24927 - DNA, 497 bp, Glycine max
gtttaaatagcctccatcttcttccactgttttctctctcaactcaatacaaatcgcaaggcacttcttactcgctgtttgattcgagtttgctctctcgctcccgctctaaaccctagagcacgctctttctagggtttagatttcgattcctcgttgatttcggaattcgtgttttacacgttgatcggagaattttttttttctatcgaattttcggggtcatggatcttcctagtctcgctgttatactccaagccgctctcagtcccaatccggatgaacggaaaacagctgagcagagcttgaatcagtttcagtatgcgcctcagcatctggtgagggttgttgcaaatcattgtagacaacaacgttgacatgggtgtacgacaagtggcgagtattcatttcaagaactttattgccaaaaattggtctcctcttgatgttgactatgtagatacccaactgaagatctcacagagtgataaggatgt

SEQ ID NO: 24928 - DNA, 419 bp, Glycine max
ggaaggaggggtgagaaggatgggaagtcttatataattgatgtgaagaaagggaggatgaggattcggttgaaggtggcgctggcgttgggggttgtggtgatttgtattggggtaggtgtgggggttatgcattttgtggagaagcttggatggttggattcgttttatctttcggttatgtcagttaccacggttgggtatggagaccacgcgttcaagaccatgcacggtcggatctttgctgcgatttggttgcttgtgtcgacgcttgctgtggcccgggcgttcctctatttggctgaggcgagagtggataagcggcataggaggatggcaaagtggattcttggtcaggatatgactgtttctgagtttcttgcagcagacatagacaataatggctttgtgagtaaatc

SEQ ID NO: 24929 - DNA, 704 bp, Glycine max
cggtttcgtgggcggacgcgtgggagtaaataagggggctaccaattcaaaggcaccggcaatgccattggcaacattacctcttctcttggtagatgataacaatgcttgcattgacctttcaatgggagaggagaaagtagttaaactgtctccattgtcaccaaagattttagtgtatattgattggtctcagaagcttctggagaagtatgatactcatacacttgagactttgcctgaagttttaaaatatggacctgtaaccaagaaagctcgtactgaacctctctccttgtacacctgcttggaagcttttctgcgtgaagaacctctggtgcccgaagatatgtggtactgtcctaaatgcaaagagagacgacaagcaagcaagaagcttgatttgtggagactcccagaggttttggtcattcatttgaagaggttctcatacagcaggtcaatgaagcataaactggagacttttgttaactttcccattcatgattttgatttaacctaattacatagccaacaaaaacaactctcggcgtcaactgtacgaactgtatgcccttacaaatcattatggcagtatgggtagcgggcattacactgcacatattaagcttttagatgagaacaggtggtacaattttgatgacagccacatatcactcataagtgaagatgaggttaacact

SEQ ID NO: 24930 - DNA, 336 bp, Glycine max
ggaaattgcgacgacggatattgcaagaccgtcttagaatccattaggtgaaaacaaattaagacgtgtttggttcacaccgtctttgaaggattctggagacaacgacggtgttaatgtaaaacccgtctttaattttgaacaatatgatagcctttcccttctcatttgtgacgtagcgtctggcttctttgcttcataaatcataccctcactgtaccgcgtgtcgtgcttcacccaagctctcgccgtggcctcattggacctcgcgacgtcgccgtcaccctaggtcgtgccgtacgtagtggttgtagctcaggtcggtagctgtaccca

SEQ ID NO: 24931 - DNA, 387 bp, Glycine max
atctggtgttgtgcaaggtttcaaagcaccatgtggccaaacatgtggtgctccaagaagaagctgcaggcacatgtatggctccttgtcacccttcatctccatgcccagatataaggtgtgaattccctgttagaatcacttgctcttgtggccgtgtaaccgcaaatgttccttgtgatggtggtggtagcagtagcaattataatgctgatgccatacatgaagcttccattattcaaacattgcctgcaccacttcaaccagttgatgcaaatggcaagaaagttcccctaggacaaagaaaactgatatgtgatgttgaatgtgctaagtgtgtacgcaaaagggttctcgcagatgcttttgacattactgctccaaatc

SEQ ID NO: 24932 - DNA, 464 bp, Glycine max
ttcccgtctatgaatgatgcgttttttgccgccatatacgccaataatcacccatttttctcacattgcaacattttgagttgatttctatgcactgcttgcaaatataaaaccccataaacaatcatagtcattcacgaatacacttaggtaggaatccagcacaaacttttttgtcttctgatgttggaggagggtgaagaaagctacaacttggaattagaagttccggttacaaatcgtccctacccccaccaccatcgtagaaagaaagtgttagctaaagatataccaaaagggtttttgccaatcaaggtagggcaggtgaagaacaacaaaaaattgtgatgcctattgtgtacctcaaccaccctttgttttctcagctactcaaggaggcagaggaagagtatggttttgatcaacaaggaaccataattatcccttgccatgtgaaggacttt

SEQ ID NO: 24933 - DNA, 363 bp, Glycine max
ctacgagggtttttcatttttttttctctcactctcaccaacgcactcgaagagataacattcattccatattcacaaaagcgcacacaaactttttttttttttttttgtctaactatggctcctgtgctgagcagaaccatggccacggcctctctggcctcgcttcctccttcttccccttttgcgaggtcttcccttctcagaagcgcttttctgccgccgcaaatagggctcggcaggaactgcttctcccccgccgcggggctgcggtggacgcagcagcggcgtgagggaaggaggggagggctaaccgtgcggtgtgaggccgcggtggcggagaaggacgaggccaccggggag

SEQ ID NO: 24934 - DNA, 332 bp, Glycine max
ccctgttgggtccaaaaatactcaaaagaatcttttccattttcaaaagaatagaagttaagtccaatgacaaatttagtttctgctttgctttgcctattttatttccaagttggttggttgtagtcatatagcatagctaccagcttaaggggtggagatatgctgttgaattatgtggatttgttacttaaattgataactatttttttttggccagcacttgataactaattaatatttttagtgctcaaatattcattgtatataaataagaggaatatcatactcatttttggtgtttttaattataattaaaccttctgagtttt

SEQ ID NO: 24935 - DNA, 483 bp, Glycine max
cggctcgagctgcgtgcgtgcctgcacatatcaaatatcagttcaagtattaaagaggctcatccataaaatctactctctcatccgtgagaatggtttctgcggagaaagattccaatgaaacaaccaatactcatccaaccatcatcgggaagtccatgcgaacggtgcgctccaaactattccaacacgaccgcgctgcgtgcgtctccgacaacttaaccggttcgctaatggagctcgcctcgcgaaacaacaaatccgttaaatcttccattacggaggagcaactcctcgagctctctcaagctctgagcgatttctccgcctgtagtagcgatatctcccgcgagctccagaggctcgccaccgtttcctcctcccaacctcctcctgctgctcctcacgtcgacggccaaccccaacctgagcacgagccctgcctagggtttctccagagggagagcttctccaccgagatca

SEQ ID NO: 24936 - DNA, 574 bp, Glycine max
cataacgttcagccagagcccggtaaacacggtaaaactcctcaaccagagcaaccaattctggcctcttctgataatacatttcagcttttttggcaaatgaatctgcatcctcttctatcagcttcaacattcgcttcacactccggtccatctcttcaaggttttctgaaagccacttagaattcttggggctgatgtgactatcccaccaccaagaatgtgacttcctcgattccaacctcctcatttgcttgctagaatgaaccccagaagctgccatttttgcaagagcaaattctatctagatgagagaagggcgtgtttggatgcagtggtggaagctgtgggataaagcaatggatctgagaatagagaaagaagagagaagagaaaagggggtggaatattgagaacagagatatttggatttgaagtgtgaggagatgagagagtttgttttgtgaagtgttaataaaaagggaagtggggactgaaagcaaaagaaagtgccggaaaaggaagggctccttccattttaatgtccactaagctcccacatactttctctctc

SEQ ID NO: 24937 - DNA, 391 bp, Glycine max
ataagagagactaaatttgtgagcattttttaaaccatgagggggaatgtgaacatagaggaatcaaagaattagtacaaatataataccaaacatataagttataacactataggaccattgcaattgcataccttcaaggttttcaaaaagccacttagaattcttggggctaatgtgactatcccaccaccaagaatgagacttcctcgattccaacctcctcatttgcttgcaagaatgaaccccagaagctgccatttttgcaagagcaaattctatctagctggtgaaactctggtatcaacaagcagacccaaaaatgaaaggaataaataaattagcattcacaattcaactaagtaattcgaaaagtggaataattagctag

SEQ ID NO: 24938 - DNA, 427 bp, Glycine max
cttctctctctttctatcattcattccttcaatccttccccactatttctactcactaatcaatgaatgacataaacagaataattaatctccttaccactgcaactcacaaaacaaaagaacaaaaagaagacccttttgtcatcataacaactctttgttacattacactgtaacacacgccaacatgggtttggtggttcctgaagaagaactaagcttagatttgagaccctcttttgttccagaaaccatcactgattttctctgccacctttccaccaccccaatgcatcccacaaggtgtccttgctcgatgactttgtccacagattggaactcgaattggccaagatccaagcattcaaacgcgaacttcctctctgcatgttcctcttaaatgatgcaatttcagctttgaaggtgg

SEQ ID NO: 24939 - DNA, 464 bp, Glycine max
ggcgtagttaactaaacccctaaataccccatctcagtgccgcaagcgctgctcactcccatttcagagcgatcaaaatggcagcaaagaaagcatggagaatcattccgagacccctcctagaaaccatcctcaacaaccacgtgcagcaccaccgcgtccctcaactcctccttcttcacggccccagaggcgttggcaaaaccaccctcattaaccaacgtttactcccagaatggaacaaaggccctcacatcaccggttatgtcgactttgccgaatccatcaaagcccatcacggcccgtgggcctcgtggtccacctgccctttgccggtcctctccgaatgccgcaaaacccttgagcaatgcctggagtccatggccgagaggggcgtccgtgcaggcaccatcacctcccaacaaatattcgctaccctcaacaaatggcacggcctgaccacc

SEQ ID NO: 24940 - DNA, 982 bp, Glycine max
cagagactaacgatgaactcaacaagcagttggctcttttgaaagatggtggtggcaaatctgagagggtagagtcacttgagaggcagctaagggaatccgatttacagctgcagcaagcagtagcatctgctgaagctagtcaagagaagcaaagtatgctgtattccacaattaaagatatggagcatgtgataaaggatcttaagtcaaaggtttctaaagctgagagtcgggctgacagtgcagaggagaaatgcatcatattatctgaatctaatagtgatttaaacgaggaattaaacttctcgaggagtagattggaatgcttggagggatcactacaccaagtggaggaagccaaagtggcatctgcaaaagatatcggaaagcagaccaaagtattcaaaaatttggtgatgcagctggctgttgagagagagcgtcttaataagcagctgtcctccttagcaagtgagaacaaaatattggtagtgaagctaaagcagacaaataagcatccttctcaagaagttactgtgacttttgctactgaccatgaggtggacagaacttggaaaaattcatctacaaatgataatgaagtaaagtttacagatactatgccagatgctggtactgtgaggagaatagatgcaggagttcttaattttaagcatttattcatgttatcagtgcttgtcttactgttttcagccgtgacttatctgaatgtcgatgccaatctttgaatgaatggtcagagttttttcccttgttttttgagatctaggtggggaattggggaatgaggtgtggatggatggaatcccccaacctcaaataccacaatgccaggttagtataggttacaaggccattgacattgtaggtttcaatgctagtcattgtgtagccatatcaatcaaattttgttctaatggagtatatgattgtggtagatatgatccttatctcttct

SEQ ID NO: 24941 - DNA, 297 bp, Glycine max
ttcttgttctttgatctctgtgttttagagagacgacctttattttctttttatgtgcttgtgtgtctatactcatgtgcgtgtgaggggtcatttcattcgattcgcgaccttgtaacttcccggtcaaaatcaaaggaaagaggaaaagatagactaaaattagggcaaatatattcccttctacagttacatatagttgaagttaatacaaaatagaatctttggtgatttttttttttttgggaatttggtttcaattgctcctttggttaagttagattgaggactaacaaa

SEQ ID NO: 24942 - DNA, 363 bp, Glycine max
tgggtttagcactttcaccttccttctctttctctgtgatttgctctccgctcttctccaacttccttcactgtcaaactcgtttttgtgttgttgttgttttccgaagagagaaaaaaccatgtggtacttgtgcgttttcttccacaggttattggattacagaaaacccgaagtggaatctctggcacaactcttcggagcaaccgaggacccccaaaacggcgacgtttcctcgcaattgcaatggaaactccctcatcactaccacgcagattccccttgccatttcgtcaacctcccttcggaacaactcgctcgaaacatcgctacccgaagcatacttgtgaaggggatgtatga

SEQ ID NO: 24943 - DNA, 521 bp, Glycine max
acgaggttgcattcaagcttaaggaaccgacacacctgtcggcaaccccaacactaagcaagagaaaggaaaaacacttcactccaattccaaacctgttgctgaaaccccaaaaaaacttagcaacattctatgtttctgttcagaggaaaaaagaaaaaaaacatagcgttgttgtgttgagttgaaaccgattcagctcaagactcaggtcaatccaaatacacatttagaagtttcaattcaatttttcaactcaatgatggtccaagagcgttcacttcccaaatcagtgaacccgaagccccacacgcgaacggcggcactggcctccacgaagagcctcgatttctccgcatgggtctccgacaacctcgtcaggatcgtggcggtgctgctcctggtcgccaccgtcgccgccgtgttcttcctccgcaacgccggcgacaccgccgcgctgctctgcttcgagaaccaggcgcgggagctcgagaggatcgcgtacccgcgcgtggactggt

SEQ ID NO: 24944 - DNA, 296 bp, Glycine max
aacctgttgctgaaaccccaaaaaacttacaacattctatgtttctgttcagaggaagaaggagaaaaaaaaagttagcgtggttttgttgagttgaaaccgattcagctcaagtcaatccaaacacacatttggagaagaaacaataagtttcatttcgattttcaattattcaatgatggtccaagagcgttcacttcccaaatcagtgaactcgaagccccacgcgcgcacggcggcactggcctccacgaagagcctcgatttctccgcgtgggtctccgacaacctcgtca

SEQ ID NO: 24945 - DNA, 775 bp, Glycine max
gttcctgcttctggcttttcttttagttctgagcatatatggaaagtcattaaggagaacaaagatctcgatcttcctgcacataaggttatggttgctactgtacgatgtgaaggaatagccaacgagaaatatgtttcttttgttgcaaatgaggattggtgtcaattggaagaggctgtgcaatctggccctattcctggatttgggaaaaagctcagttcacttcttgatatttgtttttcagagtatgatgctgaagccacctattttgacgaaggtgtgagatcttccaaacaaaagcaactacaagaaaaattgttccaacttgtccaaccagcattccaatctgcgctgggacatataagatctggaactttggataaattcaaggaggcatttgacaagactttgaaaggaggggaaggattttctgtggctgctaataattgcattgggtcttgtatggttcaatttgatgaagcatgcacagatgttgttattgaacaaacaaactgggatacatctaaagtacgagagaaactgctgcgtgatattgatgcacatgttgcaactgtacgtgcaaccaagatttctgaacttacttcatcatatgaggaaaaacttaaacaagctttgtctggacctgttgaagctcttttggacggagctaatagtgatacttggccatcaataaggaatcttttaggcgtgagactgaatagctgtttcagggttctctgctgcacttactgggtttgatatggatgaagaa

SEQ ID NO: 24946 - DNA, 557 bp, Glycine max
ctctttttctctctctgtttctaaggccaaagaagaacaacaccttcaccgccacctaaactaacaacagcagcataaggtgtgaagctattgaattcacttaaaaattctcaattttttccttcgtgttctctcttcctcaatccttctttttacacgaagttcgggtaatcatcatcgaaccgaattgaaaccgtgaataatatattggtttctcgtggcggtgatcatcgttgtacccagatattgaaaaatttgaaggtaataaacaattgatggatgagtattctcgtaaaagaggtgtagatgggatggtattccctagaaaggggatgggccatgtatttagagatactgctaatactagagatcgaaatggtcaaatttgtagtcgattgggttgcagtagagagccaatcttcccaaagttgctcacgtcagatcttctgaaaaaggacggaccagaattttcagtgcccatccctccaacagaagaaattcggagagggcctctagttgaaggagaaagtacagagtctagtaatgcaatattgatg

SEQ ID NO: 24947 - DNA, 583 bp, Glycine max
cggctcgaggtaccaagtccaacatggcggtggcgggtgtgtcccaagccatctcctccaccaccgccaccagaaccccctcttgcatcgatttccactccaaaaaaccttcccttttgggcctggcccactctccccagcccaacctctcaatctccgccagaaggagccgcaacacccactgttgccgctgcaccctcaattccgacgacacctctctcagctgggattggaaccgatggtgccgccacttctccgacattgaacaggccgaaaacttcgcctctgtcctcaagtttcaacttgatgatgctattgagaaggaggattttgaagaagcggttaagttgaacagggctctagcggaagcaacgtccaaggacactgttgctgaagttatggatcagttgaagagtgctatagatgatgaacggtatcatgatgcttcgagattgtgtaaatgcactggaagtggactggtgggttggtgggtagggtactcaaaagcctcagatgacccctttggtagaattatacatataagtcctggtatgggtagattcattggcaagagttacagtcc

SEQ ID NO: 24948 - DNA, 468 bp, Glycine max
  unsure (1)..(468): unsure at all n locations
cccacgcgtccggtttggcccaatggaggatagaattctggaatggagtcctgagaaacgttctgggacatgtaacaggaaggaggactttgcacgtctggtttggtccagaagatttatcttgatattccacgagctttccatgaccggagctccactttcaatgatggagttggcaactgaacttttgagctgcggggctactgtttcagctgttgtgcttagcagaaaaggtggtttgatgtcagagcttgctaggagacggatcaaggtgcttgaggacaaagcagatctcagcttcaaaactgcaatgaaggctgatcttgtaattgctggttcagctgtctgtgcatcatggattgaacaatatattgaacattttccagctggtgcgagccaagttgcctggtggattatggagaatagacgagagtacttcgatcgttcanaggatgtattgcacagagt

SEQ ID NO: 24949 - DNA, 415 bp, Glycine max
caaagttccgctgcaaagcagggtgcgtcactccactatccagccatgcaagtcctgcaaacctcttatctcttcactttccctaaacccctaaacccttccccttctcatttccaccaccgtcttccgccacgccctccgccattcttccaccgccgccccctcaccatctccaaatccttcagctccgacgagttcccggtggacgagaccttcctcgagaacttcggccccaaggacaaagaaaccgaggacgaagcccgccgccgcaactggattgagcccgggtgggccccctgggaggaaatcctcactccggaggccgatttcgcccgcaagagcctcaacgaaggcgaggaggtttcctccgctccccggaagccatcgaagccttcaaaatgctaaacctaactac

SEQ ID NO: 24950 - DNA, 309 bp, Glycine max
tgggctttgaggtaatcgatcaatttttgtttggtggttataggagattacgatgataccgtagttagataaaagtaagatatggtaagagtatgaaaagttcttatattttgatgttaattagataaatcgtaaaggtggtataatataatttaaaggttttaaaagaatacaataacatgttttaaataattgatatgattttattataatatatgtagttgctatttttagttttcttaggaaatttgaaaaatacttgaattgtaattatttaatttaatttttaaaatgcttctatataattca

SEQ ID NO: 24951 - DNA, 318 bp, Glycine max
catgcacggatttgggctcgagcgaaaacagagaagaagaggcaattgctgagctgacgggacgtgaggtacatagccattgttgctcacgttgaccatgggaaaaccactctcgttgatgccatgctcaaacaaactaaggtatttcgtgataatcagtttgttcaggaaaggataatggactcgaatgatttggagcgcgaaagaggaatcacaatactgagtaaaaatacatctgtcacttataaagatgcgaagattaatataatagatactccgggtcactctgattttggtggtgaagtggagcgcatctta

SEQ ID NO: 24952 - DNA, 362 bp, Glycine max
caggtttatgtttagatacctgatgaacctgatgtcgccttttggttctgtggctgacaccaatctgctaatactgctactttctgaatacccttcttttggtgtcaagtaccagattttgtgacagttgggggtagagtaactgcagaagtattgaactgtgcactaaatggcttcaactgggtttgatgaagacggtgataccagcggcggtatgtgggttttggaacagaagattgaccagccaatggatgaagaagctgaaaggctaaaaaacatgtacagagaacaaaattttctacattgttgcttctgcggcttgcatatcagagtcttggcgtcatttatggagatttgggaac

SEQ ID NO: 24953 - DNA, 965 bp, Glycine max
gaagcatttttgcaagaagaacctcttggaccagaagacatgtggtactgtcctggctgtaaagaacatcgtcaagctagtaagaagttagatctttggagacttcctgaaattttggtcattcatcttaagaggtttcaatacagtcgttacttgaaaaacaagctggagacatatgttgacttccctgtagataatctcgatttgtcagcttatattacctatgggaatgatgagtcttaccattacacactttatgctgtcagtagccattatggaagcatgggaggtggtcattataccgcatttgtccatcgaggcggtgatcaggggtatgacttcgatgatagccatgttaatcccctcagcaaggagaagataaagtcttcagctgcctatgttcttttctacagaagaaatttcgaagtatcaacatagtgatatagtagcatgtagttcgaacagcctattgaagctagatgccattttattaactttattgccaccatagtcttacaaggatacagagggtaaactttggctcaaaggtaagattattgcattgtgacctggtggtcagagaatctagttgcagaaatagtctctgctcatggaattaagatttatgtacatcttagcatcttcacaccccacaataggggtgcatgagtattggaccaccccttttctatagtcttacaagtatacttaacaaggtaattcttttgtcatttactcttttagaagttttagactaactggagtttcggtaggcaagaaatggaaactttgaaaacttcaggcagtactatggaagactataacatagtaacaatttaagaggtgagggacatacctgagaaatgaaagcatagtgtttacagctgtttaaccttgtaaagagaatatctattctaaagagagttgaaccaaatcctgtgaattaattctacttccaattatat

SEQ ID NO: 24954 - DNA, 269 bp, Glycine max
tggagtaatgagtttttattatacaagagtttatttgctgtcattggtggatgtttcagattattgtatctgagtgaggtcaattgccaagaatttcatgggttcccgtggttaatgtttggccatgatatatgtatgtatgtatattgcgttagctttgtttatgagctattgtattttttatttggcctttaagttgtgaacactaagactcaataagtgtgaaaggtgagtctttcttttttcctatcatacctactgttagagaa

SEQ ID NO: 24955 - DNA, 409 bp, Glycine max
atagagtcgaacatatgaagaaagagcgttctattcattggttgagggaatttaaagactggatggatactgcttctgacaaatcagtagaaactagtaatgaaggtggtgcttccctgcatcatcagtaggaaaattacatcaggaactagacaaatcaggagcagtctggtgacatctcgagatatgcttcagactcagttctagcctcgggagatgacagtagcatgaatattttagaatctgatagttcttttgtagatatgtcagctagttatcatagacaacagcactttgactatagaggtttgcttggtaatgctagtggggcttcacattttgactcaggaggagtggacatggagcgccttaaatcctcacttgagggaattagtagttctctctcaca

SEQ ID NO: 24956 - DNA, 480 bp, Glycine max
ctcacatctcacatctcacatcctcttagtctgaaaatggatcttgccccagaagagcttcaattccttaccatccccgacatcctacgagaatcaatctcaatcccaaagcgttctccgaaaacattttacctcattaccctcagcctcatcttccccctctccttcgcgattctagctcattccctcttcacgcacccccttatttcccagctgcagtcccctttcaacgacccttcccaaacctcccacgagtggaccctccttcttctaatccagttcctctacctcctcttcctcttcgccttctccctcctctccaccgccgccgccgtcttcaccgtcgcctccctctacacctccaaggccgtctccttctcctccaccctctccgccatcccccgcgtcttcaagcgcctcttcctcaccttcctatgggtcaccctcctcatgatcctctacaactccctcatcctcctc

SEQ ID NO: 24957 - DNA, 1017 bp, Glycine max
ggatttagtgctgaaattcaagaacttgttcgcttgtgtcccaaaaaaaggcagactatgttgttttcagcaacaatgactgaggaggttgatgaacttattaaactttccctgtcaaagcccttgcgtctttctgctgatccatctacaaaacggccagcaaccttgactgaggaggttgttagaatacgaagaatgcgtgaagtaaatcaggaagcagttcttcttgcaatgtgctccaaaacttttacttccaaagtcatcatcttcagtggaacaaagcaagctgcgcatagattgaagattatatttggattagctggctcaaaagctgctgagcttcatggaaatcttactcaagcccagcgccttgaggctttggaacagttcaggaagcagcaagtggattttttggttgcaacagatgtggctgcccgtggccttgacattattggtgttcaaacagttatcaactttgcatgtccacgtgatcttaccagctatgttcatcgagtgggtcgtactgcaagagccggaagagaaggatatgctgtcacttttgtgactgacaatgaccgatcacttttaaaagccattgcaaagagggcaggttcaaagctgaaaagccgtattgttgccgagcaatctatacataagtggtctcatataattgagcaaatggaagaccaaatttctgaagtacttcaagaagagagagaagaaagagttctaagaaaagccgaaatggaggccacaaaggctgaaaacatgattgcacatagggaagagatcttttcccgccccaaaagaacctggtttgtcacagagaaggagaaaaagcttgcttcaaaagcatccaaggcatccatggataatagcaagagttctgggaaagatgtaattagtgctgaacaagctgaaaaccttagaatgaaggagaagaggaagcgagagcgtgagaaacatttgcctagaaagcagcgtagaaagttggaagcagctagagagatgctggag

SEQ ID NO: 24958 - DNA, 469 bp, Glycine max
ttgttgaaatgatttcatgcatgaggcctaatatatgggccactttggctgatgaagtacctgcttgggtgactgataaaaggaacaaaacctcagtagacagaactgtgcgatggcttgatgactgccttgcattaaatccggtagttggatcagtctttggtgccattgttggaggcacgaatttggatgaaaggaagcgatgtgcagaggaggtagccaagcgaaatgtatcaggttattggattggaggatttggtcttggagagggcattgatgagcgacctgctcttctaagtgctattatagatctcttgccagatgaaaagccacgcatgatcagtgggcttggactcccggaggagatcttggagggcattgatgctgggattgatctttttgattcaacgtacatctattccctcacacttggaggatttgcactaacgttttcactagacaagggtgg

SEQ ID NO: 24959 - DNA, 361 bp, Glycine max
ttctattgtattgttgaatgatccaactatatatatatagttggatcattcaacaatacaatagaatttctaaacttcatgcatgtatgtaagataatattgtattgttgaatgatccaactatatggatatattgatgtttcccagctggcacatatggttgatgtgtcatccggtatgcatgttgaaacagcttatgacatgctatttttagtattagtatactgaggcagtatataccattgttaaaagctcaaacagctgatgacatgctatttttagtattagtatgcaattttgtatatagttagctactacaaattgttatttaattataagttatgcaaattcttatttaatt

SEQ ID NO: 24960 - DNA, 203 bp, Glycine max
ccgtatcgttacccacatgaccagaaggatgctatcgagaaatttgtaagagatatgttggcagcatgcatgattcgaccaagtgtaggtccttactctagccttctcattttagtttagaaaaaagatggaagttggcatttttgtaccgattataggactttgaacaccattactattcccaataaatatcctattcctac

SEQ ID NO: 24961 - DNA, 878 bp, Glycine max
attgattcaaaggcattttcagtagcagtagggttaggtcaggtcaatgcaaatggggacactaaagaacaacaaggaggaaatagtcaggaacttgttcagaactccctctcctattatgaaaatgtccgtaaaagagaaaatcaattggttaagcaagctgttcttgctaatttagcatatgtggagctggaattggacaatcctgtgaaggcactatcagttgctaaatctctcttagaacttccagaatgttccagaatttacatctttctaggccatgtttatgcagcagaggctctctgcttgctgaacagaccaaaggaagcagctgagcacttgtcattctatttgtctgggggaaacaatgttgacttgcctttcagcctagaggactgtgagaaatggcaaccggagaggactgccgattttgacgaggtgaatggaggatccacagctgctaagaattcttctcttgaaggcactcagagtattgttttcctcaagccagaggaggcacgagcaacaatttatgcaaattttgctgtaatgtcggcgatgcagggtgaatttgagaaatccaatatactggttgcgcaggcattgtccttattacctaacagtccagaagccactcttactgcagtttatgtggatctcttgctcggtaagccacaggaagctctgaccaaattaaaacgttgtagccgtattaggttccttcctagtggaattacattgaataaatcttcttgagtgttgtatgcttgggttttgtcattgtgcctggcccacatctcagcgttagttagcaggtagcttaatccttccataccatttgtaacatatataagttcaattcagagaataattttttt

SEQ ID NO: 24962 - DNA, 271 bp, Glycine max
gtggccaagtccggggtgacggataagaggtgggcgtgcgggcttgtgattcaggccctgatggtttcggagtcggagtcgagggaatattcaagccggatctcggagagagccgtttcggttgtggaaatgtggaaggagcatttggatggagaatccgcgagcggtgctgccgaagtggtcatgtttctgcagatggtcgtttgtttcggcttgaggtctaggtttgatgatgagtatttgaggaagctcgttatgcagtttgcttcta

SEQ ID NO: 24963 - DNA, 426 bp, Glycine max
ctcctggagaggagcatttcaacagttggatcagatagacttcaagtggttatttcactgagtcgagtgggaccttatatattttgaagtggatgtaactggtcagttgatggaggtggagaagcatgaaatgtctggggatgttgcttgtttggacatcgcttcagtgcctgaaggcagacaaagatctcggtttcttgcagttgggtcatatgacaagaccatccgcatcttatcgcttgatcccgatgattgtatgcaggctctaagtgtacaaagcgtttcttcagctccagagtctcttctttttcttgaagttcaagcatctgttggcggtgaggatggtgcagatcatcctgctagccttttcttgaacgccggcttacagaatggtgtcatgtttagaactgtggtggatatggttac

SEQ ID NO: 24964 - DNA, 490 bp, Glycine max
ttagaattgaggaacatttgatatatcatctcacatgagtttgttttcttgtttcttagatgagggttgctggtttgtcttgtgtttccatgcgttgagtctgaaaatgatttttatgtcctttggttttaccagatgatatctgcaagagatccaggatttctttcatgagcttgatctatctagtttcttagttgatgactatttatctaggtaacctgtgttctgtagtttggaaaaatgattttccccccaggtgtagccaaattgaagacgggatctttgagaatggcatttgattttaccatgtgctgaagtatgttcacaagattttggtgtgtcaagttgccatccgttctgcaagcagcagcaaattagaatggctagcaagtctagatgaatttggtttttcttcaatgggatattcattattggtagtttctgaatttgatcatgacgcatatggattgagttttaaaactgttgcaat

SEQ ID NO: 24965 - DNA, 248 bp, Glycine max
taaaaattggagaggacacttttgaggacttagatgaggttatggaccgctatgttgatcccttggtggctcacttaaagtcaatgttaaactatcgcaaattccgaaagggtacaaaagcagaagttgatgaacttttgaggatggagaaagctgagtctcctatgcgcatagtctatagttttggcatctcccatgatcatcctagcacattgatattaactcgtataagaagtacaaatccacac

SEQ ID NO: 24966 - DNA, 260 bp, Glycine max
ggtaaacagtttgaggaaggtacaactctaccagcatttggcttgactgaaaagggggagagcatgtatgaccctgcaaaatacacttctttcgacggtgaaacagctattggtggcgtaacagcatatggtgaaagcatagttgatcctgaagcaactgaaatggaatatcaaggttcaaatgtatctcctgatttgtcactgtcaaagaacttgtccaaagataacgatacaacacttcagatctcttgtggagcttg

SEQ ID NO: 24967 - DNA, 286 bp, Glycine max
tagccaggagctccctatctacagtgtttccctctctttctctctctctctctgcaaaagctacgaagctgtgttctgatccttcaaattaggtactcttttgttctcttcctactttcccctcttccaattcttcccttccctacctgggttttctccataacccttcaagtttaactctctttccatttgggtctctctctcctccttcggatctgcttctgattccactttaaaccgctagtccttcatcaagatctatttttttaattcaattctctcagga

SEQ ID NO: 24968 - DNA, 246 bp, Glycine max
cggctcgagcagaaaccgtctttttcttcttcctcccggttgcggccccacaatggagcctgctcggtgacaagagttgcagcggaagagtcggtttccttcacagtgtattctgtgttgcttccttccttcctttgtgtatcagttgacgccaccatgccgtcagtgcaacgcggaagcttctccaatcgccaaacccaattctccgagcggaggcagaagattatacaacagaggaagtctctt

SEQ ID NO: 24969 - DNA, 841 bp, Glycine max
tggaagtccttgagagatggagactttgatgaagaagaagtttgggacgttttcaagaacagaagtagtgattatggtacttctggggttagcaagttcaaagacaaagatcaatcctcttctgttcctgttcctgctaggcctagttcagccagaatgatcccaagatctagcaatagcagcagtgctagttcctccaatgaagatacggttcttcagcaatcagcacctgtcaacattcctgactggtcaaagatttataggactaaactccccaagaacagtgctaattcaaggtttgatggtgatggtgttgctaactatggtgggggtagtgatgaggatggagaggaaaatgatgagagtgattcccagcttcctccacatgagtttattgcccgaaggcttgcaaggagtcggatttcctcattttctgttttagaaggtgctgggagaaccctcaaaggtagggatcttagcaaagtgaggaatgatgtactctcaaaaactggtttccttgaatcactatatactataaaggggtctcttcagtagtgatttactagtataaaagtgcgtttggattagttttatggtaaaaaataatcaattaatttttcatggtgaaggtaatgcaacaaatagttgcttctactttttcatggtatcggtatcaccatgattttgtggggtagaattgattcttatgtattatccaaacatgctagtagcgcttttacatttgggatgtacattagggttagtagttagaggttatttaggaatggatgttgtgttcatatgcttggggtataaaagaattgtttagccatttactatg

SEQ ID NO: 24970 - DNA, 534 bp, Glycine max
ctcgaaccagtaagatcataggtacaagcataaaaatgtggaaagaagatgagagtgccactccagaaacccatccccttaacttcaggcctcctaaagacatccgtcgattctagacatgctcctcatttatctcaggcaacttattctgctaatacagagtgggtatgtgctatctggagggcttggtgtaaatttacttgttgggagattcacagttctcttcttagcaggcttttatcatcatttttgtatcacgagaaatgttaggaaaatactctcaaatactcttttgaacacaatctttcttattgattgaaaatcacaaattggtggatgctacatatttaacgaacctccttattttgtattttctgataattttcaactagtaggagagtgtggtgtcagaaagtatgtgttaaagagtgtgtaacacttctgtgtgcatcattggattgcttgtaagattattcctacatagttcgtgtgtctcaatagctttgcatttcaaaaaaaaaaaaaaagggcggc

SEQ ID NO: 24971 - DNA, 461 bp, Glycine max
cggcaatgacggtgacggtggtgtgagattgatgaggtgtgcggtgattgagtgttcaaggccggtgttttccgtgagcgttgcgtttgggtttctgattctcggtgaggagaatggggttagggtttttggattgaggaggctcgtgaagggaaggagcgggaagagggttgggaattcgaaaccgctgaagaatggtggtcgaggaggcggtttggaggcggtgaactgcaatggtgatttggaagggaagatggacagacatggtggtgttgctactgctgtgaagcagacaaatgttaaattaaaacatgacgacagagatggaggttcttgtttttttgtgttgaagggaaacgaggttaaaacaaaatccatgacaaaggtatccatgtctataaaggctatttccattcaggctgtgtcccagaggatgtttctgatcttggattctcatggag

SEQ ID NO: 24972 - DNA, 291 bp, Glycine max
ctcgagccgattgtcttattgttacatagtcacagaaaaatggcaaatagaattcccctaactgtgtcatacaaaaatttggtcaaacacctccactcaactagtgcgaaaaatgcaaatgctcgtgtgcatactcaaggtggtgattcaattgtaggagcatcagcacaaggggcagtgaaggcaacagaggtgttggagaatgtgggagaaagggctaaggagacagtggacacagctttggatgcagcaaagaagactacagagggtgtgacagagacaacaaccatg

SEQ ID NO: 24973 - DNA, 420 bp, Glycine max
atttttcagatggctgcattgtcagaagtgctggcttctggtgtggatgattttggtcccgaagatttcggtgatgaagatttcaatcctatggaggctgccttgttatcaatgatgatgcattctaatatggaagatgaagatgacgacgatgatgaagaagaatacagtgatgaagactactagatttacttagttcatataaaacccatctatagaccagttgttgaggtagttatctttggcagtatggtatcctatcactttgctttgaaaagtattgggggcaggaacttcaagatttattctcgtttattttgcttatactcatgcctatacctggtatttgtgatcatatgccattttgtatattttctaatatcacgctattgaaggagttttggcttgagggttttgctt

SEQ ID NO: 24974 - DNA, 338 bp, Glycine max
cggaagataggttggaagaaggagagtatgctggtggtggtggtggtgatgtggttgataagccaattgcagagtcttcgcagaagctgaggagggtagttaatggacaagcgagcgagtcggtttgccagaagcttattcgtagccatagtgtttgttgtagagatccttgtagaaccgcgggtttagccagtggctttgtgggttctgagactaaaggccatgttttcaatggaaggcagaagtttatgcttcagaggaaccggagtgttaggtattcaccaagtaatgctgacaatggcttgttaaggttctatttgacacccttgaaaagctat

SEQ ID NO: 24975 - DNA, 253 bp, Glycine max
tgccaggttcacttttgccgtcatgttttctcggaatatagaatggtaaatgagatttgaggaaccaaccgaggatgattttttacttttcttttttggcagctttagggttgtttacaacattgatcaaatctaaattaagattgggtaaagcgtggttttcttggaatcctacaaataagtgtggagatttggaattaatgaatcatgatgttttattcttaaaaaaaaaaaaaaaaaaaaaaaggggggc

SEQ ID NO: 24976 - DNA, 252 bp, Glycine max
cgttgatctgtttcatcattaatagaaccgccagataaaactcggtcatcctcatcagtcaacagcctggcactctcttcattgcttgggattaaatgtttttgttttccacaatcattgaccatggcattagctttcagttcatgtttcctagttgagattgaagtgggacatgaaattgcccaatggttgggctgaaagcatttgatgcatagacaagaatgttcttccagtcctccatatgaatctata

SEQ ID NO: 24977 - DNA, 645 bp, Glycine max
ctaaatctctcacatctcttatctttctctctctctcttataatacaagaccctagtcctctctcacgccccaaccaccgccatcaccaaaccttcctatctcattttccctccaatttccttctgggttttgcaatttggccaattgggtccccaaagctgtgaccttttcctctgatcaacgcgaagcggaagagaaacacccagagagagaaagagaaaaagaaaagttgttgttttcttttgttctttgggggtgttggtttaaaacccggggttgaagcattgcagacatcacggctattcaaggagttcgccactctctttctcatgcccgttgtgtccgacgcaagggttgtgtgacggagagcaatccttcgccgcacggcgggcgtggcgctctgccttccgaaggtggcagcccctccgacctcctcttcctcgctggcggtggttcttcccattaacattctaaagtagtattagccattaacattacatcctacaccttcaaaagttctctctattagcggtttctggtttcttttgttcttcttctttggtagttgttaggtttggtgaggtctaagatgttgagcattaagagggttcccactgtggtttcaaattatcaaaaagaagaga

SEQ ID NO: 24978 - DNA, 388 bp, Glycine max
tccacgcgtccgcacaactccccctaaatctctcatcatctcttatctttctctctctctcttataatacaagaccctagtcctccttcacgccccaaccaccaccatcaaccaaaccttcctctctcaatttcccttcaattcccttctgggctttgcaattcggccaattgggtccccaaatctgcaaccttttcctctgtctaacgcgaaacggaagagaaacacccacatagagaaagagaaaaaaaaaggagaggaagaaacaattttagggtgtggggttaaaacccggggttgaagcattgcagacatcacggctattcaaggagttcgccactctctttctcatgcccgttgtgtccgacgcaagggttgtgtgacggag

SEQ ID NO: 24979 - DNA, 297 bp, Glycine max
caacgctaggggttttgttcagaagccatgtcactattgatgcatgtcatgtgacaaatggcggtcataggtaagagctggtgtccaggcattctgtcacacctgccagggttctttttccatatgggttggttttcaagtgttaaatgtggatgcaattagtgactccatgtattttataggtgagcatatttgtttcatgcgattacttttttgtatttacttgtgcaatattctttctttcttttttcaaagtttcccttaagatagttttttttttttgaacgactgagttat

SEQ ID NO: 24980 - DNA, 482 bp, Glycine max
ttttccattcataaccattattcctaaatcttctccccgtgaccaacgaaaccctcttccggaaacttaattttgtaggcgcaattccagagttcaaattcgaccaaggacagagccccatcagagagcaacagaagcttcctgaactcttccatcaccaacatggactcgacggtggcatcgctaacccaaacagttctcaggaacgagagctggcgcaaaatgatgtcgtcattgtcgttgtagtcctcagcaaaaaaggaaaatagggttccggagtgagttcctttaactctcgactagttaattaattcacactcgctcttttgtgatttcctttaactccatatagctagaaagaaagaaagaaataaagaaagaaggaaatggttatttccttcaacggaaccaggattggatttggtacgctagtttgggtttcacgatttctgcatacttggaatcttaaattcctatctcga

SEQ ID NO: 24981 - DNA, 541 bp, Glycine max
aagtgggagaaaacagagcctaagcaagaaaagaagctaaggtgtgagtgagcagagagaaacagggctatcaagagaatggccctgaacgattttttcgcgggggagatcgcgacggagcttctgaaaatgctgatcagcatctcccgcaagtccctcctctgccgcgccagcgccgaccagctcatcagctacatccacgacctcctcccctccatcgaggagatcaagtactccggcgtcgagcttcctgcactgcgccaatcgcaactcgaccgtctctcggagattctccgctccggcgtcgagctctcccacaaggtcctcgcgtccagccgctggaacgtctaccgcaacctccagctcgccaagaaaatggacaagctcgagaagaacgtctccaagttcctggtgggtcccatgcaggcgcacatcttggcggacatacatcacacgcggttccagatggaggagcggttcgaccgggttgataattcggttcgccggttggagaagtacttcgggaatatgaagattggtg

SEQ ID NO: 24982 - DNA, 341 bp, Glycine max
cacgcacactcccaaacgaaaagcacaaaaacaaaacctcttttaaaactcgaccaaaacaaagttgtggttcagatccaatctctcttccttcttcacagcacttctcaacaagggcacttcacataataaaccattccattgaacacacacaccatcaaacaccttcttcttttttatacatcattgcctcatcttttgtaaattatagtttaatttcatgcacgtgagatatactatatagcaagcactgccatagaaggaaaagggttggtattgcttttgcgtaacatatcattggagtttccaatttagattaacatagtgtgttgatttgggat

SEQ ID NO: 24983 - DNA, 532 bp, Glycine max
agaaaacactaagagactctgcagtggctgcaaagtcgtttgcaccatagcttgttttgcctgtgacaagtatgatttgactctttgtgcgaggtgttatgttcgtggcaattatcgagttggtgtgaactcttcggattttaggcgagtggagataagtgaggagacaaagacggattggaacgaaaaggagaccacgaatcttctggaagctattacgcattacagtgatgattggaagagggtttctcagcatgttcctggcagaactgagaaggagtgtgttgctcattttctgaagcttccttttgcgaatcaattccagcattatcaacaacaccctgctgtcaatggcacagatgacggttgtaatctgttaaagatggtaactaatgctgatgctgaatctgaattggatactgttgcctctgctgaacccagtaagagaatgcgtctcacgcctcttgcagatgcaagcaatcccattatggctcaggctgcattcctgtctgctttggctgggtcagaggtt

SEQ ID NO: 24984 - DNA, 292 bp, Glycine max
ccaaagaatgctcttgggaagcaatacaagaagatgttccaaatgaatggggtaaagctacattttacagaaaacgctctaagatcaattgccagaaaggcaatatctaaaaatactggtgctcggggattacgatcaatattagaaaatgtgttggtagatgccatgtatgagattcctgatattagaacaggcgatgatgttatagatgctgttgttgttgatgaagaggccgttggaggtgaggggcgtgggagaggggctaaaatcctttatggtaaggatgcattgg

SEQ ID NO: 24985 - DNA, 278 bp, Glycine max
atataataatgtccgggagatctatgcggatgtaaggtagatattcaagaatgcaatgaaatacaacaatgcctaagatgatgtccatgtgatggcaaagaccttgctggaaaaatttgaggaaaaatggctgcaacttttacctaaagttgctgaggaggaaaagagacaattagaggaagaagcacaggcacaactagacattcagcttgctctggagaccacttatgccaataaggccaaggatataagtactgagctttgtgagattgatatgc

SEQ ID NO: 24986 - DNA, 294 bp, Glycine max
ctcgagccgagagacgaagccttcgaatctctctgaaacttttctcttctctttgattcttctctatcagtgaatctcacggcaagcaatccagcaggtgtatgatgccaagcttaacaagtgaacccaaaaatgttgaaatctttggtgtctatgaaatcatagtgagctggtttagtggtgttgatcaagcccctcacttgctcaccaagacatcggatttgttgtgtgctaccttaaacttttggtggccaattctacatctggaagctagaagagtgtcccttccctcga

SEQ ID NO: 24987 - DNA, 417 bp, Glycine max
ttctgaatcgaagttaattgctctcacccactctcagcttctgcttctaaatctgaactcaacggttctgtgaaatcaaaatccgcggcagttcagcattctagggtgatattttcatggatggagatggtagcagtgtaagcccaatcgaaactaagaaagccaagtcaaaaacccctcgaaaacctaaagaaaccattctgaagcaaagtctctcactctctctggatgttgcaatctgcgtttcatttcatagcctctatctttcaactgattttttttttttaatttgtagaatcccctgccgaattcttcgcagaaaataagaacattgcaggatttgataaccctggaaaatctctttatactactgttagagagcttgtggagaactcacttgactcggcggagtccata

SEQ ID NO: 24988 - DNA, 316 bp, Glycine max
tcacggcgcaggagcttgctgaatcgaagttaattgctctcacccactctcagcttctgcttctaaatctgaactcaacggttctgtgaaatcaaaatccgcggcagttcagcattctagggtgatattttcatggatggagatggtagcagtgaaagcccaatcgaaactaagaaagccaagtcaaaaacccctcgaaaacctaaagaaaccattctgaagcaaaaatcccctgccgaattcttcgcagaaaataagaacattgcaggatttgataaccctggaaaatctctttatactactgttagagagcttg

SEQ ID NO: 24989 - DNA, 469 bp, Glycine max
cagcttaatttcttcctttattatcaagtcacttctcaatgcctctctcatactctccttccccttccatggcgccaagcctatccggcaagcaagaagcggcgcttctcaacgcgaatccacacttatccataaaactccaatcctcaactttcttcgctaacaaccacccaatcctcacccaagtcccacctaacataacaacaaccactccaccgccccacgatgcttccaccacccccgccggatgcttcgtcggtttctccgccgacgaggcacgcagccggcacgtgatctccctcggcaaactgaggggtatcagattcacgagcattttccgcttcaagctctggtggagcacccactggtccggcagcaacggccgcgacgtggagaacgaaacccaaatgatgatcctccaaaacgacgccgtcgagggccgaccctacgtcctcctcctcccactcct

SEQ ID NO: 24990 - DNA, 355 bp, Glycine max
acatctcccccagagaggcacacccgtgtgcccgtgtcaagtcccactcactctccaagagtaataaaacaatctgacgctagcccaatgcactcaccaaacaataacagaaccaccgtctctccaccctctcccctcaccctcccaccttcccagttgatggccgagcccaatataccccaacagcccgatcccaagaccgtgctagtccagaaaaccattgacaggcccaagccctggctcactggcgccactggatcccataaaaaccacggaaaacacgtcaccgtcaaagagagtgaatccaaggagaagggtattcacagaaagctttcgcagtctgaggagtctggta

SEQ ID NO: 24991 - DNA, 343 bp, Glycine max
cctcgagccgaatcggctcgaggttcctgccgcgtccgccaccgctccaccacgcagcatatactcacagcaataacagcattgcactgaaccctaactcatcactgcacttgcgaagacacagccacaatcacgcatcgctgaaactcgtcatcacactattagactcactagcactgatctcctcctcctcctccgccgtgaacgttggtggtcgacgacggcgttgcggttcatacgttgtattcctggagtgatgttgaatcatgtgagtaataataatagctgctcatggctgttgtttgtagcgaggcactactctagaattcaacccccaaggccg

SEQ ID NO: 24992 - DNA, 275 bp, Glycine max
gcttcacatttcgggtatgtggagcaaccttcccttggacattttagccaacatcttctcatttctctccccagactcgttggctagagcaagatcagtttgcaagaattggcacaaatgttccaaggcttatcctatagccacaacaacctcttcatggttcttggctcttccaattcgcaaccatagaccatattgctacgctcataatccagtgatagataaatggcaccaactctctctaccaatcccatcaattcgaccaattggtccaa

SEQ ID NO: 24993 - DNA, 327 bp, Glycine max
tttacgcgtccggaaaaccctaacaaaaacccgtagggggggagaagaagcttggtagttgcagtgcgttgcatcaatggggaaggcgaaggggaagcaccgtttggacaagtactaccacctagcgaaagagcacggttacaggtctcgagcctcatggaagctggtccagctcaacaacaagttccgcttcctggaatcggcccgcgccgtgctcgacctctgcgccgcccccggagggtggatgcaggtggcggtccagcgcgtgcccgtggaccaccttgtgatcggcgtggacctcgaccccatcgcccccgtccgtggcgg

SEQ ID NO: 24994 - DNA, 576 bp, Glycine max
tgttgatttgagtcccatattgtttgtttttcgatggctaaattgttcagagcgtttttcttcaagtctcttttcttcttttggtaccgttttctctttaggcaactcaggaacctcgtccgtttccacagaaccattagcatttctttttcgggtgcaacaccaacacagtttaacaagtacctgaaattcccctctctaatccaccgatcagacctcaacgatcacacgttgatctttgatgtcgaaaacgcgttgttgaaatcctcttctttgttcccatatttcatgctcgtggcctttgaggcaggggggcttataagagccatagttttggttcttctatacccttttgtttgtgtcctgggaaaagagatgggcttgaagataatggtcatggcatgcttcttcgggatcagagcttcgagcttcagagttggaaggtccgttctgcccaaattcttcttggaggacgttggtgcagaaatgtttgaggcactcaaaaaaggagggaagacagtgggagttaccaatttaccccacgtgatggtggaaagcttcttgagagagtatttg

SEQ ID NO: 24995 - DNA, 358 bp, Glycine max
cgaaagtccatgaaacaaccagatctggaaacacaagatacagaagaaaatacgcatcttcgcactcggcaagctcctggtgctgcttcatctgagactgtgcccaagagatcgccaataccaagccaggaagatgcaacgaggaatgcactgaaaattttgtcacatggtaaggatgatggaagtgatactggtagaggaagagaatatggagggagaggtgggttggatcgaggcaggggcagaggcagaggcaggggaagaggtcgaggcatgggaaggggaaggttcgtagagagggatgtggatgagaaggttatggatacagatgattatgctacagggctatatgcaggag

SEQ ID NO: 24996 - DNA, 695 bp, Glycine max
gtaaaatatccacaacaattggggcgtctgctaatcttgtgttcgcatataatacaggaatgcttcctgagatacaggcgacaatcaggcagccagtagtcaagaacatgatgaaagccctgtattttcagtttactgttggagttctgccattatatctggtaacctttgcaggatactgggcttatggatcttcaacagcaacctatttgatgagtgatgtgaatggtccagtttgggctaaggccatggccaatattgcagcctttcttcaatcagtcattgcattgcatatatttgcaagtccaatgtatgagtatttggataccaaatatgggatcaaagggagtgccctggctttcaagaacttgtcatttcgagtcttggtaagaggtggctacctgactgtaaacacatttgtatcagctctgttgccatttcttggagatttcatgagcctcactggagctatcagcacatttcccctcacatttatccttgcaaaccatatgtacctagtgacaaatgagaacaaactaacatccacccaaaagctctggcattggatcaatatttgtttctttgccctcatgtctgctgcggcggctattgcagccctgcgacttattgatttagactccaaaacgtaccatgtttttgcggatttatgattaaatgcattatattctttcagt

SEQ ID NO: 24997 - DNA, 220 bp, Glycine max
ggcgcgagataatatgatctgatgtacaaattttcatgggataaaagttttgtcaggctgtcccgaatgaacgttttatgagtcacgctagctgaacagttcctcaagttatatttgagacttcttatttggttaaagcttgtcaaatttcctgattgatgatggggttttcattgcttgcaaatttcagacctaatttaagacttggaaccattttgtt

SEQ ID NO: 24998 - DNA, 384 bp, Glycine max
  unsure (1)..(384): unsure at all n locations
ctctcttcaatgtattgatttaattgttcaactgcattgattcgcttcatgattcttccacacaacatacgactcacaacctccttcttcanccttctccaccaatcaccttttcctctcttgacaaatgttgcgccgaagcttctcgaagctccacctcagtcccagacctccgggtttagggtttccgacgcgatcgttctcgcgcgacgccgggaagaggttcgcggcattgtgggggaacggtgattacgggagattgggtcttggcaacttggattcgcaatggaaacccgttgtctgccccgcgttccgcaacaaaaccctaaatgccattgcttgtggcggtgctcacaccctcttcttaacagaggatggatgcgt

SEQ ID NO: 24999 - DNA, 573 bp, Glycine max
  unsure (1)..(573): unsure at all n locations
tgttggcanagtgctacaaaactggtctatccattttggatgatgatgtttttgaagtagaccaaccacgagacctttttctctactgttattatggaggtatgatatgcattggacagaagcactttcagaaggcattggacctcctgcataatggtgtaactgctcccatgtctaccataaatgctatagctgttgaagcttacaaaaagtatatattggtttctctcattcgtcatggacagttctcaaccagtcttcctaagtattcttcttcgactgctcaaaggaacctgaagaacttttgtcagccttacgtcgaattggctaatagttatggcactggacaaattgaagaactagaggcatatgccagggcaaatgcagagaagtttgaatctgacaacaaccttggactggttaatcaggttgtatcatccatgtataagcggaatattcagagattgatacagacatacttgaccctttctctccatgatatagtcagcacagtgcaggtgaatagctccaaagaagctgaaatgcatgtgctacaaatgattcaggatggcg

SEQ ID NO: 25000 - DNA, 436 bp, Glycine max
gtaaaatttatcacaatgatttggatgataacactgtaaaattatcacaatgatttggatgataacactgtaccagaaatacagaggactaaccttgcaaatgtagttttgactttaaaaagtcttggtattcatgacttattgaactttgattttatggatcatccacctgctgaggccttattgaaagctttggagcttctatttgcattaagtgcgttaaataagcttggtgaattaactaaggtgggcagacggatggcagagttcccacttgatccaatgttgtcaaaaatgatagtggcttcagaaaattacaagtgttcagatgatatcatttctattgctgctatgctttcggttggaaactcaatattttaccgtccaaaagataaacaagtacatgcagacaatgcaaggctgaattttcacactg

SEQ ID NO: 25001 - DNA, 637 bp, Glycine max
  unsure (1)..(637): unsure at all n locations
aatggagtccttgacattccaagcacacagagtgccacctatcctgtttctcctgttggtgtcaatcattccagagtacttaatgcagttcaggaagcaagaagagcaactgagaaagcctatgatgtggccaaggtagatgagagggttaatagagcagtagcagctgctaacagagcagccaatgcagctagagtagctgctgtcaaggccgtgcaaaaccaaatgcatcataacgttaacagcatgagcatcccaattcccattgtgtgaggctgtcaactgcaaacttttgatagtagagatgcacgatatcgtctgaagaggtcggtagtttaaactgctttgtttacactgccatcatcaccgcaggctgaatgaaagcaagcagatttattatccatctgccatgagtcttgtatagagggaggaagggtgatggcttccacatggtaaaataactacatatacatatataatttttctcattgcctacattttgtaaatttacgtagatgtaaatgctggtgtgcgggtgaaacccctacccagctactgttgtaagatcgcttggtaaaataaggagagaaacaaacctctggcctnnnnnnnnnnnnnnnnnnnnnnnnnnnnnnnn

SEQ ID NO: 25002 - DNA, 314 bp, Glycine max
ttttttttttttttttttaaaagaagaagcatgggcattagaaaaaaaggttaaattgaaggaaaatggggagtccattacacactgctactatcagtaccatactctgcaggctaccctttaactaatgccggtctcattgggagggatgcttcctttcaacaagtggttgatgatgattacagggaaagggaaagagaattaaaaagaaagaagctaggtgataatcagcttgttaaggaaggtggttgttgacttcgttgttaaggtttcgttctaattgtaggagggaaggtgttggagctactgctctc

SEQ ID NO: 25003 - DNA, 281 bp, Glycine max
ctaatattgaatacattcgctgtactagtggagccatattgactgttcaggagagcccggtgcctgatgaaatcattgtggaaataaaaggtacctcatctcaggttcaaacggcacaacagttgattcaggaagttataagtaatcacaaagaacctcttgctagtaattacagcaggttagatacaggcctgaggtcttcttaccctcagttgggcagttcatcgtattcctcatcttccttgtcctcgcaaccctatagcggtgggtacggatcttct

SEQ ID NO: 25004 - DNA, 418 bp, Glycine max
gcacaatgttggtgccaccatggcttgagccactcctaaacacatccttcttcgatgtgtgtcggattcacggagatgccgcgaggagcgaatgtaacatgttttgtctcgactgcaatgagaatgcgttttgcttctattgccgttcctcaaaacacaaggatcaccaagtcattcagatacggagatcttcgtatcacgatgtagtgagggtggcggaaattcagacagtgttggacattagtggagttcagacatatgtgatcaacagtgccagagttttgtttctgaatgagaggcctcaaccaaagtctggaaaaggagtagctcacatttgtgagatttgtggaagaagcctcttagacccatttcgcttctgatctttggggtgtaaggaataaagagaaatggggatgca

SEQ ID NO: 25005 - DNA, 410 bp, Glycine max
gtctcaccgaactgatgacacagttaaatgaaaaatcctttgaactggaggtcaaaacagcagataaccatataattcaacaacagcttagtcagaagatccatgaatgtgaaagccttcaagaaacaattggctctctgaaacatcagctggcagatgcattagagttgagaaacttaagtcctcaacctttctctgtaaccaaagactaccatggtgaacctcaccatgacaaggaaagtgccatgataaccaataccaatgaaaagattcttttgcaagagcaggcaggcgagatagaagggatgaatcaaaagttggcggaactaacagaatcaaaagaacagctagaactttttgaatcagatactggcagaagagagttcatatgctaaagggctagcttcagc

SEQ ID NO: 25006 - DNA, 287 bp, Glycine max
agatggaggaagccgcagaagatggcaacagtgacggtggcaacaaatggtggtggggagtggccagcgctgctcaaatgggattgggaattcgtaccttcgccaaagggcacggaggcgattcgcgcctcatgcctttcaaagccttcgttgtagcttccctcttcgtcagcagcgccgcctccgcctccgttctactcctccaagctaacggcatccacagggtggaagatctcatgaaagcaggagcaaatttaagagcaaaacttggattacgtccacgaacg

SEQ ID NO: 25007 - DNA, 400 bp, Glycine max
ggaaatgaatgtgggccttgcctatgatttaaacacttccatgaagcaggcattaaatgatgacatgacattacctaaggacacacaagccccaagttcatcttcaaaaatcaaactcccggggacaaagagaaaagaaaacttgactggcaagaggaagaatgcgaggaaaaaaggatcgaatccgtctcctattcctccaacagaaatgacagaattgactgaagcaatgatacttgaatctaacatgtcatggagaagatccttaaattttgatatcggaaatgtaggcagagaaaatttagatttggacattgggaaggaaaatatggtgttggaggaaagaaaagtaggtcccacctataaagacacttggttgaaagaggcagtaaatatttgc

SEQ ID NO: 25008 - DNA, 293 bp, Glycine max
ggttttcaggaggaattgagatttatctttcagtgcttaccagaaaatcgacaaaacctgttcttttctgcaacaactacaagtaatctgcaaaagttgcgtgggcgttaccaagataagatgtatgtctatgaggcttatgaaggctttaaaacagttgaaacacttaagcaacaggctatattcatccctaaaaaggtgaaggatgtatatttgatgcatatttgggataaaatggaagatatgggaattcggtctgccatcgtatttatctcaacatgcagagattgtca

SEQ ID NO: 25009 - DNA, 325 bp, Glycine max
aaaggttttgtctgtgacattggatgattggtcagaggatgaaatagatgcaatgatggaagttgggggaaatgcttctgctaattcaatttatgaagcttatattcctgaaggatatacgaaacctggaccagatgctggtcatgagcagcgttcaaaattcatacggtcaaaatatgaattacaagaatttctgaaaccgagtttgcgcattgtgtctggaaaaagcagtctacaatcaagttctgcaaaaagtagttttatggacagttttaaaagtactggtagttcacagagaatggaaggtatggtggaatttattgga

SEQ ID NO: 25010 - DNA, 184 bp, Glycine max
ctcgagccgcggatttcttgttttgacttggagtgtactttcagattggttgaccatattcatgtatgattctcatcatcagttccatgaaaattggaatgttatttgaattgtattatacatatcctggtataggcattatttattattttttattgaaaaaaaaaaaaaaaaggggcggccg

SEQ ID NO: 25011 - DNA, 298 bp, Glycine max
cattaacaatgcaggcaacagacattattctgctgggcctgggcttgctcttcgtccgctggtggtggcggcgctggtccaccaccggcggcggcccgaagaacctccctccaggccctcccgggtggcccatcgttggtaacctcttccaagtgatcctgcagcgccgtcacttcatttacgtgatccgcgatttacgtaaaaaatacggcccaatcttcagcatgcagatgggccagcgcacgctgatcatcgtgagcagcgcgcagctaatccacgaggcactgatccagcgagg

SEQ ID NO: 25012 - DNA, 573 bp, Glycine max
gcacgagcaatttcagaacctaatagatccttggatggggaaatttcgaaatcatctgcaagggtgcaaccttccagttctcttaaaacagtgatacaagataatgaagagggccaagaggatgatgcagatacttcctctaagcagaaggttgggcacgttcatccaaagttacccgactatgattcttttgctgcccacttcctgtctcttaagaagggtcgtcaataaatttcacttgcttacatatagcaacatagctacccggacatagtcttgatggtttatctttcttctgcagtctcctgtattgtgttccatatagatgcgtgattttagattctaagcatttgaggaataaggatgggacttatatttttttttgtttgtaaactgaatcagagtgtataggttttactatctcatttttggtacatctctatttgaggactattgcacatagttgaatatttcactgtaaatattcaccaaatgcacttatgttcattcaactctgttgattaatgttcccctcattcatccacttctggtcagtaaaacaaaaaaaaaaaa

SEQ ID NO: 25013 - DNA, 1317 bp, Glycine max
attctttcacgggggaagcttctctcattcctcggccaacagtcacatctacgacaccttctgccgccgccttgtgaggatttgcaaggctgctgtggtgtctgtgaactaccggcggtcaccggagcatcggtatccttgtgcatacgacgacggctgggcggcattgcggtgggtgaagtcgagagcatggctgcaaagtgggagggaggccaaggttcatgtctacttggcaggggacagttctggagggaacattgttcatcatgtggcagtgagggctgcagaggaggaaattgaggtcctggggaatattcttctccaccctttgtttggtggggagaagagaacggaatcagaattgagattggatgggaaatactttgtgaggcttaaggatcgtgattggtattggagagcttttctacctgaaggagagaatagagaccaccctgcttgcaacccttttggaccaagggggagaagcattgcaggactcaaattccccaaaagtttagtttgtgtggctggtttggatcttctgcaggattggcaattggcatatgcaaaaggtcttcaggattctggacaacaggtcaagcttctttttctcaaggaagccactattggcttttacttcctgccaaacaatgaccatttctattgcctcatgaaagaaatcaacaactttgtcaattctgattctgactgttaatatactattagtactaagacgacagacgactactactactactgctacttacttaaccttaccttacctacaggaggcatacataactaaagcttgacattttacttgggttatctttttttttttttctctcccccacttttgtatcctgtcttttctctttttctagtttgtagtaaggtggtgtagttataagattgtgtagcattacttgttattgtcataacatctatggtggtcaatttgagagttctgtgacctggggactactgcttcctgttcctctctgtttgtgtcttttggaaggtagcacctatcaccggctttggcagtaccagaactcggttcatttggggggtttggtcgaaccaccgtatacaacgcttcagccccccttttaacgttttgaggtcaatggcaggaggggagatagaagatgaggattggttcatcactttgtttgattaagtgaatggtttcctcttgtagcactaattactgaatgtgaaccggagaatatcccaacctgttgttatatgaatctgtatgttatatgtatacctatgttgtataaatgtcttggatgtttggttttgcttttt

SEQ ID NO: 25014 - DNA, 557 bp, Glycine max
ggagatttgtttcaatgagactgctaagggctgtgtgatgcagttgctgaattttggtgaggctatcgcgatttgtaagcgctcgcccgagaagttgtttcgcattttggacatgtatgaggctttgagggatgctatgcctgatttgcaggcaatggtttctgatgagtttgtgattggtgaggccaatggcgtgctgagtgggcttggtgaggctgccaaagggacttttgctgagtttgagaattgtattaggaatgagacttccaagaagccggtcataaccggggatgttcatcctttgcctcgttatgttatgaattatctcaggttgcttgttgattatggtgaccctatggattcacttctggagcttagtgaggaggatctctatcggtttaaaaatgatcttggtggtgatggttcgcagttagaggccatgtcgcccttgggacagtggattctgctgctcatgtctgagcttgagtacaatcttgaggagaagtcaaagctttatgaagacagtgcgatgcagcaggtgtttttgatgaacaatt

SEQ ID NO: 25015 - DNA, 275 bp, Glycine max
atcaaatcctcttttcatcattcatttctttcgatcagaaacaatcaatcttcattcaggatgcaacgttttgttgacaacgtcctcgctgttactaaagagtcggtgaagacgtttacttatgaatcgttgaacaatgttgccacagtgataaatggtgtgtcagctcttgtgttgacattgctgcctgggaaagtttctatacttgaaggtattcagggttgggagctcaggccaactcttcgtggaccacgctttccacgttggatggataa

SEQ ID NO: 25016 - DNA, 270 bp, Glycine max
gaaactcttagaaccttctattagaagtttgtggccattttttttataagacaaatcacattttgaatcaacccgaacttttgatttgccatctatgatgtcgaccaccgcaataagcttagtgattcttcttctttccctttttgctatatcagtttaatatatgattttgttttgttgctgtggtatccattttgagtaggctgacctgcgtgaggagttgctttggatctgagctggggtttggcccgtaatatatttgtttgtccc

SEQ ID NO: 25017 - DNA, 485 bp, Glycine max
aaaacaaaggctttagcttgccttttattcccgcaaaagtttcgtgactcattatagagagtacttacattattattttacagtgaacaaaagcgtgactctgaaggaaaagatgaaggagtacaacaagaaagaggcaaaattttatggaaatatgttcaacaaactgcacaagctagattctcttgacaatagtaaaccagcgtcgaaggatgctcagcccataaatatagacagcaaatcataaacaccatggaaattcatctaatttcgagagtctgctttctttttattattcgtggacatttagaaattttgatggattatgcatgtggatggagacaaattttgtttcgctagttccaagaacgtggaaatcccggcaaaattaaacatttgtgacgatgttctttttcctatatttttgtgtggagtttattgtttcggcatgatcgcgacaacaaaatttcgtttaaaatctactg

SEQ ID NO: 25018 - DNA, 544 bp, Glycine max
ggttcctcaatatttcatcataggtcgtgcagaagtcttctatttcattggtcagttggagttcttctatgagcaagcccctgatgctatgcgaagcttttgttctgctctctcacttaccactgttgcgcttggacagtacttgagctctctgcttgtgacaattgtgacaaagatcagcactaggaatggaagtccagggtggatacctgataatctaaactttggtcacatagattatttcttctggctattggcattgctaagtgtagtgaacttgatagcattccttgtggtgtctatgttgtatacatataagagacctgtgggaactctgcgctgaaaagtgggttaagttgtacattggaagtagtttcattatacatcacattggaagtttccttcacttgtagtcttgtttttcacctacactgtaagctcttgtgtcaaatccttgaaaaaatgatgtaaaattgttattatcaccattgctattatgtgtctgatctttctcatcaacatgcaggaattaaagttaaccaat

SEQ ID NO: 25019 - DNA, 494 bp, Glycine max
tcctactcgtccgagagatttattctgtctgtcacggtcatctcctctttctccctcacaacatccaattcaatttcgctgcgattgctgcatctgttcaatcttccttttttactttaccaaattcaaaaccatctcttcgatcccttttccaatttggatcgaggaacaatgagataatatattggattatgcattttccccaaataataggaaaagaataatagataaaacaaaatattagcggtgttgatcgatttgcaaatctcagagtaaaaccttgtgctgcgatttttatttatttttatatatatcagatggcgtttcaggaaaagcaaaacaggtttaagaggcagccagagaagagtgcctctgcttcacaatatggaggaactccagctcccatcagattctctaacgatactggaggacttcagcatgttaatagcatacgcaaagcccctgttggggctcagatgaagcgtgttattgat

SEQ ID NO: 25020 - DNA, 272 bp, Glycine max
cagtctttctccctcacaattccatttaattcgctgcgatcacatattccccgattgctgcatcttttcaatcttccttttttactttacgaaattcaaaaccacctcttcgattcgttttccaatttggatcgagaaacaataagatatacaccgattatgtattttccccaaataataggaaaagaagaatagatacaaatattagcggtgttgatcgatttgcaaatctgagagtaaatccttgtgctgcgattcttgtttttttgttt

SEQ ID NO: 25021 - DNA, 494 bp, Glycine max
cggagattgcgaattgcgatttgcgatgcgaaaaggaaaggaaaaaaagggtttcctttcttgaattgctgcttgcttcttcttcttcttgttcccgactgacagataaggtgagttgaattactgtgaaggagtgattgagtgagtggtcaatgaacaacagcagcagcagcagcagcagcagcagcattctcatccaattgttgttttcctcgcctcctgcatgggcaactctaatcgcagctgcatttctcctcctaactctaaccctctccatgtatcttctcttcgagcatctttccgcttacaagaaccccgaggagcaaaagttcctcatcggggttatcctaatggttccctgctattcttttgaatcttttgtatcattggtcaatccctcaatcagtgttgattgcgagattctaagggactgctacgaatcctttgccatgtattgctttggaagataccttgttgcctgcctcggtggtgac

SEQ ID NO: 25022 - DNA, 698 bp, Glycine max
ctctcttgcacaaattatccttctttcttatcatttacttcctaaattctctaattaatctcgatcctaatccttttacttaaacccttactcaccaaaactgttgggcgttttgtgattaatatttagaggagaaagtgtgtgatggagcttctaatggtggtggatgatttttttgtcacggcgtccctggcgcttcttcttaccttcatcgtcttaaagctcgtcgaggccatgaacgacactcacgccgcaccaaaacgtcacgtcgtccacctcgaaccggatcatccggtttctcgagccaagaccaaggtcggtctcattagtccggttcaggaggaaattgccacgtgtgcagtatgagccaaacacgggatagaaaaaaaggctgccgtcaaatcggttcgtcctcgtgggaaacggttcaccgttaaccccgctcaaagcaaggttaaggtcgaaccggttcctcccgctcaaagcgagagcacgatcggttttgttagtccggttcaatctgccatgtgtgtggagactgaacgcaaggtagaagaagctatggtcgaaccggaactggttcagctcgttaagaccgagggcacggttggttttattagtccgattcaagctgacacctgtgtaggaacagaagacaagaaagaagaagctacggtcgaattcgatcccacgttgtt

SEQ ID NO: 25023 - DNA, 280 bp, Glycine max
cgaacaacggcttctcctctgtcgccgccgccgccggcgcgacaaagccacgattccacctccattctcttcaccttcctctcgttcttcgccattgtcgctctggttttgcttccttcagcgtcaccatccttccaaaatagcttatccattctgcaccaagtccctgaaggccatgtgggggtatattggagaggaggtgcccttctgaaaacaattacagagccaggcttccatctaaagatgccttttctaactcagtatgaacctgtcaagttac

SEQ ID NO: 25024 - DNA, 275 bp, Glycine max
cgcgcggcgagcattgataaagaagacaaaaaccacgtgggtcccacaccgatggaagcccagaagaaaacccaaacccaaaccaaactcacccgaacccaatcctctctgcttcggtgttcctctcccaccaccaccacgcgttcttccgttcatagcctctcttcggtcaacgaagacttttttccagaagaagaaaagtcctcctccgatacgagcagcaagagaaagaagaagaataataaaccaattagacttagacccggttcgatccg

SEQ ID NO: 25025 - DNA, 399 bp, Glycine max
caacatgcgactgtgttagcctagcggatgaaaacaaaaaaaaataaaaaaaattacatctaagcacagagaaagaggaagagatggaggcagaggcagaggcagaaggtgaagaaggtgcgaactaaagcatttacaaggcggcgagaagcataaagcgaagagagaacagtttgtacaacgcactgagatccatctaccaagactccatcttcgtctccgagatctctcttctatggcctcagctccctctcctcgccaacctccgctgcggcctctggtactcccgccccgccgccttccactccacctgctaccttcagtccaccgacggccacaccaacaactgctccttcaccaccgcccgcctcaacctccacgtcgccctactcgccgaaa

SEQ ID NO: 25026 - DNA, 479 bp, Glycine max
tgcgcacctgagcttcgtttcgacggagaacatataacgcaacccacccaaggttcgcatcgcatcgcatcatggcccaagacaaaaaggagcgtaaaaggagcatgaagaagaagcagaaccaatctctgacaactctgcctcaggaattgatcagagaaattcttctgagattaccggtgaaatctcttctgcgtttcaagtgcgtctgtaagtcgtttctgtctctgatttcggatccccaatttgcgatttcccattatgccctagctgcctcgacccacccatagattaattcttagatcacatgatttttatgctcaatccatcgccacggaatcagtgttcaaaacctgtagccgagacgtggtttatttccctctccctcttccatcaattccatgccttcgccttgacgattttggcattcgacccaagattttgggttcatgcagaggccttgtacttctatactatga

SEQ ID NO: 25027 - DNA, 390 bp, Glycine max
ggctgttgcattcttttttctcaccttcttttttatgatcccaattgcaattgtacaaggtcttgcaagtattgacggaatccagaaaagagcgccatggttgaatcctcttattgaaattcctttcattaagtcattcattcaaggttttctaccgggtattgcattgaagctttttctcatctttttgccaacaatattgatgatcatgtcaaaatttgaaggcttcggatctatttcatctctggagagaagagcagcatctagatactatcttttcaattttgtgaatatatttcttgggaacatacttaccgggacagcatttgaacagctggactctttcattcaccaagcagccaatgaatatcccataacaatggcactgca

SEQ ID NO: 25028 - DNA, 260 bp, Glycine max
aatttattaaaaactataaaataatgagtgaagctcattaaattagtaggagtaaggcttgcacaatttgtgttcaataaatttcaactacaagtgtgtttaaaagaatgtattagcatttagtatctagttttacttttcaaccaatgaatattatttttcagttttcttttttattcttttctgggtggctggttcgttaaagcaaaaattgatgatcacaaatttttttaatgagtacacttttttatttttttggt

SEQ ID NO: 25029 - DNA, 279 bp, Glycine max
ggtgaagaaagcgctaatgccactgcttctgaggcagagttggcagagagaacgactgatactgagggtgatagagcaagtgaacagttaacaggttgaagttgttgcaacttcttggtgcttagatggggaaatataataataacttaatgatgcgtggatgaggaggtatgatgtctgtgtctctttaccaaaatagttttgaatcatcaacctatgttaccaacattttgaatcatttgacgtataattagacttgttggaaaggactatgcaatt

SEQ ID NO: 25030 - DNA, 272 bp, Glycine max
taccacttccatcttcgttgacatgtctaccaatctctgctttgaaggaatggatgaaaggcgagagaggaagttgagttttgagaataattctgaggatgatagatgggcaaaaattggtagcctgaaaaagaaagcattattcgcgtccaccaaatttagacattcttttaagaagaaaagaagcagaaaaattgatagcaggagcaattccctctccattgaggatgtgcgagatgttaaagaccttcaagcagtggatgcatttcgac

SEQ ID NO: 25031 - DNA, 277 bp, Glycine max
agtgcatcagatggcatgagcagatttaaaacaagtaggatcaatcttgttgacctagctgggtcagaacggcaaaaatcaacaggtgccgcaggagagcgattgaaggaagctggcaatattaatagatcactctcacagcttgggaatctgattaatattcttgcggaagtctctcaaacaggaaagcagcggcatataccgtatagagattctaggttgacatttttgttgcaggagtctcttggaggaaatgcaaaattagcaatgatttgtg

SEQ ID NO: 25032 - DNA, 783 bp, Glycine max
actacacaaggaaatgcaaaggacatcaaacttgtccctaacattttgcacatgttcaagtgaggtattaggggattccagtgacatgaccaccccattttgcaaaccaacttcccgtggatccaaaaattcttccccttcaagatcatttcgctccattagctgccaagggttcccctcattcagaatgaaccccagcctttgcttgggagcagatgttagcccctccttagtgccttgcactgtgggcagaaacgtgaggaaccacttggcaaggtgttctggttccagtttcagacgatcatcttctcaaacagaaagaaggaagtcatcatggttttgttccctcaatcaatctgttgacacaggcagtggatgctgattacattttggtctttttctttctcaccccaacattataccccatgattccaaatatcatccactgttcactacatttctacattgattgtaaataccaagcccaattgttttcagctgggacaaatttcttttttggcaacatatttcacaacacaatttctacaagtctcatgcttggtgcacgtaaatgcaaactgctctatgtggaattcatggcttataattatcaaatagcaaacctgtaaactagttgaaggaaaaatcgtattgtttgtgatcatggcttgtaattatcatacgttctgcttgaaatttggaccaaagactaatgctctttgcacatggagaaagccacaggtgatgttagctgcacgtcacaatttcattaaagttggctaa

SEQ ID NO: 25033 - DNA, 254 bp, Glycine max
cacactaatttactctctccactagctgttggctacagttttggagttcttggtattgaaatagtttctggcaagaaaatcagttcctatattatggattcatcctctctcctacaaacggtttggagcctctatggatcaaataggctatatgaagtcgttgatccgaccctagagggtgcttttcctgcagaggaagcatgccaactgcttcagatagggttgctttgtgcacaagcatctgcagagttgag

SEQ ID NO: 25034 - DNA, 273 bp, Glycine max
tggctccggagtatattgttcgtgggaagttgactgagaaagcacatgtctacagttttgggagttcttgttattgaaatagtttctggcaagataatcagttcctatattatgagttcatcctctctcctacaaacggtaactgttttcatttggaatgttgctactacatactaattcatttgacgttgttaacaagacaagcattctcataattctaagaactgtccttagttgataatcatttttgtgttcttttatacaaggtttgga

SEQ ID NO: 25035 - DNA, 325 bp, Glycine max
gaggagtgcaactctcctattgacaatcctaagtggtgttttcagtgtgatgtcaatcatggaaatgaagacatcatcgtggaccaacaacatccaaatagtgtttgagttagtatcgttcttcagcgcttgttcttcgttcaacgtgtacctaatttacaccacggagctgttcccgacctgcgtgaggaactcggcgctgtcgatggcgaggctggcagtggtgctcggtggcacgttcagcccgttgctggtgagtgctgcaagagggaacaagtttatgtgttatggggtttttgggttggtgatagggtttagcggggtc

SEQ ID NO: 25036 - DNA, 410 bp, Glycine max
tatttatatgggataagaataacataaatagtctccgtggggtgatcgattctgacgaacagtgccctctacttgttcctctgcgaatgtgacaaacaccaaccaacgaggattcgaaatcacagaggcaaaggaagatctcacaatgttcaatgttatcggtttctcgttgttgacgatggattcggtggcgtacaggggattgctctacacattcttcatactcaattttgttttggtctgccaactcattctccttcaacctctcgtctctgcttccgatggaaaacctgaaaatgctgctgagttgtttgagcgggcatcacagaacataaaagttaaagattatactgaggcacttgatgatctaaatgctgcaatagaagcagacccaaccctttcaaaagcgt

SEQ ID NO: 25037 - DNA, 959 bp, Glycine max
gttccgggcatgccccaggctaaggttgtcactccgaagctgtccaatggactaaaattgacaatgaaggatttagcggtggataagatcgtcagtaacggagttggactggtgccaccacacctggctcaccttttgtacgaggggctccactcccgtttggaatctgcgggtattgacggtgttaaggttgacgttatacacttgctcgagatgctatccgaggaatacggtggccgtgttgagctagccaaagcttattacaaagcgctcactgcttcggtgaagaagcatttcaaaggcaatggggtcattgcagagcatggagcattgtaatgacttctttctccttggtaccgaagccatagcccttgggcgcgtaggagatgatttttggtgcactgatccctctggagatccaaatggcacgtattggctccaagggtgtcacatggtgcactgtgcctacaacagcttgtggatggggaattttattcagccggattgggacatgttccagtccactcacccttgtgccgaattccatgcagcctctagggccatctctggtggaccagtttacgttagtgattgtgttggaaagcacaacttcaagttgctcaagagcctcgctttgcctgatgggacgattttgcgttgtcaacactatgcactccccacacgagactgtttgtttgaagaccccttgcatgatgggaagacaatgctcaaaatttggaatctcaacaaatatacaggtgttttgggtctatttaattgccaaggaggtgggtggtgtcccgtaactaggagaaacaagagtgcctctgaattttcacaaactgtgacatgcttagcgagtcctcaagacattgaatggagcaatgggaaaagcccaatatgcataaaagggatgaatgtgtttgctgtatatttgttcaaggaccacaaactaaagc

SEQ ID NO: 25038 - DNA, 472 bp, Glycine max
cacaatcatataatgtaccctttgagttccatgctatacgagctgctcccactgaggttgaactcaaagatccggcacttcaacctggtgaagctattgctgtgaactttgccatgatgttgcaccatgttccagatgaatgtgtggatagtcgaaaccatcgtgaccggttggtgagattggcaaagtgcttgtctcctaagattgtgacacttgttgagcaagaatcacataccaacaacctcccattcttcccccgtttcgttgagacaatgaactactacttggctatttttgaatcaattgatgttgctctgccgagggagcacatagaaaggattaatgtggagcagcattgtttggctcgagaagtcgtcaacttaatagcatgtgaaggggcagaaagagtggaacgccatgagcttctgaagaagtggagatcacgtttcactatggccggattcacaccata

SEQ ID NO: 25039 - DNA, 190 bp, Glycine max
acaattccacgcaattggcatgtgttagaaagccttacaccattatttgcacctaggtacctatgtattattctgtgtatataagaaagcacaatggttgtgacgaacttttttcctttttcttttataaacatttttttttctcgttttctttatgaacacaccaagtactcgtagatggtgattgagg

SEQ ID NO: 25040 - DNA, 481 bp, Glycine max
ccgaaattctgcagaaaaaatgtcaacagcaaacgcaaagaacaaatccccctccaccgagctccaccctccttacttcgagatgattgcggatgcgatatcgtccttgaaagaccgcacgggttcgagccagccagcgatagccaagttcatcgaggacaagcacagcaaagtgctccctcccaacttccggaaacttctctccgttcagttgaagaaactcgtcaaatcggagaagctttacaaggtcaaaaactcttacaaactttcttccgccacggacaaagagacccagaagaataccgaaaccgagcccaaacagaaggttgaaaagaagaagaagaagaagaagaaggtgggtgagaagattaagaggccgagccaagtgaagacacccgaaactctgaagaagaaagcacccaccaagaaggacgcggcggcaactaagaagaaatctgcgtcggcggtggaaggttcagga

SEQ ID NO: 25041 - DNA, 277 bp, Glycine max
aaagaatcctcctttctgaagcgttgcagggagagcggtaactcggagattttgtaccgtgaaggaatgcttcaatatttcacttcttcaagggtggaattgggtctcaagaatttgaaagaggcggcgctggagggtcaccatgatgccaaatatgtttattgcatgcttttgatgtgcggtgaagatgaattaggacaaagaaagcaaggttttgatctcttttgttccttgaaagcgtcgtccacgtctcttattagatgcagaaaaagggtta

SEQ ID NO: 25042 - DNA, 852 bp, Glycine max
gaaaagctccttgcgctctctctctctctccaccaaattgcattgcagctaaatttcgcagaactatccttctctctctctctcatccacgccccaaatcttagggttttcaccaaataaaacaaccccaattcctcgaactcttcgattcgattacccaaccccacacgctgattccacatcctccatgagatttggttgattggatcgtacgatggcggcgccgaggaatgtgacggcgacgagggacgaagagaagggcgaggacgatgattcgccctccgcgaagaagcccaaatcggagaggttcccgctgaacacgtgggaattcgccgtcgccgtcgccgtcttcttggtgttctccaccggcctcttctgcatttacctcaccatgccctcggccgcttacaccaacctcaaactcccccgcaccctctccgatcttcgcctcctcaaggaacatctttcgacgtatgcgagtaaccaccctgcgcagttcattcttgggtactgctccacctacatcttcatgcaaactttcatgatgcctgggacaatcttcatgtccctcttggctggggcgctttttggagttgtacgaggaatcctattggttgttttcaacgccactgcgggtgcatcttcctgtttctttttgtctaagttaattgggaggcctttggtttcttggttgtggcctgaaaagctaaggttcttccaagctgagattcgaacgtagggataggctgctgaattacatgctttttctgaggataaccccgacattgccgaatctgttcatcaatttggcgtctcccatcgttgatgttcccttccatatattcttttcgg

SEQ ID NO: 25043 - DNA, 556 bp, Glycine max
ggagcctgctcgaaggtatatgaattctaaactaaggagttgttcttccgaaacatgtgaattccaggggacatatccagaactcaggaagcatgctaggtctgagcatccttctgttcgaccatcagaggtggatccctcgcgacaatgtgattggttaaggatggaacaagaaaggggtttgggagatctttttagctcaatccatgcaagttctggtgcagattacaatagagataccattttgactgggggtcttgctgacttgatgtcctcattcttgtatgaaatatttatctctattgaagatgttaaccgtatggctagtttgttgactaattcaagacacagagttccattatatgacagaaggtctggaacaacacacagggtatcaaatgatacacagacaaatcaatcagctcgatggagatccaatttaccttcaatgcatcaactggagagaattgctaggagtagagagagaaccaattttccatatttatcatcccgtgatcttgagttagaggcaaatcgtacggctagatggagaaca

SEQ ID NO: 25044 - DNA, 292 bp, Glycine max
cgaggttcttggcccttatatatttctctttctcgtgtgtacaccacacaccacaggagttgtacaacatggagatatctgattttgttcctgtgtgtggaagcatgaagaagtacaggagaaaaatatcaacatatcataagcttaagagcggcacagaggtaagtgatgattgcagtgttgagaatggttgtatgttaaggccaaaagtgaaaatggttgaagaagagatacagaaagctcatcaaccgaagattaggttatccataaatctttggaaaaggttgagaaa

SEQ ID NO: 25045 - DNA, 306 bp, Glycine max
gcacttctgaattgcactgacccgagctcccatgcctttgttagagataacaaatgcgcaactatccttccggtattcactgacaatcccaatgccacaccatcatgctaatggaggagggtcttggatttccttccgcagccttagaattagaaacttgaatgtcattaaggctgttgccaccttggatgctaaacctcgcttggatttggatgcacctcatccgcctggctttttgctcgaattctccgacccacctgatgatagggagaagttgagaagattgagaatttccaaagctaataa

SEQ ID NO: 25046 - DNA, 306 bp, Glycine max
ctcgagccgaaaaaagtgatagaatagagaagaagaagaagaagaagaagtgatagaatagaagtaactttttctctcttctctgcagtggtggtaatttattttccaatggcttcagcaaccgagacggcgaattcctccgttccgccgccgcaaatccacacctcacgaacaaagctgagccaccacagcagcaacaacaacaacaacatcgactccatgagcaaggccatcgcgcagtacacggaggacgcgcggctccacgccgtcttcgagcagtccggcgagtccgggaggtccttcaac

SEQ ID NO: 25047 - DNA, 761 bp, Glycine max
gattaagggaagaaaacatcaagtgtgagtgataggtttttaaattcagtaagaaaggcatgctctatccttcagtgcccaaaacccgttcagtcccaaaatatgactgagatggattactcctccaacatgaaaatgtcaacttgccaattgagctcagtttgtgcagtagaaagtgttggtaatggggataaagagcagtcttgtacattagatatgtcttcatgtcagaaggatcattgtagtgaagtagaaagtacaactagtccgcttgacttcccattacatcaacctttggatgttttggaacgaattgcactccatccgttccaggatttggagtctttgctgcttgatgtgtccaagcctgctgttaccacaaagaatggtattgatcaacggtcaggcaagcaagtgtctcgtcggccaagcctgccaacctttccatggtcacatgcttttggtggccattctagaactaattctgacacaggtaagttatcaacaagtagaagcatgtgccaaggtaaatggtcaaggacatgtgtcattgctagctctacagatgctgatcgcagttccttcacaaaccttgattcattcagttatgatcagagccttgttccttcatctggtagttcagacaaaaagaatttctcatctttatttgctaaccttcctttccatctgttggattcttcatcttctgtatcatgttcagaagattcttgggctaaagcagaatttggaggcccagctga

SEQ ID NO: 25048 - DNA, 600 bp, Glycine max
ctcacgcgtccggtccgtgctggcaaaagattccctcattcaatcactatggcgtagtgggtggcggggtggcagttctttggttgttcccggtggctggctgtggtgttaaatagcaatggtggttacaattagaaaccctaagaggcatggggtgtggcagctccaagctggaagatctccccgcagtggccctttgccgggagcggtgtggtttcctggacgaagcaattcaccagcgctacgcactggccgcagctcacatggcctacatcaactccctcaaggcaattggtcactccttacaccttttcattcagcaagacatggatgctcctccctctccctctccctccccctccccttctccccctcacaaaccctccaaacacgcctcttcttttgactccgactgcgacggctctcaccttcacttacactccgactccgacttcgaccacgtacactgcctccaccattcccctgatccatgctctcctctggctcaccatcttcatatgaattacatgaagaataaagccgctccttcaattgtctacgagcagaggcctctgagtccccaaaccatgtacttgggag

SEQ ID NO: 25049 - DNA, 445 bp, Glycine max
tcgctgtttcgtggggaaaaggaaagaggcatggggtgtgccatctccaagctggaagatctccccgcagtggccctgtgccgggagcggtgtggtttcctggacgaagcaattcaccagcgctatgcactcgccgccgctcacatcgcttacataaattctctcaagtcaattggtcactccttacaccttttcattcagcaagacatggattctcctccttccccctcttcctccccttctccccctcacaaactcgcccaacacctccccccctcctctccttctccctccgattccctcggctcccacctccacttccactccgactccgacgacctcccctccctccaccattcccctcaatcctcctctcctattcctatcgcttcttacttcaccggtccagatcatcaccctccccatcttcatatgaatttcatgc

SEQ ID NO: 25050 - DNA, 348 bp, Glycine max
ctgagatgtgagtgacggtgatacctttcgtgcgtttacttttcttttcttttctctcttcacatcaaaatcacttatctctctctctagagaaaatggcagcttgcatattcacggtggcacaggacggaaccgcagatttccaaacggtgcaggaggcgatcgacgccgtgccgctcggcaacattcggcggacggtgattcgggtgtcgccgggaatctaccggcaaccggtgtatgtccccaagaccaagaatttcatcactctcgccgctctcagccccgaggacactgtgcttacctggaacaacactgccaccgggtttggtcaccaccaacgtacgacgg

SEQ ID NO: 25051 - DNA, 311 bp, Glycine max
caaaaacgtgtctgacagcaactctgttaactgtgacaccccactcactcgaccattccatttgttaactcagtctcagacacaacacaatccaaaaaacacaacattctggagatgtgagtgacggtgatacctttcgtgcgttttcttttctgtcttcaccccaaaatcacactctctctctctagaaaatggcagcttgcatattcacggtggcacaggacgggaccgcagatttccaaacggtgcaggaggctatcgacgccgtgccgctgggcaacattcgccggacggtgaatcgggtctcgccg

SEQ ID NO: 25052 - DNA, 652 bp, Glycine max
cgcacgggtgcgtagtgcgtaccccagcaggaaatggattacactaggatacagaagtaatctgttatcgttattccttccaccctgcccggtggaaccaaacgaagaagacgttccgttttccctctgcttttccaagttttcatcgactcaaccatgctattcttacataactagggttaggagttagggcgttcttatcgttttcgctccgttaattacaacaacggccaacatggttgttctttcgctttcacctcccagcctctctaccgctttcctcgcaaagaaactgtctccccaagaacacgcggtgaagctagcgacctttcgcaacaattcatttcgcattagatgcgcggtggatacgccctatggagggaatgttcaaaaattccctcgaaccaatgtttgggatccttaccgacgccttggtattagccctgatgcctctgaagaagaaatctggggatcaagaaattttctgttgcaacaatactctgggcacgagaggagtgaagaatcaatagctgcttctattgattcttcactcctctcatgcccagagtattgttgcaacaaagcagcttttgaaaaaatattgatggcaagtttcgtacagaggaggaaaacaaaaattaatttgaaaagc

SEQ ID NO: 25053 - DNA, 259 bp, Glycine max
gtttgttgtagtttgcacacgggtgcgtagtgcgtaccctggcaggaagtggattacaagtattctgttatcgttattcctcttcttcttcttattgctccaccctgcctggtggacccaaacgaagaagacgttcggttttccctctgcttttcgaactttccatcgactccaccatgctattcaattagggttaggaattagggcttcttccttgttttcgctccgttaatttcaacaacggccaagccggttgttt

SEQ ID NO: 25054 - DNA, 881 bp, Glycine max
ccagaagagagagaaaaggaccaaagcaacaacattagtggcaaccaagcacaaattccaacaacaccatcagcagccacaacatcaacagcaacagcaacagcgccaccaccaccaccatcaacaacgacaaaaacaacaaaaccgacaggcaaaagatccgataccatcaatgcccccgaaagcgacccttcacagcaccttgcaatgaataacagacaaggcttctcggaaaaccaagcaaagaagtccaccgcatccaccaccgccaccaccaccaccgccgccgcctctgaggtggcgccacccgtgtctcagtgcttcgacgactcagacctgcccccacacagattaatggcctctgatgacaacacgtgtcgcttggtcacagcagattttgggaccgcatctgcaagtgctgacattggatccacactcattaggtttgggaccacacccggtgacgtgtcactcaccctagggcttcgccacgccgggaacatgcccgagaaatctcctttctctgttagagactttggagccatttaaacttcaatatatattatatagtactacttcacataataataatcaaaataataataaatattatataggaagatgctttatcatattattatgtatatcatatcatcaaaagaaaacatttttcccccctttattgtttctcagttattcctcgatctgtcttatttgcattgtggaaggacaggagaataaaaaaggcaatacgatatgagaaaggtagtctgaaggtagctattaattaggcgcaacattaatatggtatctattgtataactgtatagcagattgtttttcatgattatttttcccgatatatgtactttattattttt

SEQ ID NO: 25055 - DNA, 496 bp, Glycine max
gatggtacgccaccaaccagatcctccctgacggttctgtcatcataatcggcggacgcggctccaacactgtcgaattcttcccacccaaacaaaacgtcgccgtttcgttccctttcttatccgaaacggaagacacgcaaatggataacctttacccctacgtccgccttctcccaaacggtcacctttttgttttcgctaacacaagatcggtcatgtacgatttcaaccgccacgtcatcgttaaggaataccctaaattacaaggtggcccgagaaactacccttccgcagggtcatcagcgatgttagctttagaaggagactattctaaagctgagattgtggtttgtgggggtgcacaatacggagcgtttttgaaacggagtactgacaccccggcgcatggtagctgtgggcgcattttagcgatcgaagagaaaccgagatgggaaatggaagacatgccgtaacggaggattatgggggatat

SEQ ID NO: 25056 - DNA, 633 bp, Glycine max
taacaaaccatctatgcagataaagcaggcttccatgactctggtcaagacatacatgaaaagagtgacaatggagcttgaatccattcggaattcagacagagaatccattcaagattctcttctgcttcagggcgtgcattttgcatatagggctcatcagtttactggaggattagactcagaaacaatgtgtgcttttgaagagataaggcaacgtgtaccaggaaacctaacagggtctcgagaacttttggctggcataccataatcatgagaaaccactgatttttttattctgctactaatggttacaaaagctggctattacacattcactattctttttcttatctccaatgtcattgcttggtagacactgaacccctcttaagaaatatcgaagagcataaagagattctgaagaaagaatacttcatagtaaggtcataaagtggcggctctaaacatgtcataacctaggaataggatcttcagttcagggtagtttaatttcaccagttaattttgttaggtggttctttctagtgctgtaccaaccaacataagtagcttaatttcccgtttgtaagtacatatgattaacgtttacccagttactttattgttttt

SEQ ID NO: 25057 - DNA, 359 bp, Glycine max
tcacgcgtccccaataagcgccttatcatgtctcccgccctcaccactctgtcaccgccgttatctctttccgttacttcggcggcgcgtcgtccacggctgacagcgatggtgaagactgagaaaaagcaaagcctcggcttcggcagcgataagaaggaaacaaagtggcactgcgtggagggttgtggttcctgctgtaagcttcaaaagggtccatcttttccctctcccgaagaaattttcgacgacccttctgacgttcagttgtacaaaagcttgataggtcctgatggatggtgtattcattatgagaagagtactcggaaatgctccatttaccctgagcgtccatattt

SEQ ID NO: 25058 - DNA, 298 bp, Glycine max
acgtccacaaagtcctcaagctctcgaaactcgcctccgattaccgccccttcgaggcgaacgaaaactctgcgattcttatgatttgttttttgcagagaagagcattgtgccgctcctgccgcggcttctggggaagagttttttcaagaagaggaagattccggtgccggtggacctgaagaaggggagctggaaggagcaggtggagatggcctgctcgtccgcgatgctgttcatgacgacggggacctgtagtgtggttacggttgccaaggtgaggatggagagggatgag

SEQ ID NO: 25059 - DNA, 371 bp, Glycine max
gtaaataagatagtgggggaaaacctggaagaagaaaacaccaaaatgtttcgtttcgagcaggaaaagatccgaaaacgaatttgattcgtaaagttaatttcttttcgacaatcaaatagtttccagcttgttgggtgttgccatggccgacgctctctcgttgattccggcagccgtgcttcgcaaccttgctgacaagctctacgagaagcgcaaaaatgctgctcttgatattgaggggatagtgaagcagctagctactgctggggatcatgataaaataacggctgcgatcaatttgttgactacggaatttacttattcaccacaagccaaccatcggaagggaggattgataggattagcag

SEQ ID NO: 25060 - DNA, 287 bp, Glycine max
caacaacccagttcgcataactcgaatcaagcttctcaagcccactgacacgcttgttattggccaagtttatagactcatcaaaactcaagaggtcatgaagggtctgaaggaaaagcaaaaggcaaagatgaggcaaaacgtgccagagtcagctcacaagccagatttggagaaggagaaagtagcaaggaggtctgaaatggaggacaataaggtaattaccaaacccgaaagagctcgaccaaggattacagcaccaactaataatggtgccacagctaaga

SEQ ID NO: 25061 - DNA, 286 bp, Glycine max
accaggcacgacgctgcgaagctcaaaacctcgaaggaccttgaagcgaacatcccccgtgccatatcaacgttgtcgcagtaccgccttgccgtaggctgccccgctgtggttgtcagctgtgtcgtggttggctgtttggtgttgacgtcaattgtagtgtcgtgcgcgccccgctgtgccctgctgtggaaggctacaactaccattaaacccatacaagttgaagtgtgataaagaacccttgaactgctactagaaaacgtttgagggctatcaatgaatc

SEQ ID NO: 25062 - DNA, 316 bp, Glycine max
ggccgctaaaaagggctatctcaattttttccttcttctcctctgcgttgcaagattcttggaaacccccaaattcttgtatttgattagaaaaggtcactggttatcctttcagtgattgtttttatctgtatcaaccccctggcagtatttttcatttttcagttaaggctccagctatcatatttgggttggttttttattaataaaaaattgataaattccggttcaatactctttgtttccctaccgagcaagttgcaactcttggccaaaatggtaactgagttaatcaatgcgaaccctatcatatatg

SEQ ID NO: 25063 - DNA, 305 bp, Glycine max
cttagtcattgtttgctacatcaccatcgaaggcacttgcaagtcacgctcttaacactaacactcttcaatctctctctattttttcaatttcatggcattgggtagaaacaagactgtccaattagcattgcttctcctctgtttggatctgggaatagcgcatcagcatcagggtcactccccttcccattctggtttctgtgcttccgatgcccataatcactgcggtgatgaccatcatcatgaccatggccatgcgcatgaccataataaggacaagattgatgctaggtcgaagcttc

SEQ ID NO: 25064 - DNA, 1071 bp, Glycine max
ggagtctccaaaatttcccatttcattgttcaccttaccctaatcacgcatccgattcctccggcggatcgccaccgtcgccggcaataaaccagccgtgccactccctcgccggcgattaaccaagactaagaaaaagtagagcgagaaccagcgaagactcttagcttcactttcttcagctcgcagtttcaatcacttgcccaatcgaatctaacggagtcctggaaacagtggcaacggctttcgctccatcggtgttatggagatatcattgttaaaaatgattgtcaatggcatatcctcatttttgcatttatctttttctggaaacatgaactctgcacctgtcccaaagtattaccagaaggcagaggagatacttaagttattgaagccaatcattgatgcaattgtttattctgagttagcttctgatgaagttcttaataagatattggaagacattgatcttgctgttaatgaattaaaggagcatgttgagaactggcacctattgtctagcaaagtatactttgttatgcaacttgaacccctgatatcaagaattcgcacttcagggctcaatatttttctgcagctgaaggattctcagcattgtctccctgatgaattaagttctgaacatttgcagcactgttcacaaaaacttaagcttttgggacatgaagaaacctcaccagtcattcaggaagctattacagaacatctggaaaatgtaggacccaggtcagagctcctgtcaaaattagctgatagcctgggcctaaggtctaatcaggaggctcttattgaggcagtggccctcgaaaggttgaaggagaatgcggaacaaactgaaaagactgcagaagctgaattcattgatcaaatgattgctgttgtaacgcgtatgcacgagcgtcttgttatgcttaaacaagcccagagtatcagcccagttccaatacctgctgattatcgatgtcctctttctttggagatgatgactgatcctgtgattgtggcatcagggcaaacatatgaacgagctttcatcaagaactggat

SEQ ID NO: 25065 - DNA, 646 bp, Glycine max
gtgaaacatgtttttatgattctatcatcttttataaagtagtacagctttgggtcttgagaagtgttgttccttgtaacgacttaaccccagatgggacaagcaaaatgaaaaaggctataagatcatccctcatccctcacggtggtgctgttacggtcccacccacccaatccaaaccagattgccatcattattcaaacaaagtgccataattttaacccggaaattaataaatttacatacaagtgaggagataagcttaggattccccaaggaaactgacaaaccctacggtcccgattgcttaataatcgtgaatgggacccaatctacggacaatatcaatccactcagtggaaagtccaaagccaaatttaccttgttattattaccatcacccgctgctcatggatgccattcctgtacacgtgtcacctcccacccgtatacggcgagtcaaaccagattcgttcactcacccaaattctgccatactagtttcaataacacaaattggggatttcacaaccctaaattatacaattagtaattttctttttggaacaacaacaatactagctagctagcaagctactagcaatagcttagcgtagcatatataaaaattaatcatacccagaga

SEQ ID NO: 25066 - DNA, 285 bp, Glycine max
gccctatctacggtcccgattgcataataattgtgaatgggacccaatctacggacaagagcaatctactcagtgtagcgcgttgaggccaaagttgacgttattattaccaccctcacccgctggtcatggatgtcattcctgtacacgtgtcacctctgatccgtaaacggcaagtcaaaccagattcgtgatcactcacctaaattctgccaaactagtttcaataacacaaattgggatttcacaaccctaaattatacaattagtaatgttcttcttttg

SEQ ID NO: 25067 - DNA, 597 bp, Glycine max
ctgctgcagtgcttcatagagaaagaacacttctaatttaaaaaataaatcaaaaatttaaaaccctaacccaatcaatcggaaccatgggatacggtgaaaaaggaggacgacctccattcaaaaagcacaaggcctcaactaaattccaggaagatccccaaaaaggaatcgcctacgatgacgatggttatggcggcgaagatgcctacgacgatgacgatggtaaaaccaaggattttagcaaattagagctgaaaccggatcacaccaatcgccctctgtgggcttgtggcaatggccgcatattcctggagactttctcgcctttgtacaagcatgcttatgattttcttatcgccatcgccgagcctgtttgcaggccggagtctatgcacgaatacaaccttactccacactcgctgtatgcggctgtttcggttggtctggaaacagaaacagtcataaatgttttgaacaagttatccaagaccaagcttcccaaagagatgattaaatttatacatgattctactgcaaattatggcaaagtgaaactcgtcctcaagaagaatcgatatttcattgaatctccat

SEQ ID NO: 25068 - DNA, 359 bp, Glycine max
cggggggtccttgttgaattgttgggggcattctactcagagctgtgaagtgcgaagatggctacatggtgtatgcgagccccactgtttcctttgctaaaaaaagctccctttattacagggaagagaaggagaagggcatggttccattgttgctcttctccgcaggcatggcaaccttctcgtaagaaaagagtcgctatgcttgtcgcctatgttggcaccaattaccgaggtctccaaatgcagcacgatgaacattcactctcaactattgaaaaagaactagaaactgccatattcaaggctggtgggattcgtgaaagtaattttggggatctgcagaagattggatgggc

SEQ ID NO: 25069 - DNA, 267 bp, Glycine max
gataacatttggcctcaatataagtagctggtgccgggtatcacggacatgtgtatgatgaagccacatttttggattcttgtgtcttgtttttggtacattgtgaatacagtgtttgaaagattggttcttgtgtctgaacaatgcataaactaattgattaatgtatgatcaatttattaattggcattagcagcaggtatatagtccaattatgaaaacaggagctcatacttcttttgcatttttgggtaggtaaggtgcagc

SEQ ID NO: 25070 - DNA, 399 bp, Glycine max
cttggcttaaacccctctttgcagacttacactttgcttctcagttgttgtacggaggcacaatcaccgtatgatatgggattttgttgtgagcttatggcagtctctggccatcctgcacatgcatttttacatccatgccagcagcaggacctgatggtcaaaatgtgcgggatcatgtaagcaaattcttggacctgatgcactccgaggatagagagggcaaaagggggcttgtagattcagtggtgaattttctaaacaagtctgggctcaaggaggaagctggttcagtttgggaggctgctgcacaaaggaatgtgtatccagatgctgttaaggaaaaaagctctcgctattggcttataaatcttcatgtatgtctgatggaatgctgtg

SEQ ID NO: 25071 - DNA, 308 bp, Glycine max
gtcttcctccgtggcgtggcttgttaaggtgtgaaaagtgaaagagggaacaagaagttgacggtagcagaatggtggtctccagtacaaatccccacaataaggagatagctatcaggaggaggattgctagcatatttaataaacgtgaagatgatttcccatctttgagagaatacaatgattacttggaggaagtagaggacatgacatttaacttgattgaaggaataatgtttcagatattgaagcaaaaattgccaaataccaggaagaaaatgcagaacaaataatgattaatcgagctc

SEQ ID NO: 25072 - DNA, 1596 bp, Glycine max
gccaccgccttctcatcctttataaactcataccttgccttcgtcttcctttcaagcattctcgccgatgaactcgtctccgtcttcttcccagttaccttcatcaagcgctgattttgacaagtttaatagtttgccgcgcttccgcccacttgaatgcttgcaagggaacccggttccggcgttcctgtccaagactttcgaactcgtcgacgatccctcgctggatccgatcatatcctggggctccaccggtgttagcttcgtggtgtgggatcctaccctgtttgcaagacacgtcttgccgaggaatttcaagcataacaatttctccagtttttcacttggcatttttatccagggattccgcaagattgacactgaaaaatgggagtttttcaatgaagctttccagcgaggaaagagacatcttctgaagaacatccggaggcgcgggccacctcagtcccatcaggttggtggcaatattgtgccttattccgatgcagataaggccgggcttgaatttgagctagaaagtctaaggaaagaaaggagtgtgctaatgcaagaggtggttgagttgcaacaacagcagagaacgacacttcaacgtgcgagacaggtgaatcagaggcttcaatctgcagaactgatacagaaacaaatggtttctttcttggcaaggttatttgaaaagccagcatttttaaccagtctccagcatgcgaaggaacaaagagatttagggtgtcctaaagttagaaggagatttatcaagcagcaccaaggccaaacagaaatatcagattttttaaatgaagggcagattgtaagataccaacctgattggagaaatgtaaccacctcttctgaaatacaagaaatgtatccagtttcacttgaagagtctccaaattacctttctcaggctttggcaaaagaatttagtgaaggcacagagaatctgatatcagatgaagtcatgtcaattgctgacaccatggggtttaagtcatcaagctttggacttgatggtaaccttttcaaagggaaaaatgtcatgagctcaaacgaaggtcttcttgcagaggagtttgtgtctttcccagaggatttgaccaaggagacaggatttccagagttttcacctcttggaactgaaggcatcatcaagcgagaagataaacggaacaccaactttgatgttagtggtgctgattcaagctctgggaatgaacagtggggaaatcctatcaattatgaagtgccagaatttgtagtcacaagtggtatgacagacatgtgggatattaactatttaactcacagcaagtgacagaaagtatcccaactgatgattcaacacttgatgaaaaagaaagataatataaataagaatatggatgcatcgggcttcatctgcttctgcacatattgtgctgtgtttagttcccaggggtccaattattaaataaattgatttgtaactggtgctcattcactaatcaccaggtttcattcttttagattagttgtgtagttgttcatgctagtagttatgaaccaaattcttaatttaaatatgttaagatt

SEQ ID NO: 25073 - DNA, 387 bp, Glycine max
gtgaggtctcttatatcattgtattctgaagtgggaagaagtgcagactctttgtcccagtactttggggaggatccagctagatgcccttttgaacaagtgacgcaaatccttgttgtctttgtcaagatgttcaacaagtcaagggaggagaatgaaaggcaggcggatgctgaaaaaaagaaattagagaaagaagccttgaaggaaaggacagcaaataactcgctttccaaaaaagatggcgttcgataggatgcctatacaagcaagccgcatggttacttttagttcaaacaaactgcgctatacattttggactatctcaaatgcatatttgcatgcacctttgggatttattccttctgaagatgatgctggccgttg

SEQ ID NO: 25074 - DNA, 497 bp, Glycine max
cagttctgaagcagacatgatcaagaaaatgcgtgccagtattgctttgcagcctttggcagcagccttattcgctaattcacctttcaaggaaggggttccaaatggttatctcaccataagaagccatagggtgggtcagatggacaaaagtcgcgctggcatactcccctttgttttttatgacacttttgggtttgagaagtatgttgattacgctcttgatgtgccaatgttgtttgtttatcgaaaaaacaagtacattgactgccggggcatgtcattcagggacttcatggcaggtaaactccctgtcattcctggtcaggtgccaacgcttggtgactgggaaaatcatctaacaactatatttcctgaggtcaggctaaagaggtacatggaaatgaggggtgctgatgatggccccttggaaatgttatgcgctctgccggctttttgggtaagtttactgtatgatgaggtttcgctacaaaatg

SEQ ID NO: 25075 - DNA, 280 bp, Glycine max
gtcctctctccgctgtcttgcactctcccttgttgcccgtcttcggacacatgattttccaattgcatacaaatttaccccaacgctccgctttcatccattttctttcgattcacacacaaacagatgagtgttgttaccgattctcctgtgcattcgtccagcagtgatgacttcattgcatttcttgacgctgaactagatgcaagttcaccggactcgtcgcctgataaagaagttgaaaaacaagatgatgatgagcttgagagtgtcagaatta

SEQ ID NO: 25076 - DNA, 627 bp, Glycine max
ggagcttcgtgacattgttagtgactgagatgagatctgctggttgggatattgatgcatcagtcaaggccattatgcagcagactgtggtttactggaacgaagatcacaagtgttttgcaattgagtcctttgtgtgtagggagatgtttgattcattcaacttccccaacgttctccctaccaaatgagtccctaccagataggaacaggaggcaactgttctttgggaggttcaacgagctaaaaccagagaaagcaaaggactttcttgcagggaaaccaagatcaccctttgcaaaattctgcaggatcaagtacttgaggcttgttcatcccaagctggaggcatccttcttcggcaacctgaatcagagaagcctgctgaatgccggagagtttcccaacacaaatttcttcacctcgtttgctgagatggcaaagagggtatggctcctacattgcttggccttctcctttgagcctcctcaagcttcaatctttcaagtggggaaagtggtgcagattctctgatgtgtacatggagagtgtgaatgaaaatgatgaagaaatgccagtggagtccgagacacaaattgctttcactgtggttccagggtttaggat

SEQ ID NO: 25077 - DNA, 256 bp, Glycine max
aatcgatcgcatggttaggtctggttatgagagagagtgtcttcaggtttatagtagcgtccgtcgtgacgctttggatgagtgtttgattattctcggtgttgagaggttgagtattgaagaggttcagaaggttgagtggaggagtttggatgagaagatgcagcattgggttcaggctgttaacgttgttgttggagtgcttctcagtggtgagaagaggctgtgtgatgggttggttggggatttggatgat

SEQ ID NO: 25078 - DNA, 331 bp, Glycine max
ctgatagagaagggggcaggccacttgacatgtctattgaaaagttagatatcaatggcttttcagcaaatcaggcttggggcaaaagcaaatttatgccaccatgcattttttatgcatatactccagatcaacctgcctcatctggtgaaactaagaaatcatcagctaagaagaaaatgtgtttaatctttgtttgcgttccggttagtcctggtaaaagcagattgatatggtgcttcccaagaaactttggattgtggatggacaaaattgtaccacgatggatatctcatgtgggacaaaacctgattctggattcagatttata

SEQ ID NO: 25079 - DNA, 366 bp, Glycine max
cgcgaacgaaaattctggagtgccaatgagaagaggaatagaaacttgggcaacaggaaaaagattcgtcaacttgagaatattagaagatcgaaagagagagagagaaaaagttatagagagaaggttcaatggtgttgtgggagataccgctcggaactgcgtatttcttgggtctgaagcgaacttacaggctcgctctcaggattcaacgcaggatcgtaagccctaagtaccctaagctcctccaatttcttcacagacggacccgtgctgtgtttgatgtagctatcagagtgcatcgtaacattcaagttagggacatagaagtgggacggaattttgggaactttatattgcgatggc

SEQ ID NO: 25080 - DNA, 373 bp, Glycine max
  unsure (1)..(373): unsure at all n locations
tttctacactaagtttattatgtgcaatcagagccaagtcaagctctttaaattttgttctatcttggtatgcaaaagcacagtgcaaacttcctcctcctaccttggggtgtttagtatccaaagtgattcttaggatcgagagacaaccagtaaatccaaacaatgaacttaaaatttagcagtttccttgttgatggtaccgtggaacagaattttgacaatcacaaagtggaaggacaaaactcagcacctagcaaccaacaatgagagacataagatcatgattaagagccccaaagaagcagattttccattaaaactggaacccgcantctcaatcaattactgatcctgaaaaggcaaaggcttc

SEQ ID NO: 25081 - DNA, 746 bp, Glycine max
cggacgtaagctcggtctttgctcgactcgagccgattcggctcgagctcgactcaattgctgtggtgagcttcttttcaggcactaacgcttgtataggaatcagaagacctggaggcagtgccatcactagaatctgtcaggtggtaatggcatccataagaaaatacaatgttgaagtacctgctgacgagtcacttttatatgagactgctgaaactgaatctgctataaaaggaagccgaaagcttgaccacacaaatgagctaagattttttgacaaagcagcagtgctagcacagtcagataaagtgaaggaatcaacaaacccttggagactttgcactgtaactcaagtggaagagctgaaatccattttaagaatacttcctgtatgggccactggcatcatattttccactgtctatggtcaaatgagcaccttatttgtgttgcaaggacaaaccatggacactcgtgttggcaactccactttcaaaatcccaccagcttcactgtccatctttgacaccctcagtgtcatattttgggtcccagtgtatgacaggatcattgtgccaattgctacaaagttcactgggaacaaaaatggcctaactcagctccagagaatgggaattggcctcttcatatccatattttccatggtagctgcagcaatattggagctcatacggcttagaatggtgaggaggcacaactactatcaacttgaggagatacca

SEQ ID NO: 25082 - DNA, 254 bp, Glycine max
accatggcgtggaatcatcgtcaatattctaatcctactgcagaaagcctctctagctttcagcttttcctgtgtgggttggctgctggaacatgtgccaagctcgtctgtcatccacttgatgtggtcaaaaaaagatttcagattgaacgtcttcaaagacatccaagatatggagctcgggttgaacatcgtgcctacaaaaatatgttagatgccgtgaaaagaatattacagatggagggttgggctgg

SEQ ID NO: 25083 - DNA, 447 bp, Glycine max
gtgatgtgtacgagtctgaggaatctatagttgatgatcctgaacaggaggaggatgaagaggggaccaagtttcttcataacagcataaaaaatgagcaagtttcgtttgtggcagcgagtgatgttgaagtgtgaagctgaggggtgaagataagagactcaatgaagagaacaaggctcatagggatcaaatcaagcagaaggataccatttgtgatgaaatcatgatgctgagggaagaaattggaaggcttagagatgagaatgaggcacagaaggaacaactcaagcagaaggatgaagagaagattgaggtgataagacagctgagtttagcaatagatgtgctgaagcaggagaatgtgaagatgagaaacttcattgctaaggagtccaccaagaaatggaagaacccatttgagatcaacaaacttgtgggagcatt

SEQ ID NO: 25084 - DNA, 675 bp, Glycine max
ttttcctcaatgcctgttcacgcgcttccattttcaaaggactctccgccgcccaaacccaaggaggctcatttccggggtgtccgcaagcgtccctggggccgctttgccgctgagatccgtgacccctggaaaaagacccgaaagtggctcggcacctttgacactgccgaggaagccgccagggcttatgacgccgccgccagaacactccgtgggcccaaggccaagaccaacttctcctacatccttgctcccgctttccacctccctcccccggtgctcactactcccgaagcccatgccctggcccaagcccaagcccaggaacaactcgccagacaggtcgagttctgtggcccaccgtttttctttgcaactgatgtagcttccaccgcgccggtgaggtcggagtacaagggttacaagttagagaatatcgcgggttttgtggtgagtaaggaggagcagaaagagaaaaataagcccttcttatttgaccttaacctgccggcgccgctcttctgaagccgccggcggagaatgacggcgccgggggcttagtgtttctatcttaaatgtctttgaatttgtctatatgacttgttttgagggggaattttaggtgctactccgcccttgttttgatgtacagtttagtttattataggtttt

SEQ ID NO: 25085 - DNA, 482 bp, Glycine max
gtgggggaaaataaactagtggaggagtctgacttgtcaaagttgccttatttgaacatggtagtaaaggagaccttaaggttatatccggctggacccttgctagtgcctcgcgagtccctagaagatataactattaatggttatcacataaagaagaagacaagaattttagtcaatgcatgggccattggacgagaccctaaagtttggtcagataatgctgatatgttttgtccagagaggtttgtgaatagcaatgtagacattagaggacatgactttcaacttttaccatttggttctggtcgaagaggatgtcctgggattcaattgggtctgaccacatttggccttgttttggctcaattagtgcattgcttcaattgggagcttccatttggtgtgtctcctgatgacttagatatgagtgagatatttggcctttcactaccaagaagcaagcccttgctagctatacc

SEQ ID NO: 25086 - DNA, 395 bp, Glycine max
gcataataatgaccagttctcgagagcgtttggtgaaggcggtgaagcagtttgtggaggttcgctacaaggttttcggcgaccgttatggccaaaacatcatcgacatcctcgactttccgattaaggttgtcttgtctcccttcactctcgccttcgatattgcaggctctgctcctcgcggcttcggcgtcccggaactcatctccaagctctctgccacttccgtcttcgctatagctgctctgggaacttatgacattgcatttgagctggggaggaaggtgatatgtcaaaggaattgtaactcatgtaatggatggcgggccttacgctgtacaatgtgtcgaggaagcgggagggtgcattatcaagttaagaattgcaacttgaag

SEQ ID NO: 25087 - DNA, 770 bp, Glycine max
gttacactaggcagagcaccttgcaaagatgacatggaaggaaatgtatctcatgcttggaatccaccctcatcatcatcttatgtatcgcctcctcaagtacaaactcttgcaccagcaatgggaccaggggcatacatgggacaacaaatggcaactaacatgccaatgccaaggcatcaaggaattgggagttttgctactgaggcaactgcttttgggttctcaaatccagatcaacagctgactggtaggttgtcaactgctgctaccccaaacccctaccatgcaggagggaaccctttcggatgaccgaaagtttttgtctgcttggactctatttaagtcatgcatcgatttgttgcacaccctgtacaaacatggttgaactttctggcgtttgttagtcaaagcgaaacactcatcaagcatattgagagatttatgtttagtcaccacacacccggggttcaaattcaaatatttgcacctggctttgtaaattgtttattgttataggaaagatgaaaggcaaaatctgccttgggggagaaggggaaattacggagacactattgtggagataaagttgcccctagtgttatttttttcagatttttctgtattgtattattttgtaatctcataatttttgtaaggtctttctattcgttgaggtattgtcaaataaatttcagtttgagttcaaaaaaaaaaaaaaaaaaaaaaaaaaaaaaaaaaagggcggcctccgacatagatgagcatcg

SEQ ID NO: 25088 - DNA, 290 bp, Glycine max
tacgtatactcaaaattcggttcgatgaaaatctgatttttttatcacatgtacaacaaatatacagtaatttatccaaaccttgaactaataaattactgtatatttgttgttcctgtgataaaaataattgtatatgaacagctcaattatcagttcacactttctcttttgcaggatttcttttttcaacctatagtgactgtaggatgaaatagtgactgacagttggtatatatggatgccattatcaactggaacatacctctccatacagattgggttgtcgt

SEQ ID NO: 25089 - DNA, 398 bp, Glycine max
atttgcatggaaggttctaatagttgccagaagggataaaagaatgttggattccagcatatatgcgaagctaatattagaacttggaaagaaccctgacagacacaggcatgtattgcctttgttagatgaacttggggaacgagatgaattgaatttaagccagcaagactgtacagctataatgaaagtctgcgttaagatggggaaatttgaagtagttgaaagcctgtttagttggtttaaacagtctggctatcaaccgagcatagttatgttcacttctgtgattcacagccgttacacagagaagaaatacagagaggcattggcggtagtttgggagatggaggcctcaaattgcctttttgaccttcctgcttatcgtgtggtgataa

SEQ ID NO: 25090 - DNA, 264 bp, Glycine max
cggctcgagaaaggagggtgtttgcggtgtaagcgtatgtggcagctcttcaggctccactcctccatttgcctatgccagaattcatgcaaggttcctctttgcaggcaaattcgattaaaaatggagcaagagaacatgaaagatgacgcaaggtggaaactactggtgaggaaggtggcctcggccaaagccttgtcttccttggcgctgccaaagaggaaattagatcagagctagggaccatatatataaataaataat

SEQ ID NO: 25091 - DNA, 642 bp, Glycine max
cattcccaaatatcttagaaagaagttggctgaaattattccagggttgaggccatgggaagttctgagcatagaacaagcaatggatcgattaacatttaacggggaatggtaccgtgaaccacttggttcattcaccactggtcccccataccttgagcactggaatagagatgttatgaggttgtataagatatttgatgatcttaacaccgagttgtacgaacatatggagaattcaattgctggctttgataaaattatggagaagatcagggatgattttattgcgagaactgataaaatgttggagaagaaagacaaagagaaaagagaagctcggaagaaagctgggttgcctgagtatcaatggcccgaaaaaccatatgttccttagtttcatttcttgcatgatttctgcagatcaaatggatcttttgcattacagggcaaggttgttagatggtgagaagtgtagcgaggctgatccatttattaagattgcaatctgggattggctatagcaatttttgtctttcttggagttggttcgaacgtctctattgttaaatattggcatctaatgaatgaaaatattttttaaaaaaaaaaaaaaaaactcaagactagttaaactggccc

SEQ ID NO: 25092 - DNA, 258 bp, Glycine max
gggtacctgactttattacattgctggatatatgagcactttcctaatgtctatgactgtgtcactaacgatgcgtacgatgagacattcccacgtgcctgccggtggcttacgacgaagacttatatgaagggattaccaatagcgctgtatcggacacgtttagatgctttgacgatcactgacgtgtgctggatgccttatggtgaccacagaggagtgagggggtttgacctcagttcgtgctctagggccagc

SEQ ID NO: 25093 - DNA, 250 bp, Glycine max
cacacctgatgatgggttggatttcattactgctgagcgtgaatggggggctcgcatgacgaaagcaagtttgcttcctcctgttactcggacgtatgatgtcattgatcaatatatcattgtagctgatgaagaggatgtgcgaaggaagatgcgggtttcattaccagatggctatgcagagaagctgagtgtgcaaaagaatggcattgatgagtctgacatggaactgccttgagtcaagattaca

SEQ ID NO: 25094 - DNA, 292 bp, Glycine max
cttacgttacaccccgaaactcaaacccatcaacatctcgctctctctctctctgctatgaattagggttttgaaacagtgaatcttcaccacctcaggcgacatcgtgagatttgtaattttcattacaaaagaaggggacagctaatctttcagtagtatggcaactgagagtctgattagaatctcggaagctgggggtaaatggccttctcacaaggaagctgcagcttttggttcatcgtctcgtaacatggcgacggaggatttgggtatactctgaagggccata

SEQ ID NO: 25095 - DNA, 479 bp, Glycine max
gttgatatatagaggaatggctacacctttgaacgagacaagggaaccagaatggaagaaagcgtggacagctgggaacactttgctatctgcacctcctcttccactactcgccatagttggcatcgtggtgttcttgctatgggtttcatcacaattaaacaccaactactcatccatgcaaatagccacaaccaacgtgaacttgttcctcttgtttttgcttcttgtgttgaccctcatagcccaaggaacacgcctcgtgcttcctgcagcaccaagcgtgacaagtttgtatgatgcagatctggagtcatcggagtcatcatcaatgccatggggatggattgtctctgccttgatgcttttggttctgatatccaaccgacttcacccgtatctttgtaattgcaacagtggttgtttatgtgtattttttatcagcgtaataaagcagtgtttttttagtagaaaaacac

SEQ ID NO: 25096 - DNA, 248 bp, Glycine max
ctgctgagaactttcttcttttgatttctatgatttgcaaattttgtatttttcagtttagagaaatgattatttgctcatactttttagttttgaaattgtgtgcaccatttttttgtgttgcaattttattgagttttagattcaatgagttaaatagtccattctctctacttcttgcctattgaataatttgttctgtgttttaaagtgcaggcacccatcattattggttaaatagatctgac

SEQ ID NO: 25097 - DNA, 300 bp, Glycine max
ctctcctacatctgctactgcaactattgggactccaggaggagctccatcatcaactcacgggaacgcagcatcagcattaatccccatatcagctggatcctctattgtttgccttttagtagctctatctctcatttcactttcagagtagggacatgacattagagactattttcatgtcttctgacttttccatcttctatgtgagacttaatgaagtagataaagtcagtcagtgactcgaatgtattttgtggttgtagatttataacttataatatatatgtatatgagtga

SEQ ID NO: 25098 - DNA, 262 bp, Glycine max
  unsure (1)..(262): unsure at all n locations
acagagatgaaaaatactcaaaaagatagactaatttccggggtttcggttatagcataaacttcactttatttcttttttataaaaagaaaaccatagattatcgctatcttatatcttattccgggtctcaagattcaactgtgaggaagaataggtctccacacaacaaaaaaatcaaaaagtatgnaatgtgcaagtcatagtattcaacgttaacaccattgagtcacttataaaaggcgctttaataccaaacgga

SEQ ID NO: 25099 - DNA, 668 bp, Glycine max
gtgaaaagtgatataagatggccatcacgttgggatgcttatttgaagatggagggttcccgagttcattggttctcaatcttaaattcacttatggttatttctttcctggctggtattgtttttgttattttcctaagaactgtgagaatggacttgacgaggtatgaggaactggacaaagagactcaagatcagatgaacgaggagctctctggatggaaacttgttgtgggtgatgtgtttagggagcctgattgctcgaagcttctctgtgtgatggttggagatggggttcaaattcttggaatggctggtgttactattgtttttgcagcacttggattcatgtcacctgcatcccgaggaatgctactaacagggatgatcattttatatcttatcctgggaattgctgcaggctatgtcagcgttcgtgtttggaggaccattaagggaacaacagaagggtggagatcaatttcctggttagccgcatgtttttatcctggaattgctttcattattcttacagtgctgaattttattctatggagcagtaacagtactggcgccataccgatttccttgtattttgagctgttctttctctggttttgcatttctgtacctcttaccctcattggaggatttatggggacaaaagc

SEQ ID NO: 25100 - DNA, 840 bp, Glycine max
ttgaccagccgataccaagtcctcccattggcaacccaaagcaaagtttaattgcaccacataaacattttcaagtccaatattgcctataaaatcaccaaccaggttcctttcagtccacacacaaaaaaagtatagggaaggccaagaattcgagcgacaagttgcaattataatggggggttgggctatagcggtgcatggtggcgcgggtgtggaccctaatctcccaccggagcgtcaagagcaagccaaacaactcctcactcgcgttctcaatcttggcatctctgcccttcgttccgatgcttctgccctcgacgtcgtcgaacttgtcgtacgggaactggaaacagatccactgttcaactctggtcgcggagctgctctgacagaaaagggaacagcggaattagaagcaagcatcatggatggttccaatagacgatgcggcgccgtttcgggcgtcaccaccgtcaaaaaccccatctcactcgctcgccttgtcatggaaaactcaccccactcctacctcgcctttaacggcgctgaagatttcgccagacaacagggtgtggagattgtggagaacgaatacttcatcacccctgaaaatgttggtatgctgaaactcgcaaaggaagcaaacgcaatcctgtttgattatagggttccattgcacaatggatacgaaagttgcggtgtggaggttgagaatccgttgcaaatgaatggactgccgatcagcgtgtacgcgccggagacggtggggtgcgtggtggtggacagagaggggcggtgtgcggccgccgagtagtgtggtgatcgacccagggaatt

SEQ ID NO: 25101 - DNA, 332 bp, Glycine max
gtcaaatacatgagatcattcaatgtgcccctcttgctactaggtggtggtggctacaccattcggaatgttgctcgttgttggtgctatgagacaggagttgctcttggaatagaagttgatgacaaaatgccacaacacgagtattatgaatattttggtccagattatacccttcatgttgccccaagtaacatggaaaacaagaattcccgtcatttacttgaagaaattcgatctaaactacttgagaatctttccaagctgcagcatgctcctagtgtccaatttcaggaaagacctcctgattctgatcttggagaggccgatga

SEQ ID NO: 25102 - DNA, 428 bp, Glycine max
ttttgttgtcgaggatggcaatgcatcaacaaaagttaaattctctatgactcagattgattgcacacatactaaagggggtctctgtttagattctgtgctgatatatccaagtgaattcagaaaggttaaagcatttttaaactactcttaacctttgctaaaaattacatatgaatgtatactagtatttatatgtatagagcgtaggccgcatcaggaggaatagagaatcgagtttttaatatggttctttaaggtttagaattttgtagaagcaagcaggcgatgtatgaatatgtgtttcattagtctggaggactgggacattctatcataaccttgtatggtgaagtatattatatgcttgtggcagatggacccataaagaccattccatgacaaggaaacgtggatcatatttgaag

SEQ ID NO: 25103 - DNA, 319 bp, Glycine max
accctggaatgcctcctccaaaagtcttgcatgcgtatccaggtttgtcctccccaatggatcatgcactcaaagagacaagcccttttcttggagggggacaagtagttggtgggcgagttattcgcgggtacaggccatccagctcctatgaccttgttgaaccaatgcaatacctatttgtacgagttgtaagagctcgtttgcgctgggagcattgatccatatgtggaggtaaaggttggaaatttcaaaggaattaccaaacactatgagaacactcaagatcctgaccccgctcaagtgtttgcctttgcaa

SEQ ID NO: 25104 - DNA, 216 bp, Glycine max
ccagatctgaataatcacaaatttatagagttttatgatgtccgagctgcggaggctgctcttcgtgcattgaacaagattgacatttctgggaagcagatcaagcttgaacctggccatcctagtttgatgcaccagtctcggaaggggcaagaggagcgagatcttggtcaaagtattatagacaacttatcatcaagacaaaaagcaacagtg

SEQ ID NO: 25105 - DNA, 371 bp, Glycine max
  unsure (1)..(371): unsure at all n locations
gcggcgggtttgttgggggcatgtgtccctggctctgctgcgagaataatggcatttattggaggaccggctactgaaggacctgctcctattgtatccaaacaactttctgaatcaattcgctctcacaaggatctggataaagattctgtgccacattaccataaatgtgtgaaattctatgatggactttcgaagcagcttgtgcatcaaggtcatgtactagatctttttgcttgtgctcttgatcaggttggaattgctgaacttaaaactgctgttgaaagaaccggaggtcttgttgtnattgctgaaagttttggccattcagtgttcaaggattcactaaagcgtattttccaatcgggtga

SEQ ID NO: 25106 - DNA, 450 bp, Glycine max
ctcgagccgaatcggctcgggtcacagacacacgtcaaaatatccaatcatttcacatggaaagtgccactcaagtcggtgcggcggctcagcccagctcagcttcagcgtcggtgattccctccgccttcgacggcaccctgggccgtcaccttgctcgccgcctcgccgagaccggtgtcagggacgtcttctccgttcccggcgacttcaacttgacgctcctcgaccacctcatcgccgagccgagtctcaacctcgtcggctgctgcaacgagctcaacgccggctacgccgccgacggctacgcgcgcgccaagggcgtcggcgcctgcgtggtcaccttcaccgtcggcggactcagcgtcctcaacgccatcgccggagcttacagcgagattttgccagtgatttgcatcgtcggaggacccaattccaacgactacggcc

SEQ ID NO: 25107 - DNA, 374 bp, Glycine max
gtttccgatgacacagttggggacatcgcccgggtatatgatttctccccacagagatttttgtgtgtacagcaagtattccagaagaatatcctcggagcaaaagttcccgttcaagttcgtggcgcagtccttagggcataaatggaagctaaatgacataagtactagttctatccaagaaagatggaatgtattgatgtcgaggacccaaaatttttggaatgaagttacttttccacttgcaaaacctggtcaaagtaggaagcctgatactgagaatgattgtggatttcaagttatggaagacatattcatgatagagcagacaatggacgtagaacaccttgtggggttcttctctagctgttgtg

SEQ ID NO: 25108 - DNA, 373 bp, Glycine max
ctgtttcctatgattctgtttctgggtctttagattacattaaattagatcagaattgaatcgaagtgtttggggtggtgcagaattcagagcagcattttgtgtccaaaagaagaggagtaataggacagaggtgataaaggtgcctataatggggatacctggtgttgatagagaattgaagaagattttgaaagctaacatggatgaagttggtgctagaaggcgtgcacgtgaggcctttaagaatattcagcttggaattgatcatatattgtttaagactccatgtgatggaataaaaatggaagagtcatatgataagaactcaaagggcctagaaatcttttgcaaaagttggcttccgagtgca

SEQ ID NO: 25109 - DNA, 249 bp, Glycine max
gtccaaggggggcaccagagaacaccagggtctccagttttctgattccttgttttcaagtttgcactcggttttttgttgttcttcttcctctaaagtttgtttgggaatggattcgcgtttgtggaatgtggcccccccgagttgtagctggctagctactgtctctttcactcttaaggtttgatcttgggtttcccggggttgtaatagtgtctgttttaaaatttgaaatggtttaccttaacc

SEQ ID NO: 25110 - DNA, 478 bp, Glycine max
tagagaaggcgacgtgcataagtctatcatctgcctcattttcaactggttcgagcatctgctagtaatctgtctcttaggttgttgtcccctttttagctatatacaggtgcataagaggaatacaactatacaactaatacaagaaatttgatttgtttatgttcttttaatatgctaattctctgtaagattttttaaaatggagaatttagctgtgacaatatttgttaattctttttacttacatgttttttgggattcaaattggactgcctttaactacataggtggagctgaggagtagactgtttgaagtcgtttggctgactatagttgagcactgatttggatacaaaatttctttgttatgtaccatggagaactattatatctcgagtatattatatcgttgctcactttttgtgtataaaaactgaacaagtagtggaatgtatatatatataataactattct

SEQ ID NO: 25111 - DNA, 303 bp, Glycine max
cgtacttttgggttattcagcaatagccgaggtgaggtgaagatcggaaccctccgctctctgctctgcaatggccaagatcgaagaactgaacgactcggttgccaaatctaagaataaaaggaatcatggctctacaatgttctttgtcattgttgattacctttttattttgatcttcctgggattcctctgcttcatcgttttcaaaattctcagcatttgattcgattcccgaaatcacacaatccaccgtgtgttatgtgctaggatattcgcatgacatagctaggcttcacaagc

SEQ ID NO: 25112 - DNA, 514 bp, Glycine max
catccagaaagctaaatgacctaagcaagagacgatcagaagaaaccatgagaatgaaagagatcatttctaaggaggagaaggcaaaagaattagcaaaactagaaagagagaaatatcaagatgcatcacgagaagctgaatatttgaaagaatgtgctgaaagagaagcggcagaaaagaaagaaatggagttgagagccattcgtgctgcaaaagagaaagaaaagctggaggatgctctcagtggttccacgccccagtaccggaagtttacatgggatgaaataatcttagctacttcatctttctctgaagatctgaaaattggaatgggagcgtacggagtagtatacaagtgcaatttgtatcacacaactgttgctgtgaaagttctcactctcaacactaacgtaaacagcaaaagacagcaattccagcaggagttagagattatgagcagaattcgtcatccaaacttgcttcttcttcttggtgcatgtccggatcatgg

SEQ ID NO: 25113 - DNA, 482 bp, Glycine max
cctcacgcgttcgaagccatcctctctctctctctgtccggttctgaacttgtaatagctatagatagcaatacatagtgacagaagacacaatagaagaagaaacccaacccaacccaggcaaacgcactcagagagagagagagagagaatgaccaccccaagaggaaaccaccacccgcagcctaacggtgagcgaagaagacaatggccaccgccacagccaccagcagcggcaccggaagcggctccggaagcggcagagacagcgacagcaacagcagcaggcggacattcttacaatgggtaccgacagtaccacccaagaacgccgggtcgttcgtcgtcgtcgtcggcatcgttcaaagggtgctggtgctgcctcttccttctattctcgttcctggcgctgctggtgctagcggtggtgctggtaataatcctagcggtgaagccgaagaagccacagttcgatctggagc

SEQ ID NO: 25114 - DNA, 421 bp, Glycine max
aaagatttggagaaaaaattgacctttatgaaaaggctagaggcaagtacattgtgaatcagggtattctcaatgtgatgcagagacatgctgtggttatgcaccctcttccaagacttgatgaaatcaccttggaagttgatgctgatccaagggcagcttactttagacaagccaaatatggtctatatattcggatggcacttttgaaactcttgcttgttgggtggtagaactgcattcatcttcaaaacgtatggaagatgctgcacatcaaaacttcttttgcttttctttgtcttttcatgctgaacatcaaaacttctttttgcttttggtttccctttcctctcttttaaattttctctttttgttttttattgcactctctaatcttataaaagattgtcttcaacttact

SEQ ID NO: 25115 - DNA, 742 bp, Glycine max
gtgcttaggagtttgagggtcgtgtaatcaaagtcaattatgctcggccgaaaaaggagaaaacgccgccccctgtgaaaccaaaggtggtgacgtttaacttgtttgttgccaacttgtcctatgaagcgagcgccaaagatctcaaggagttttttgattctggaactggtaaagttgtgtctgctgaggttgtgtatcgtgataatcctagaaggccgtctggttatggatttgtgtcctacaagtccaagaaagaagctgaggctgctcttgctgagttccaaggaaaggtaacttgggggttcttatttgtttgaatttggatttgaattattgagtttgggtaatgtcattctcacaaattttatctgcaatgtcttaggccttgtttatttactgttttcaaaaatagttttctgttttctcaactttgtttgtcccataccctaagcacatttgaaagcgtttttcttccaagtaaattttttgtttccttaaagtctgtccctcaaacagttgaagaaaacaggagacgatgagaaaacatctctctcagttatttctgctttttttttaacacttgatttggaaacaattttcaaaacttaatagattttgaatgagaaattaattgttgagtagtgtggaattattctagaaaacagtttttaaaacattaaaatgagaagggaatcaaacaagcctttaatgtttgtttttagtctgagtgatatgggga

SEQ ID NO: 25116 - DNA, 378 bp, Glycine max
tgaatggctgagagccagagggatcattcaaagctgctttagtggacttaggttcaagatagacatggagaaaggtagggttaattctagattttgcacgagtgcacaggggatgggtatttgtgggtctgactaaggcaggaactatgtcaggtgagggaaggttatcggtttgaggttggtcagtattggtagtgagggactgggtattaggattaatgaatgaagtggttggttgcgggttggaaaaatctggagaaatgaatggtgaagatgcagtatggctagtgacattagtggaaaatgccggttgggtggtagacaaaacagtgaggattgaggcagggtcaagaacctcagaggtaattaaagatggtt

SEQ ID NO: 25117 - DNA, 416 bp, Glycine max
aaaaaaatagtaaaaatttattttgtaaactgatttattttatattgtagtgatcatagacaagtttggttggtgtacatgggacgcgttttacttgaaggtgcatccctcaggtgtgtgggaaggggtgaaagggttggtggagggagggtgccctccagggatggtcctaatcgacgacgggtggcaagccatttgtcacgacgaggaccccataacggaccaagagggtatgaagcgaacctccgcaggggagcaaatgccatgcaggttggtgaagttggaggaaaattacaagttcagacagtattgtagtggaaaggattctgagaagggtatgggtgcctttgttagggacttgaaggaacagtttaggagcgtggagcaggtgtatgtgtggcacgcgctttgtgggt

SEQ ID NO: 25118 - DNA, 293 bp, Glycine max
cgatctcacacaacagctccaaccttcccttccaccatggcggaccaatacccaagcccggcccaagcccacagagccactgccccacccccctccctctcagccgcgtttctccaaaaactccaggaccgggcccccaactcaacccagctcgccggcatcttacccctcctcgtaaccgcctccgtcttcctcctcctgacgggcctaaccgtcgcaggggccgtcctgggcctcatatttttcctccccttaatcatcgtatcaagcccagtgtgggtcccagccggcac

SEQ ID NO: 25119 - DNA, 367 bp, Glycine max
gcaagcatgagatcagtaagttcccctggtttcttcttccttttgtttcttgctgcctttagctttgccaactttgcttctggagccactctgcttcaagatgaagtgaaagctctggaagatatagccaagacacttgggaagaaggactgggatttcaacgtagatccgtgcagtggacaacgtaattggacttctgcggttcaagtgaaagggagtgacaacaatgtcacatgtgattgtacctttgccaatggcaccgtctgcgatgtcaccaacatacttttgaaatcacaaaacctccctggcactctccctcgggatttgttcaggttgcctttccttcaagaaattgaccttactcgca

SEQ ID NO: 25120 - DNA, 161 bp, Glycine max
gttattttatttgagtaatcatttggtaaatgaatgtctgtgtgtaagttattttgcctatgtagtcactctgctaaactagaatgtataagaagtccttaagtttcgtagttaatgatttcatgattgcatgtttgtcccttttccacttccacacaaca

SEQ ID NO: 25121 - DNA, 246 bp, Glycine max
cgtaacttcgttactctgtatatagtggctggtcacagaaagggcaaaagcacaatggataaaatacaaatccatggttgaatctgctagatcgaagacagagaacactcctgagggcgattcttctgtctatcaaaatgccacagtaccagattgtgctttggaagatcgcgtaatggacactgttggggttatttgtatagataatgaggggcatgtagcatcaggagcctccagtggtggtat

SEQ ID NO: 25122 - DNA, 1003 bp, Glycine max
gggacttaaatgatgctttaaccctaaataattgtcgaactacacccagtactaagataagagattggttccactatggtacaaagacctagtggtttgtgttgagaactgatgaatatttaatcgtggtgaatattacatatcaatatcttggtttttataactgggataatgagtgcttcatgtgttgatgaacagtggtcttgacaatcaaggtctgaaaggtttcttgccagatgacatatccagactacttaatctacaaatcctaaacttgagtaggaacaacatccatggagcaattccatcctcacttggtacaataactagcctgcaagtgcttgatctatcctacaacttatttagtggatcaattccagaaagccttggacagttgacatcattacaaagactgaatcttaacagcaacctcctatctggaagggtcccagcaactgtaggaggaagactactctacagagctagcttcaattttactgacaatgcaggtctgtgtggtatacctggattacctacatgtggacctcatctttctggtggtggtaaagttggcattggattaggggcttcttttacatttcttcttcttattacctgttcattttgttggtggaaaaggcggcagaatatcctccgagctcagcaaattgcggcaagagcagccccatatgcaaaggcaaggacccatttttcacgtgacattcagatgacaaggcatcataacaattatggcaaaacctcaacagcagctgagaatgggcctattttactttcatgatgacatctcatcattctgacaccttatgagtctgtcgtagtattcctctgtttactgccatcaagtggtttttattcttttttactgtagaatcgccctactaatatgaatggcagtgtaatttgagagtttactacaacaaatactgagaactcctgaaaattgtaaatcagaaaattttgttcattatcgtgtttacatttc

SEQ ID NO: 25123 - DNA, 549 bp, Glycine max
  unsure (1)..(549): unsure at all n locations
gtcaccactctccattcctgtccccacaagtcgcaactgttatgctccaccgcgacggcaatcctgcctatctcgacacggtgaacaggatatggcgctgtagggttcggcacaaggacgtttccggggagagaagccttctgctcttgccggagttggagcggtggaggagcgacatcgaagcttccctattggactcgcaagtgttggagaggttggcctccattgataccacaagcatggaccgatttgggcccttcatttattgagcacgttgccgccaatcccttggaggcccaacaccaagagagagaaattgagaagtgcactgctgcttctgaggaagttcatccctcaacagctgctgangaagtgcatccctcaacagctgccgaggtccaaaaggttaggagggaatgcgattctgtggagttgcaatatttgtctaaggattctctacttaattcgttggaagtgaatgagacaccgattgaagaacagagtagagatgcagatgtaccttgcccgcatgttattaataacaatgac

SEQ ID NO: 25124 - DNA, 452 bp, Glycine max
ggaaaaggaaaaatccaaaatatattcttcctaatgactcatgcggtgttctctgaactttcctctttctttgtctgtttcctctttccttccacccatcttcctttataaattctgcatctctcagtctcataataataaatcatctctctccaaaaccaactcttcttcttcttactccactcttctcacttccactatcgccatggcctcccactcaaaccaaccaggtcccggagctgaagggctaggagagaaggaccccccaacaagtttccagaacccgctttctgagatatccccgtcgccgtctccgtcgtcggcgccggcgccggcgctggtgctgtcgaactcggggaagcgaatcgaccaggcggggaagaagaagtacgtgaagcaggtgacggggcgccacaacgacaccgagctccacctggcggcgcagaggggcg

SEQ ID NO: 25125 - DNA, 314 bp, Glycine max
gtttccacccattccttcctttatttttctaattctgcatctctctcataataatcatctccaaaacaaactcttgttcttactccactctgctctgctttcttccaccattgccatggcctcccactcaaaccaaccaggacccggagctgaagggcaaggtgagaaggacccattttgtgagatatcgccgtctccttctccatcgtcggcgacggcgccggcgctggtgctgtcgaactcggggaagcgaatcgaccaggcggggaagaagaagtacgtgaagcaggtgacggggcggcacaacgacactg

SEQ ID NO: 25126 - DNA, 1064 bp, Glycine max
atcgagccgattcggctcgagctttttcctcagtggaacaaacagcctcagtggaacaaacctcagaaaaagattttacaaattaaatattgtttaaaagaaagatgtcaagtggagcaacacactggtgttatgcatgcagacagccaattgtgcttgatgggagagatcctgtttgcccttactgtgatggaggatttgtgcaagaacttgacgagttgcgaggaattgcacccaaccataaccataccttttcgtcacagtcaggagactttcatcaaatgcctgacattttcgatgctatacctgcttttatggggcagaggggttctgaccagagatccaggcttatggacgccgttgataatttcatgaggcatagaatggctggaagaaactcaaactttgatgttagagggaggtctggctctcgcccagttcctgaacggagttggggcgtttatagttccggtccttatttaatatttcacggtcaagttcctggattcaccttgtctgctggcagcccaagaggtggtcctaggcgtgttgattttggtgactactttatgggtcctggactggaagaacttattgagcaactcaccatgaatgatcagcgtggtccagccccagctgcacgatcttcaattgatgcaatgcctactattaagataacacaggcgcatcttcgctcggattcacactgtccagtttgtaaggaaaaatttgaattgggcactgaagccagagagatgccatgcaaccatatttaccattctgactgtattgttccttggttggttcagcataactcatgtcctgtttgccgtgttgagctgccacctcaaggacaggctagttcccgtggtactcgaagttggggaggaaggaatgccagcaacagcagcagcagtggcagcaatgatagctccaggggcagagagaacagccatcagaaccatggaaggagaaatccatcatcttttttgtggccattccgctcatctaactcaaacaataatcatcattctgatactgggggaagcagctcttcaaaccac

SEQ ID NO: 25127 - DNA, 288 bp, Glycine max
cctcaatggaacaaacctcagaagcagaaaaaggtcttctctctttctctctccttttccctcaagctcagaatctcccgaacgaaagttgaattttggtgcatattttacaaattaagaatcttgttaaaaagaagaaggatgtcaagcggagcaacacactggtgtcatgcatgcagacagccagttgtgcttgatgggagagatgctgtttgcccttactgcgatggaggatttgtacaagaacttgatgagttggaaggaattgcaccccaccataccttttgc

SEQ ID NO: 25128 - DNA, 267 bp, Glycine max
aattgactgaacataattcataaatataatagcttatgtgctccaaagcacactacttatactgacctcagttcaaaggttttattttaggcagttgccttgtttttaatcgcagataatctggtgaagtgcatgtagtaccatatgcactggtaattctatcagtaatttttagtcaggggctgtagatctgtcactcctttagggtcattctttgcgtcaaattgtcatctcatgcatcaaaatcatgtgttgcttttttttttt

SEQ ID NO: 25129 - DNA, 616 bp, Glycine max
tttcgtttcgcgtgggggacagcaaagccttgtgacttgggcaacaccaaagcttagtgaagataaggtgaagcagtgtgttgatgttagactaaagggagagtacccttcaaaatcagttgcaaagatggctgctgttgctgcattgtgtgtgcaatatgaagctgagtttcgaccaaatatgagcattatagtgaaagctctacagcctctactgaatactcgttctgttcactcaaaggaagcacccaagatgtaataaaaacatgtaaattccaaaatcattcatttcttctttcagactggagtgcgttgaccaattgtccttgtgacacgtgtcagtattacataatctgaagcatatagtattaaagtatattttgcgttattatatttgtatctcaactaagcatgttatagctgatataaaaaaaatagtgatggtaggtggcaagagcctatcatagatggttaagtttatggtttgaatacttattaatttgtatttgtttgtttgtttttcctataagccgtgtacaagtgaatttataatattacttgtcatgtacatcacatgtctagttgctttactatttcaaaaaaaggttttttctcc

SEQ ID NO: 25130 - DNA, 527 bp, Glycine max
aaagcatgtgagcttctagacctggggttgacccttgaaatatatacggatgtacagtccaagccgcaaactcagtggtctctacatctaaagagtctctcgcttggagcttcgctgactgcattacatgcttggataaatgacttgtccaagactttggaatcaggagaggatcttccaccgctgcttggaattaataccggtcatgggaaacacaggtattcggacaaaggtttggcaagtgttgtcgaatcacatttgaacgaactcaatgctccattccatgaggctccggataaggctggctggtttttgactacacaggtagcagccaagtcatggctggagtctcgggaattggtaacagcataatttcttatctctttatggttttaggtattccaacagcttttctccattgataatgtaatttcagggaatgatatgccatgcagtttttatgcattttcctttgtcttttgaggatttttttgtaatagatcatatatataattatttttttggat

SEQ ID NO: 25131 - DNA, 574 bp, Glycine max
ctcaacaaaaccttgcctccctcttttttcttggcggcagctggggcaaccaagctctgtgtgcaacgacgccgtttcgacctcctttcttcactctttggcgagcaagcaagcaagtaacaatggcgactcgcgacggcggcatgaagtcgacgtcaataaacggcgttaagatgtacacgatagcgtcgcagcaaccctcactcgcttcctggctcccctcctccaagaagcagaactctcatcgcaacgtcaaaagttacacgcagaacctgcaacttctcgaagacttgcgcttcgccaccgccgccaccaaaatcaaggccactcccgacggcgagtacatcattgcttccggcatctatccgccgcaagtcaaagtctacgaggtcagggagctaggcttgaagttcgaacgccacttggattccgagatcgttgattttcaggttctgtcagacgactattcaaaacttgcatttttatgtgctgatcgctctgtttatttgcatgcgaaatatggaaagcactacagtttgcggattccgaggatggggagagatatttcttatga

SEQ ID NO: 25132 - DNA, 274 bp, Glycine max
cagctatactcaaatctgtcgggatggatgcactcaattttgccaacatatgctgagagaagcatgtgtgaatgccaaaaatgccttttataaatcactttttgaatgatattttgtgtgagtttttctaccatttacgtgcattttcttggcaaaaatcacgtttgaacactagttttgtattgcaagagtataaccgctccattgagtgaaagagttgaaaattacatgattttatgaagatctgaagactttgcacttgataacaattgtg

SEQ ID NO: 25133 - DNA, 338 bp, Glycine max
gacgatacaactgagaaactgaggcatcggcttatggacgaaggcgtaagtgaggcagctattcaggacactgagcatattatgggagatgagtacgctgcgctgcaaaaccagctgcagctgcttaagcagaagacaggtggcgctaatcgacactttgcggcaattagagacagaaaaggttgatctggagaacactgctgttgacgtgagccatagacagttgaatgatcaagaggcttcctctagattgaggcaggagaaatctagtgcaagtgcaagtgagtctgaggatgataacgagagaaatgatgcagccgaggaagaaacagatgaag

SEQ ID NO: 25134 - DNA, 256 bp, Glycine max
ctgaagggacaatcttcagatgttgataatgatgcagattattggcttctatcagatgctgacgttagtataacagatatgtggagaacagattctactgttgattggaatggtatagacatgcttcatcctgattttggaatcatttcgaggcctcaaagtccatcatctgggcttgctgaagtgccatcaacaggagcaaactctattcagaagtgatttcggtttgcctatgcagaaagtatggatggccttc

SEQ ID NO: 25135 - DNA, 661 bp, Glycine max
tcgccctcgcgtgcgcccacgcgtccgcggacgcgtgggcagaagtattaaaatcagaaattaaacgaattgaattaatgcttgctgttgtcactgaggaaaggaataaattaagaaatgtggccaatttgaagaatgatgaagctctggatgcatcgaaaaatgcaaatcctgttcaggagcctgaatcatctcttatgaagaaagatgattgcattaaagatttagaaagtaccttgcatgagcaaagaatggttaataatcgtcaattagatgaaatgaagttacttaatgaaaagttgcatggtgaagcaagaagagtgaagtcactggagagggagagtgaccggctccggtcagagatttcattattagaggcaaagttgggtcatggtgatttttccgctgctaatacaaaagttctgcggatggtgaatacacttactgtcgataatgaggccaaacaaaccatagaggcactgcaaactgagctgcaaaaaacgaaagagaaattaaaagctgtggaagaattgaagagtcaatcaggcgaagctggaaagctggtagatagctacatatcggataagacgttgcaattaaaagagcaaatcgcaacacttgagaagcgagaagaaagatacaagactgtgtttgcagacag

SEQ ID NO: 25136 - DNA, 846 bp, Glycine max
tatctcgagccgattcggctcgagctttcacacacagatctgagttaggttaggtttattttgaaaacaaaaaaaaatccccaatgtcgcagcaattagggttcgcgatcgagctatacctagaccctgcgttggagaatcaggttctgaaagcatggaacgttcttgcgagaagacaaatcagcacgcacctgatagaaatggagtctcggccacacataaccctattctcggcgccatttctagaaccttcgaagctcgaatctctcctgaaaggcttcgcatcgaagcacgatcctctccctctcaccttctcttccctcgccactttccccaacgaccccgacaacctcctcttcctcgccccaaccccttccctctcactcctccaccttcagtcacagctctgtgacgctatcagaaaagaaggcctcgaaatcggtgacgattacgctttcaattcctggatcccttattgctccgttgcacaccatgtccccaaaaacagaatgcctgaggctttctccctcttgagggaactcaagcttccggtttccggttacgccatggatatcgctctcgttcagttctctccggttcgggaaatcttctcgtttgtgctcggcaacaacagttgagataccagtctcaggagtgcttgccggtgtgctggacctcttcaagttcatgtgacccatcatatgttcagaatttctaactgaatggctggagtagactgaaatagttcagcatccaatgctgattctgaatggttctattttgtttttgaatagtaagctgtttgatttgtgtccataactcttcttcctgtcagattttcccatg

SEQ ID NO: 25137 - DNA, 432 bp, Glycine max
gaacaaaaaaaaagttggtatatgttggtgagtaagcattgaatcaaaattatctcagtacatctggaacgagtgcgaagaggcagagaaagaagaaacaacgtttctgttcatcttcttcttcttcttcttcctcactctcaatctccaatctctcctcaaaatcccttccaatctcgcgtgcgccacagatctgatagttagattacactgaatcgaatcgaatcgaatcgactcgctgaatcccaatgtcgcagcaattagggttcgcgatcgagctatacctagaccctgcgttggagaatcaggttctgaaagcatggaacgttcttgcgagaagacaaatcagcacgcacctgatagaaatggagtctcggccacacataaccctattctcggcgccatttctagaaccttcgaagctcgaatctc

SEQ ID NO: 25138 - DNA, 349 bp, Glycine max
aagaagttgataatttctacaatttttggtactcctttaaaagttggagggagtttcctcatgctgatgagtttgatcttgagcaagctgaatctcgagaccacaagagatggatggaaaggcagaatgcgaaattgacagaaaaagctaggaaggaagactatgcacggatacgcactcttgttgataatgcttataagagagaccccagaattttgagaagaaaggaagaagaaaaagctgagaaacaaaggaaaaaggaggctaagttcctagctaagaagttgcaggaagaagaggcagccagaatcgcagaagaggagaggcagcgaaaagaggaggcagagag

SEQ ID NO: 25139 - DNA, 860 bp, Glycine max
tctttttaatacaagatataagagttcaaatccaccgttcacttcggtcgaattggatcgcagtgactctggaagggaaggatgcactgtgaccactcttaccataactgcagaaccaaagaattggcaaaatgcaattagagttgctgttcaagaggttcggagacttaaagagtttggggttacccagggtgaattaactcgttatttagatgcccttctgaaagatagtgaacacctagcagccatgattgataatgtatcttctgttgataacttggattttatcatggaaagtgatgctcttggacataaagttatggaccagaggcaagggcatgaaagtttacttgctgttgctgggacagttacccttgaggaggtcaattctgttggtgccaaggtgttagaatttatagctgattttgcaaagcctactgcaccacttcctgcagcaattgttgcttgtgttccaaaaaaagttcacaatgagggagctggtgaaacagaattcaagatatcatcaactgaaattacggatgctatcaaagctggattggatgaacctattcagccagagcctgagcttgaggtgccaaaagagctaatacaatcaacaaagctagaagagttgaaaaagctgcgcaagccggcctttattcctgtaaatcctgaaacagatgctacaaagcttcatgatgaggaaactgggatcacccggcgccgtctcgctaatggaattcctgttaattataagatatcaaaaactgaaacacaaagcggtgtgatgcggctgattgttggtggtggacgagcagctgagagtcctgagtcaagaggatctgtgattgtgggtgtta

SEQ ID NO: 25140 - DNA, 294 bp, Glycine max
gcttagagctttggagactaaagttactactgattctggcattagaactcctgaataccttcaaggctttataaataagcttgaacagagttatgatttgtgcagagtgtatattaggcttttgagccagtctgatgctttggggatcatgaagcagtacattgcagtaaccatgcctctctatagttcatatggactcctacctgacaattcaacgtggcaagagtgctttattgttcttctgaacttttggatgagattggcagatgatatgaaggaaattgcattggagga

SEQ ID NO: 25141 - DNA, 330 bp, Glycine max
ttcgtccttcgtggggtacaatgaatgagggtttgccagtttttgatgattctatttgggctgaagctgccatgtctctagattttcctcaaattgcagcagagactgcgatttattcatcgggtaacaacttggccgatgtgggtgtgtgggactctctgcaaaccccatggtgcatgtaatttcatcactttcaaaagggcaagggaaagccacaagctatagcttttcttctcatgccagctggactgaatatctgcttgttaaaatatatagtgtatatataagaggggtaagtaagtactttgtaaagacatatatgatacccaa

SEQ ID NO: 25142 - DNA, 499 bp, Glycine max
ctcgagccggtccatgaattcagcaagcaaaacaaattccccacagaagttgactctagttgaaaataatcatttatctgaaccctcacaacttccatctccatccccaaatgattcattgaggccatcttccagttctggtagccagtcacctctagctaataccacagaggtttcaacttcagaagcttgtgtgcaatcttcagcagagttgaggcaacatgttacttttccaaaccatttccaagtatccaaggctttaaaaagtggtctgacatttggaagctttgatactttaggcccaagtgaaaagtccaacagtgaaactgatggtgacaataatgcttctcctgcccttgaattgagtgacgaagctgcaacttcaagcaatcaaagtgcatccttgactgcacaaggagatcatcttgattatccacattcttcatcttatttgattgaaaaggcaccagctacaaatggcaatcctataactggtact

SEQ ID NO: 25143 - DNA, 487 bp, Glycine max
aattttgagtaccctcctttggtttttgttcatggaagctaccacgctgcttggtgctgggctgaacactggttgcccttttttttcatcttctggccacgattgctatgctattagcttgttaggacagggtgaaagtgattcacctcctgactctgttgccggtacacttcagtagacacatgcaagagatgttgcagattttatctgtcgaaatattggatcaccacctgtcttggtcggacattcatttggaggacttataattcaatattatatttccaatttaggaagtgacgaactcaaagaagatttatacccaaagcttaaaggagctgtccttgtttgctctgtacctccttctggtaatagtgggatagtctggcgttatatcttttccaagccaattgttgccttcaaggtgacacgcagcttggcagcaaaagcctttcagacctccctatctctttgtagggagacatttttc

SEQ ID NO: 25144 - DNA, 251 bp, Glycine max
tctcgagccgattcggctcgagatggattttcgcaaattcagcgtccaacgtcagtgtttaccgtggcagctccaactcgtcatctctattcttctgttcttagcagttagttcacttggatcacctattgatactcgcaaaagtggcagatcatctgtattctcactttttaatctcacagaaaagagtcgattttggagtgaggatgttatacacaatgattttgatgatttaaagttttcaagccatg

SEQ ID NO: 25145 - DNA, 272 bp, Glycine max
ctgatctggagataacattttttttgcggagaaccatttaaaccatttgatcagctaatggggaccctacccgcttcaagttcaagtgcactgcctgaaaaatatagggatttgatgattgatccttcatcacctattcttcaattctaccctgctgattttgagattgacatgaatggaaaacgatttgcatggcagggtgttgccaagttggccattcattgatgagatggatttgctttctgccacaagcaagcttgaagccacattaa

SEQ ID NO: 25146 - DNA, 285 bp, Glycine max
ctcgagccgcggcaaggcaacttcactttggaccaaattaccctccatctcccttcaaatcacaccgaacccttcccttccctttttccactcagattctctccaaccactccacagtcaactccatgtgcgcttgaatggatttggtggaaggcgtcggagagagttcctcgccgccgcgcgccttccagcgtgctacagcaacttacgacgtcacgcaacgatgtctacaaccgccttcttcaaaccggccacgaccaagccgtttccaaccccgacttccgc

SEQ ID NO: 25147 - DNA, 422 bp, Glycine max
ctattatgaagcttctcccaagaacacaaagtctaaaaataaaaagtcttcacattctggggaactccaatctccatttcaggattcaagcggaaatggagggccatacacgtcaggttatccaatggctggtgaatgaactcgctgattgtgcttgttagtccaagaaatttgactcagcgtttaattatttgtttatgcttatgcaatttttgaggtttgcaactcctcctggagctggactgcattcagttactatttttcccattaaaatggtcctgagtgttggtgggtgctttctttatctaagttcccttttgttcgcatatagcgttatttaccaaggctccggaaagaataataggagcagatgatttttcagttgagagaattttttcactgtattcatgtatattactatt

SEQ ID NO: 25148 - DNA, 295 bp, Glycine max
  unsure (1)..(295): unsure at all n locations
ctgaagaagatattcgccctttgtttgaggaacatgggaacgtgattgaggttgccctcatcaaagataaaaagacaggacagcatcaaggttgttgtttcataaaatatgctacctcagaagaagctgatcaggcaattagagcattgcacaagtcagctagtactctatcctggaggtcgttcggtnctgaatccgaagtgcgcatatgctcgatcggtgcaacgaggaacgacctcgnngtgctgttcgagtacaaattcagtcttgtgggctcctgnctgaacaaacaggc

SEQ ID NO: 25149 - DNA, 463 bp, Glycine max
aagggtgtctctgaaattgtcatgtccacgttaaggtcttgattggctttctgggtttggagaagaatctctgcttcactctcttcactgctgtgggtggtaactgagccaaaccctattggttttggcaccatggaaaacgaacacactttggcggttgctgagagagagatgtggctgaacagtgaccaagacgagttcctaggagtcaatgatgcttccatgttctacgccgatttccctcctctccctgatttcccttgcatgtcatcatcatcatcttcttcttcagcactaccatttcctgtgaagaccatgacatgttccaccagaaccacaacaacaaccaccacttcctcttcttcctcttcctcatcctgggccgtgttgaagtcagatgctgaggaagatgcagagaaaaatcattgcaaccgctacatggatgaccaacttgatgcaactt

SEQ ID NO: 25150 - DNA, 571 bp, Glycine max
cagaagtaggcaacttctcttcatggtttccttccactgcgaacacctattcagcggtaacaatatcttcaattatgtctgatagaggtgataggtccttttcaattgttgcccctaatgggccacaaaggatgttgggtcctgcaactggtagcaatccatttggacctgatatttataagggggcagttttgtcttcttctcctgcagtgccatatcaatctgcaccatttcagtatcctgtcttccctttcaattccagctttcctcttccatcagcatcattttctggtggatcaactccttatgtagatacaacttcaggaggtaggctttgcttccctgcagtaaattcacaacttataggttctgttggtaatgtttcagtccattaccccaggccttacgttgttagtctcccagatggtagcaatagtagcagtgctgagaactgtaggagaaggacaaggcagggtttagatcttaatgctggacctggttcaaacttagaggggagagatgatagctcacctcttgtaccacggcaactttctgttgctagttcgaaggc

SEQ ID NO: 25151 - DNA, 269 bp, Glycine max
aacctacagtagaaactcatactgtagcatctgaaatgttagagtcacagagacctgtttctgatgtagtttctgtctctcctctagatgagattataatgctagaatcaggcacgggtgcagagaatatggagcagaataacctagaaagctccagtgagcacagggagaaagattctgttgtgtccatttcgggaaaagaggatgaagatgagtcagtatcactgttggaattgtcatcaaattttaaaaaatggctttcattcaaa

SEQ ID NO: 25152 - DNA, 265 bp, Glycine max
cgatccttttcccataaagattgctgaaaatgcccttctgtctttcttacttctccttaagcactgtaaacttcaacaagatgaagacggggataatttgaatacatttaaatcagaaaaattggattctgttaaagatcggattctagagggtgtccttcgcctactattttgtactggtgtatctgaggctattgcaagtgcatgctacaaagaagctgcctcagttattgcatcatcacgggttgaatatacacacttctgg

SEQ ID NO: 25153 - DNA, 642 bp, Glycine max
tgggaacatgctacccattaatatggtcgattgacatgctataacacatgatccacttgtggtgattgtcaatgagggaagcgcagtgccagtgagattttagccggggcattacatgataacggtcgagctattcttgtggggcacaaaacatttggtaaaggaaagattcagagtgtcactcagcttcatgatgggtcagcactctttgttacagtggcaaaatatctatcaccagcccttcatgacatagatcaggttgggataacaccagatgtgcaatgcacaacagaaatgctcaattcaaccaaggatatttcaaattcaaccaaagacaaggcctcagtctcatctctggaagcagattcatgcataatggtagcagaacatgagttggatttggaggagtccatgggaactgcttcttgaacattcaatttccttatatcacactttcttttcaatgtttaacagttgaaagaaagggtagtttagtgctgatgtgtcagccaattcatcattttgtactatgttacattgggatcactagttgtcatgggtatataaaacagagaaacagattgtattgtatatacaattgaatagaataatagaaaatttaactcctagttgaagcacgac

SEQ ID NO: 25154 - DNA, 271 bp, Glycine max
caacactgcatcatatatatcagtttttattgcaccctcgccccatcatatattacacttacactacatacatagtcaacaccaccaataacagaaagttttgatggaacagacaagcattctgatatcggctttgggtgctggggtcggagtgggagtggggattggattggcctctggacaaagcgttggaaaatggggagccaacactttctcctcgaacgctattactgctgagaagatggagcaggaaatgctcagacaattgttg

SEQ ID NO: 25155 - DNA, 300 bp, Glycine max
gtccttaacgcctctaaacgtcttcccccactcactgttccccttcacgatgccctaggcaaggtcttggcccaagatgttcgcgcccccgatcctctccctccctacccggcctccgtcaaggacggttacgccgtcgtctccgccgatggccccggcgagtatcccgtcgttgccgaatcgagagctggagatgacgctctcggcctcactctctcccctggaactgtcgcttacgtcacaaccggaggaccgatacctgatggtgctgatgcagttgttcaggttgagaatactgaa

SEQ ID NO: 25156 - DNA, 289 bp, Glycine max
gcatgggccacgccgttcacgtgcttagagttccctctgccgagatcgtatactggaatcactcagcagaaactctgtatggatggaaggaccgtgtggaacttggcgttcgtggttgcggcagggaccgtgctggttttgagcgcgagcgacggtgcctggcatgcctcgtcagtgcaagacaggattgggagcagcagtgggaatttgagtgtgtcttcgagagagggttctgcttctgcctctgcctctgcgcagtatgtgtcgttgggccaactcgatgacgaga

SEQ ID NO: 25157 - DNA, 135 bp, Glycine max
atagttggtgtctatatgtataaattaaggcttctatcaattatcacgcactaattccaacttgggatcaacgaaatttaaccccggagatggaattagtgcttgataactgatattagtctttctcacgtcacc

SEQ ID NO: 25158 - DNA, 492 bp, Glycine max
ttaatcctatcctttttcagtttttgtgaaacagggatcaaatgcatttgatgcagggacaatctgcaactcttaagacaacgatattactatgccacgtggaaagctgatgggacacgatatatgatgctgattacttgcgatggatgttatctgattgacagaaaattccttttccaaaggatcaatatgcgatttccttgcagatatactaatgggggtacacctgagaggaatcaccactacacattacttgatggggagatgattattgacacagatccgcatacacataagcaagagagaagatacctcatttatgatttgatggctatcaatcaagtttctttgacagagctgcccttctatgaaaggtggaaattgctggagaaagaagtaattgaacctcgtaacatggaacgcgagggcctctcaaagagtataaatccttattatagatatgacttgcttccatttagtgtgaggaggaag

SEQ ID NO: 25159 - DNA, 208 bp, Glycine max
ctcgagccgcttcttattagctatgcacttaaggcgcataattctttgtaggtgttgtttactggttgaggcaccattgcagcagaaaccatagtgtttattccacacctagaaagaattataattcttattagctatgcacttaaggaaatctaaataaatatttttcattctaggtgatgtatcatgtatgtaccaaaatattttg

SEQ ID NO: 25160 - DNA, 271 bp, Glycine max
ggatgagaaacattttcatttccttcccaaattcacccgcacgtgagtgagagtttcgtttcagagactgatttttgagctacgattccacaccgcattgccaatcatgggtgcttcagaatctactccctcaagcagacagacgccagatgacaaaatcacaaccataactgagcgatcggaagcctctgaccctatcttggagtgcctcaaatctctcaaaattacaccgcccatattgacctcacccccaacagagggtaccttaact

SEQ ID NO: 25161 - DNA, 792 bp, Glycine max
  unsure (1)..(792): unsure at all n locations
ggagtcgcaataaaaattgtcataaagacaaaaacaagttttagaacggtgcgttggagcgaaccggtcgtcgtcctcgttcgtcgtggatctgaattctgaattgtgaagtctgaatccctgcgcttcttgattcacctccgctgtagttgtactggttcatcgattcaccatcttcaccgagggatttaagtcctacactacacgtacttaaagatggtggtctcatcctctgcgcgcgattacatcaatcgcatcttgcaggacatctccggcatgaagattctcatcctcgattctcaaacggtaggtattgtgagtgtcgtgtattcacagtcggagcttcttcagaaagaagtgtttttggtagagttggtagattctatttccaagtcaaacgaatcaatgtcgcatctcaaggccgtctacttccttcgacctacatcggagaatatccagcttttgcgccgccagctggctagtcctagatttggagagtatcatctatttttctccaacatattgaaggacactcagattcacttacttgctgattcagatgaacaggaagttgtccagcaagttcaggagttctatgcagatcttgttgcaattgatcctttatcattcactttgcacgtgccttcacattacatatatatgctcccagctgtggtagatcctttcacagtgcagcgcttctctggaccgggtgntgatggtctttcagctcttttttttgcattanagcgaagaccagttattangtatccaaggacatctgacattgca

SEQ ID NO: 25162 - DNA, 354 bp, Glycine max
caacttctaaaacggtgcgtttggcacgaagtgttcgtcgtcctcgttcgtcgtggatctgaatctctgaattgtgaagtctgaacccctaagcttctctgctccttcctgattcgctttcgctgcagttaaacacttgaactggctcaacgattcatcatcttcacggagagattcaagttctacactacacatacatcctgatggtggtcacatcctctgcgcgcgattacatcaatcgcatcttgcaggacatctccggcatgaaggttctcatcctcgattctcaaacgtgattgtgagtgtcgtgtattcacagtcggagcttcttcagaaagaagtgtttttggtaga

SEQ ID NO: 25163 - DNA, 740 bp, Glycine max
  unsure (1)..(740): unsure at all n locations
cttgtgggagaactcatttaccttaccatcactagacctgatatctcctatgctgtgggagtggttagccaatttatgcaaantcctcatgtggaccattggaatgctgtcatgcgtattgtgaggtatattaagagagctcctggacaagggttgttgtatgaagacaaaggtaatacgcaattatcaggatattgtgatgctgattgggctggctgtcccatggataggaggtctacatcaggctattgtgtcttcattggaggaaatcttgtttcttggaaaagcaagaaacagacggttgtagctcggtctagtgcagaagctgaatatcgatcgatggctatggttacttgtgaactcatgtggattaaacaatttctgcaagaattgaggttttgtgaagagttgcaaatgaagttgtattgtgataatcaggctgctcttcatattgcctcaaacccagtctttcatgaaaggactaagcatatagagattgattgtcatttcattcgagagaagcttctgtccaaggagattgtcactgagttcattggttctaatgatcagccagcggatattttgactaagtccttaagaggacccagaattcagactatatgtaacaagcttggtgcatatgatctatatgctccagcttgagggggagtgttgaatatccttgtagtttagccatttgtagtaacttagttggtagcttttttcagagggcaacagtg

SEQ ID NO: 25164 - DNA, 246 bp, Glycine max
ctactaaggcgtgctgatggaacgttcaatcgagagttagcggaattcctggaccgcatggtccaggctaataccattcctgttgacggggtattctcttttgatcatgtcgaacgaagcaccgggctcttcaatagggtgtatcaagtagctcctgaaaacatgggaaggttcatagagttggagaagcccttgagcaccacaaagattgttcctgttataattttcttccatggtggaagcttc

SEQ ID NO: 25165 - DNA, 263 bp, Glycine max
gcgacatggtgtgacaaaacccccggtctgccaccctttgtcattgtcaatgaatggactcctactgaccttgaatgttgaaacggtcaagtaactgggaaatacacacagcttttacttgagagattgcactcctcggataaattaagatgtgcatctaaatgtcaagcctttgcttgtttcacagccaaacttgtatctagtccatcatgcagctgacaaaaatctcgtacaaaatacattttctccacaaatttgttgtt

SEQ ID NO: 25166 - DNA, 323 bp, Glycine max
gttgttgttggaacattattggctgccttggtgccagtggttgggtttaatgctgtaatgacatcagagcattttgcatcatttctggttttctttatcatccatgtagtggctcttgtgcactatatcaaaggaattctttcaccaaaaatgttcaaagtagctgtggcactagttgtttctgttggcctggcagtgtgttgcgcaatggtggcagtacttgtagcattggtagcttcaagcccaacaaaaggatggagtggaagaagtttaagtctgcttgatcctacttatgcaagcaagtatataccaatcattgctag

SEQ ID NO: 25167 - DNA, 643 bp, Glycine max
gcaacatcatgcaatttttaattgcttccatcaagaaggatagacaaatggaagctctcgtggaaaagctatgtcatcggtttagtggtgttacagatgttagacaatgggaatatatatcttattgtctctctcagttatcgtttactgaaaaagggatgaaaaaactaatagagttatttaagtcctatgaacatgtcttgtcagaggattctgttatggaccatttcaggaacatactgaacaagggaaagaagtttgcaaaacttgaacttaaagcttgcattgaagagtttgaggataagctgaataagtttcacacagataaaaaggaacaggaagttactgctcgaaatgctcaaatccatcaacagaagattggcagcagggaaggttttaccgtgactataaattctgaagatcacttgtcatctaattcttcttcagatgaaacagaaggtgaaataattgatgcttacactgaagagtcaactatgcctttaaatgagagatcagaatctaaacttgtgtcagaatcacattctggtgcttcaagtgagttgacagagtcggatcaaggggatattgaaacccgggatattgaaatccaatcaccccagggtaagacaaaaggagtcaacgg

SEQ ID NO: 25168 - DNA, 610 bp, Glycine max
cacaccctctcttctctcttccatctcctcggttaaactgaaccaattcaatattcccagctagttcttcattgaagaagctatggactttcttaactttatgcttaacttgttggtccctccaggcagtatgctcaccttggctttctcatggccagcactttgcttcctcaatgtttgtgagtggctttataatagtatatatggtgaggatatcgataataaagtcgtcataatcactggggcatcttcaggcattggagagcaaattgcatatgagtatgctttgaggagagcaaatttaacgttggtggcccgcagagagcacaggctaagagggatcgctgagaatgcaaagagattgggtgcaagacatgtgatgattatggcagcagatgttgtgaaggaagatgattgtaggagatttgttaacgaaaccataaatgtctttggccgtgtagatcatctcgtcatatacagtgagtgcgggacatacattctgctttgaagaagctacagacacatcagttttccctgttctcctggatattaatttttgggggaatgtttatccaacatttgtggctcttccttaccttcatcaaagcaa

SEQ ID NO: 25169 - DNA, 259 bp, Glycine max
gcaggataactgcgattctgattttctttatattgtttatataatttttactatatacatataaattctcaaaaacgataaaaattacttaaaattcatgacattcagaagattcattggaaggtcacacagtcgacgacgaagagtcacacgggtcatgctatagtcacaaggtaggagaggagagttatgaacttttaaagggttttctacaagctgaaacccttttttttttaatccaaaatcacttcattagttt

SEQ ID NO: 25170 - DNA, 328 bp, Glycine max
cgccaccattgccatagatctgaaacagagatcacagtgttagcgcttttattctccattggacgttcccccgaacaccccgcacctataatccagcaccaatccaacccgttttcgctcggatctaggacctcagtgtctaagtgaataaggttggggtttgcgatcgctccgacgacgatccggaaggcgattggggtggtgaaggaccagaccagcataggaatagccaaggtcgcaagcaacatggcgccggagatggaggtcgcgattgtgaaggcgacgagccacgatgacgaccctgccagcgacaagtacataaggagat

SEQ ID NO: 25171 - DNA, 253 bp, Glycine max
cagtcttagcgcttttattctccattggacgttcccccgaacaccccgcacctataatccagcaccaatccaacccgttttcgctcggatctaggacctcaggcgattgggcgtggtgaaggaccagaccagcataggaatagccaaggtcgcaagcaacatggcgccggagatggaggtcgcgattgtgaaggcgacgagccacgatgacgaccctgccagcgacaagtacataagggagatcttgaacctc

SEQ ID NO: 25172 - DNA, 268 bp, Glycine max
ctaacccacttttgtagttcatgtgactctttgcttctttcacgctcactactctctttctttaatttttgtcaacttccataggagacaggaaataaaaatctcaacttgcttgatattttcttcctttctatctttttgtcactttccacgtaaagggtctcagtctcacttatggtatcctttagcatcatatctcttgattcccttttgtggcttagcaataacactccttgaaatatcttcccatatgcttccacacaacata

SEQ ID NO: 25173 - DNA, 272 bp, Glycine max
atctgctagtatttccttctaatacatagtgagttacactattatcaacttgaggttgtgaagaatattaagagtgtgtcacatcacttttactacatttacttgcaagaaatcgatgatgagttcaagtaggagagcatggactgtggcgattagtgttggagttgtggagaccttgaaggaccaaggcctctgcagatggaattcggctttcaagtcagctcaacaaagtgtgaaaagccatcttagatctttgtcacaggcaaagaagc

SEQ ID NO: 25174 - DNA, 263 bp, Glycine max
ggttagcgtggttgatgagcttggaatccctgtaaaatttgtgggtgttggtgaaggtgttgaagaccttcaaccttttgatgcggaagcctttgtcaatgccatttttatgtaaaccaatattgtgggtttggtatgtacatcatgacttgtctttacattcctttcaaatttgagtgtgaattcctttcagacataattgaagttaaatgtcacccataaaatcctcccccaccactattttaattgtacaaatttggtcc

SEQ ID NO: 25175 - DNA, 267 bp, Glycine max
tcttgaggttcttcggattcatacaaataacatgaaacttgctgaagatgttgatttggaaaaaatagccaaggatactcatggttatgttggtgctgatctagctgctttgtgtactgaagctgcacttcaatgcatcagagagaaaatggatgtgattgacttggaagatgagacaattgatgctgaaatattgaactccatggcagtgacaaatgagcatttccagactgctcttggatcaagcaatccttctgctctacgtga

SEQ ID NO: 25176 - DNA, 398 bp, Glycine max
attgaaaacaaaaagacatacaatttggactctttgataagtgtcactcaggatcttggtgatgctaaggaatcacagcagagagtaacaggacaggaagacacccttagaagcatggtggaagctcttgggatggagctggagaatgtaaaaagagaacactctgaattgaaggagaaagaatccaaaactgaatccattgttgagaatctgcaggtagagctctggaaaagcgagtttgaacttgaagcctacttggcaggagaatctaaagctagaggcgcatcagaggaaatgatcttgacattgaaacagttgttttctgaaactgaaaatgcaaggagggaaatagaagatatgaaaaatgagactgcagatttgaaggtggaaagctgcag

SEQ ID NO: 25177 - DNA, 808 bp, Glycine max
  unsure (1)..(808): unsure at all n locations
cgcagattctctctctctctgtcgtcgccgttgcagtggcagtggcacgtgctttcacaactcccccttttctcaagggttactcgtgctatcatggagtttgttgctcgtgctacccctgataataatgatgagatatctgattcaggaacacaacccaataagcagatgagaaagaagtctatggtgtgggactacttcacagtggaaactgttggagctggatgtaccagggcctactgtaaacagtgcaaaaaatcattttcttatataactgattcaaaattatctggcacaagccatctgaaaagacacatttctttgggaatctgtcgagtgctttgggagaaaaaccaactatgatcatatcccaaaactggtggctctctagatactgccaatccacccaagaaacagccaagagcaacacctgggtttgctggtaatggcatctcatttgatcaggagcgttgcaaccatgatgtcgctaaaatgataatcttacatgattatccacttcatattgtgaaacaacagggtttcattgattttgtgcggatgcttcaaccccagttcaatccattttgtctaaattctgttgaagcggattgtgtcgctatccacctcagaaaaaagcgaaatctgttgaatgttattaatgggattcatggccaagtgagcctttggatttgtggacttccaaccaggcaatgggctatgtttttgttcaaggacacttcattgatagtgatcagaaattacatcatcctattctcaatgttgntacagtaccatttnccattctgac

SEQ ID NO: 25178 - DNA, 376 bp, Glycine max
atcaagacttcccttcagatattgacattacaacgggagactaacaaggtcatggttaaacggcagagaacagcttttcccccaaattttgttcactctcttgatggttctcacatgatgatgactgcagttgctttaaaaaagcagggttgaactttgcaggggttcatgattcatattggacacatgcgtgtgatgttgatgaaatgaacaggatactcagggaaaagtttgttgaactctatgatgctccaatattggaaaatttgttggagagctttcaaaagacttttcccgcattgaacttccctcccttacccgaacgaggtgactttgatcttcaggaggttttggagtctacctagtgttttaacta

SEQ ID NO: 25179 - DNA, 267 bp, Glycine max
gagtctcgacagtctcagactcagagggaagaaggaaaatggctcagtcttaccttctctgctgttcttcttcttttcctcttcttccttcttcttcttcttcttcttccttccattatcgtaaacaaagcactaataccacttctatcccctcttactcttcccgccattccaaacttcccaacttcgcttcttcccatcaatccaaaacccttctacaagacacaatactagatagaccagatgcaaagtcttcgtctttatcca

SEQ ID NO: 25180 - DNA, 246 bp, Glycine max
ggcttgttgaatgctttggtaaaagctccaagctgagagagcttgtgaatcttgtggtagttggtggctacattgatgtacagaagtctacggacatagaagaaatgagggagatagagaaaatgcacaatctcatagaagaatacaacttacatggccaattccgttggataaaggcccaaatgaatcgcgctcgtaatggagagctctaccgttatattgctgatgtgaaaggtgcttttgtgc

SEQ ID NO: 25181 - DNA, 482 bp, Glycine max
attctttcgccgcggctggccctccgacaatgtcttcatcgatgagaatgaatgtactgatggtgaggatactgatatagagataaatggcccagacgggacgaacgggactgtgaaagtgaaggttctgacattttcagaaaatgtagctcactcagaagatgaggaaggatgatccataatttagccaagccagttgctgcggtttttttatgatgctatgtaaggttgtggagaagtccaaaaaaaacaaagccttgggaaaaacaccaagctctctggatgttggataggacagtgtgtgcaaatgaaaattccttcaggatacagaactgttggttcttttgggatttaaacccatctcactctgcatgactcaacattgatctgtttatttgcaatgctaggttgaatccttgtaggctgaatgtatatatttatttatccaactaataaaacacagacattttagaatattttcc

SEQ ID NO: 25182 - DNA, 626 bp, Glycine max
tacaccgtggggtgtcctagtaaatttggatggcttgcaatagtagggcttgcactctacatcatattcttctcacctgggatgggaactgtgccatgggttgtcaactctgagatttatcccctaagatatcgaggaatatgtggaggaatggcatccacatccaattgggtctcaaatcttattgttgctcagtccttcctatcattgacacaagctattgggacctcatggacatttatgatatttatattcatcaccatagctgccattatctttgttattattttcgtgcccgaaaccaaaggacttccaatggaagaagtggagaagatgttggaaggaagagatctcaacttcaagttttggcagagaagttctcactgtggagaagaagtaccaccacaaaagactcaatcaaattaagtctattgtgttgcatcatttgtaatattggagtattaactaaagaagtataggtaataaaatcgtagaatgtagctattagattctaagtatatacaataaaatcgtagaatgtagctattagattctaagtatatacaatatcttgtttgtgtgaatttttttcttatcaacaaatattattttgttaattttgttac

SEQ ID NO: 25183 - DNA, 196 bp, Glycine max
ggctgaccttaggcatataagagttgcactaggcatccccttattggaccggtaaatcaattcacaccctaggttgttcgatgggaacgacagtgtacttatttaacaatagtcacttgattcttttggataatactgtaatagcaagttaaattcatcagatttagcatttttgttaccagttagttcctttttg

SEQ ID NO: 25184 - DNA, 462 bp, Glycine max
agctttctccgaggaatcaccgtcgtcgttggtgagcgagggggatgaagatttattagaaccatatgaaactgagatctctctaaaatgcttgcttttgcttcttctctctaaaactgcatccttggaatcaggcgagacagagttttcttcattctcattggcaaaggtaggtagttagttatttgcaatgatagaaggtggtagcatccggctgaagacatggcagcaggcagctgcggcagtgggttcggcggtgggggcgttgttggaccctcgaagagcggatttgatagcagctcttggtgagacaactggaaagcctgcttttgagagagttcttcagaggatgaagagttcccctgaagggagggctgtactgatggagcgcactcgtgttgcttctgcaaagtaggacatgcttgggacctgccagcaaacacctttggtgctgtctatgca

SEQ ID NO: 25185 - DNA, 1266 bp, Glycine max
gaagataacacgaaacaaaaaccatcatttagttgccatccatctcccaccgatgtccactcccaacaccgattccggcacggcgccgccaccgcgccccaccatcacgctccctccgcgcccctccgccgaggccttcttctccgccgccgccggcgccagccccggccccatgaccctcgtctccagcttcttcggctccgacgccgccgccgactgccgctccttctctcagctcctcgctggtgccatggcctccccgatggccttctccgccgccgccgcatccgccgccgacaactccggcaaggacgacgatgggccccacaaggggttcaagcagagcagacccatgaatttggtcattgctcgttcccctgtcttcactgtcccacccgggttgagcccttctgggtttcttaactcccctggcttcttttcccctcagagcccctttgggatgtcccaccaacaggctttagcgcaggttacagctcaagctgtcctagctcaatcccatatgcacatgcaagctgattatcagatgcctgcggtaacagctcccaccgaaccacctgtacggcagctgtcttttgctctaaatgaagcttcggagcagcaagtggtatcatgtgtatcatctgtatcagaacctagaaatgctcaactcgaagcaccggaactctcacaggctgataagaaatatcaaccatcatcccaggccattgacaaacctgcagatgatggctacaactggcgtaagtatgggcagaagcaggttaagggtagtgagtatccacgaagctattacaagtgcacacatctgaattgtgttgtgaagaaaaaagttgagcgtgcccctgatggtcacataactgaaattatctataaaggccagcataaccatgaaaagcctcaggcaaataggcgtgccaaagataatagtgattcaaatggaaatgtaactgttcagcccaaatctgagtcaaactcacaaggttgggttggacaattaaacaagtttagtgaaaaaattcctgattcttcagttgctaaaagtgaccagacctccaatcaaggggctcctcctaggcaactactacctgggtcaagtgagagtgaggaagtgggtgatgtagataatagggaagaggcagatgatggcgagccaaaccctaagagaaggaatactgatgttggggtttctgaagtacctctgtctcagaagactgtcacagaacccaaaatcatcgtgcaacaagaagt

SEQ ID NO: 25186 - DNA, 176 bp, Glycine max
ctcgagccgctattctataagcaatagaatgggccctaccctaggatcgatacaccatggatgctacatttctttaccatgacaattttttgatttttcttttcctggtacatgtttataatacagacgttttataaacatgtacctattcaatgctcacccacctttttgcatgg

SEQ ID NO: 25187 - DNA, 299 bp, Glycine max
gctgttctgtttatgtggaagttagctcccctgactccgtccaccaccacctctcctgttcctttcacctgtcgtttgcttaccctccctttacgtcaccgtttgattgcgaaacgcaaccctccacaccttaaaccaacacaacaacactctctttaagcaaaaaactttccaccggtaacttgcaaagtcttccttcacacgcgtccttcttcttactcttgcttcccctgttttttcttctgtttttcactgccaacaacaacagcacatacaaacaaaccatgaaacctttcgtg

SEQ ID NO: 25188 - DNA, 431 bp, Glycine max
atcatcatttatgtttaacccagttgtagctgatgagtctgtgagtgcaacacctccttccactgaagatgctctagtaaaagaaagttcaaaagacgatttcttgaaaagaaaacctcagcagttacagctatcagaagaggatcaagtagagaaggctcggaggtttgaattcgtgcaagggcttctgatgtccaccattcttgatgataagttatgactgcatttgtagctcatatgccaatgttgaaagagctggagctgtaagctagagagagggagagttatccaaaacgatacgaagctgcatcggataaatatgtaatgtgtctatagttatgttcataaaatgcaaccttttttttatgtatcatgcttgtgttcaatgttagctccaaataatcaatggaaataaaacacgtttcacgggc

SEQ ID NO: 25189 - DNA, 339 bp, Glycine max
tggagaggtattcgtgctcacattgttcgaatgctgtgaagaaaggaggggagagtccgacagtcgaagggaattggaatgtgttgggggaaaacggttggaggattgaggactgtggtgacactcattggtgcgccaaattggctggagtgcagcgcgctggcgaaggtggctgtgaatttgtctgagtggagtgatgttaggcctgggatggattgcgaggttcacccgtgtgcccttcgcgataacttgccccgcgcaatggggcacttttatgtgatttctgggttctttgtggtgtaccggtttttcaatttgactgcagaggcaacacttgag

SEQ ID NO: 25190 - DNA, 391 bp, Glycine max
ttttcatatgttccatttggaggtggcccccgaatgtgtttggggctagagtttgctagactagagactcttgtgttcatgcataatatcgtgaaacggttcaagtgggatttggtgattcctgatgagaagtttaagtatgaccccatgctagaaccagtagaaggacttgcaattcgactccatccttcccatttctagttaaacaccttcattatacgcataatacattgattagaagctttctaagtagtcatcttatattgctatattagtattttaataaaactttttgctacatcggttagcccagcttttttgtaactgctttcatgagttttatgatgtattcatttcaataaaactttgattattctgttatgtacaacat

SEQ ID NO: 25191 - DNA, 645 bp, Glycine max
  unsure (1)..(645): unsure at all n locations
actatctatcatgtaaaaagcctcttgcagaagtatagaactgccagatacaaaccagagccatcagaaggaacgtctgagaaaaaggtgactccaatggaagaaatgaaatctctagacttgacaacgagtaaggggatcactgaagcattacgtttacagatggaactccagaagcgacttcacgaacaacttgagatccaaagaaagtcgcagattcaaattgaagaccaagggaaacgtcttcagatgatgtttgagaaacagagagagatgggtgacagcaaggttaacgtctccttggacgagccttctgctgctgcaccatcagaaacagtagaaaccacaaatgaggaacgccacaaatttgaaagcattccaaaagccatacccgaagagaaggagtcaagcacaacaaaacaaattgcaggtgaagctgaagaaatgatcaaggaagatgaagttgcaccacccacaaaacgggtgaaaagttcgtaacagcaggatcgttgttttatgccttctagatttgtttaatattcttagactggtttggactccatggaacttgtagaaatattattggatccaaggatgtttcaacttgctcggnnnnnnnnnnnnnnnnnnnnnnnnnnnnnnnnn

SEQ ID NO: 25192 - DNA, 320 bp, Glycine max
cacgaacaacttgagatccaaagaaagttgcagattcaaattgaagaccaagggaaacgtcttcagatgatgtttgagaaacagggagagatgggtgacaacaaggttaatggctcctcggacacaaacgaggaaggcgacaaatttgaaagcattccaaaagccatgcctgaagagaaggattcaagcacaagaaaacaaatagcaggtgaagctgaagaagtgatcaatgaagatgaagctgcaccacccacaaaacgggtgaaaagttcataacagcaagatcgttttatggttctagatttgtttaatattcttag

SEQ ID NO: 25193 - DNA, 546 bp, Glycine max
atcacctgtggagacgcctgaagttaaagctgtagttggcagagctttttctcatctaatttcattatatgggcaacaaattcaacctcttctgagcaatctcccacctgcacatgcaaatgcattatctgcatttgctcaacggagttgatcgtgcaaacaatgagcaaattgaaaattttatgcaattattttacttgttttacttatcaagtatgtttttgaagaaatgtcctgttacacagttttaagtggagctgtttgggtcggccagaagtccattgcctttaccaggatgctgagtgccttctcgtttttttttttgggagacactttccccccattttttaattaattatttcttgtgttattctttagtttttaaaggatattaattttcctttcctcccatattatgaaattttgtttggtgcgctttcgcactggcttggaggggtgagtgagagttgtgtcgtgttgaggtttatgtaccgagaaactataggttcttccaaaggtatttgtgatatattctacagttttgtg

SEQ ID NO: 25194 - DNA, 456 bp, Glycine max
  unsure (1)..(456): unsure at all n locations
ttgattgggcctctaggcccccaaatgtttgggctggcaaagctgcttcaattgtaagtgccggtggggactttggtgggggaaggtcacactatcatcttcgccaaattggagtgtacattgatcttcgtttcatcaataaaccagaattcttccttcttgcattcaaaccaccaccaaaattcaatgatgatggtgacttaattgatgaagaggccaaggataagttgaagcaagttcttctgtccttgcgtgcatttactctaagacttcaaggcaaaaactaagcttgaagttactttaattccacgaattattgttgaaataagctgaggatttagaaataaaccaatgttattctgaacgtgaatgatgccactatgtataaggatggtttttaaaggtcgnnnnnnnnnnnnnnnnnnnnnnnnnnnnnnnnnnnnnnnnnnnnnnnnn

SEQ ID NO: 25195 - DNA, 265 bp, Glycine max
gtggggggtcaaggaaaccaaggaaatttagtagcaggagtgtcgggttcttcagcaattctgcgagccataactttagttctagaagcatgtataggggtaggagtgcacccctgacatgtaaaattactagttcattggctgcagtattggctcagatgctatctcacagggcaactcatgtctgggtgaccgaggacgagaacgatgaagttttggtcggtgtggtcggatatgctgatattttagctgctgtaaccaaacc

SEQ ID NO: 25196 - DNA, 250 bp, Glycine max
gccagagggaagcagcattgttacttggacagtttgcagcaactgattcagactgcaaggttcacattgttcagagaggtgctgtccgacctctgatagagatgcttcagtcctctgatgttcagcttaaagaaatgtctgcctttgcattggggagattagcccaggacacacataaccaagctggtattgtgcacaatggtggtttgatgccattactgaagcttcttgactccaaaaatggctcttt

SEQ ID NO: 25197 - DNA, 259 bp, Glycine max
cctccccttgagttttttttcccctcaagtacattttttatgcgaaccttaatttacttctggagagaaaaaaaggttctcataaaaaatttacttgaggggaacctttttttctctccagaagtaaattaaggatacatcgtgtagttggttatatgattgtacacagcatagcatcctccccaaatagtaaaagaatattaatttttcttttgctcattggttgcagcattgaagttctagcagtgttcaagagggg

SEQ ID NO: 25198 - DNA, 448 bp, Glycine max
  unsure (1)..(448): unsure at all n locations
ctttggtcaacgagttggtactagtcaaggaagcttactgacccagtatcttctaaagaaaggtggtatgatcaaggagacatggatggaggaagatccaagggaagctatcctgaaatatgctgatgctgcagcaaaggatccaaagttcattgctccagcatatgcagaaacccaacctgagccagtttttgcaaagtcagattctgaggatgaggagaaatgatcgggttaccaagttattgtatcacaaagatggctaacaaggggacggtaggcaagagtgaactgtactttattttcgagagggctggaaaaagtttcggttaaggcaatgatgctgttgaaattgtaacacctctaatgttttagtacctcatgtctgtaaattagtcatgtaaaattgaattttgcaaactataaaatgataaatttangaattttaaaa

SEQ ID NO: 25199 - DNA, 296 bp, Glycine max
tggatacgtaacgtcttgcgtggcttcttgttcctaatcgtgccgtggaaactgtgcttcaaggtttagcgtgggttcaagaaattgatgattgacctgtgacaataggctttgctcaattttttgttaacgaagtttaaatttaggtaccacctgtggcagttgattgcactaccaccaatatgggtgtctatgaatgtcaacttgcaattttttgggagaagactcaaccttggtggaaattttttgacgagaatgactcattcattctctacgccgggcaacacaattgtgca

SEQ ID NO: 25200 - DNA, 380 bp, Glycine max
  unsure (1)..(380): unsure at all n locations
ccaacatctacgttatctcctccaattccatcccgatctctttattgtcttcttcttctctcttcctggttttcgttggagaatcctgaaagccgtttgattttaatcaaagggtcatcaggattcggacaccaatatctcgaatcactcctctgttgtcttggaagaagaccaagcaaaggaaacgaagaaaaacatcaatttttgcaagcaacaatcttctttcttcttcttctgccccttttcttctcttctcttgtcttaaaacacacacacacacaacatagccctcaatctgctgaggttgaagctgaagcgtcacaagtcacatacatatgatgctagtnggcacaaactaagagtgagagagaatggaatcg

SEQ ID NO: 25201 - DNA, 271 bp, Glycine max
ctagttctagatcgcgatctagaaccggctcgagagaacgatatattgtcattccaacccctccaattaactcgattgtagcttggtttatgaccattcctaattccggcatgattctggtgggaatcctctctccagctctcactgtatctctctttcttctctatcctgaacctcactctcacccacccattctctctctctctctctctctctactcatctctcttgctcctctactaggttgatctctcctcacaaggcacttctat

SEQ ID NO: 25202 - DNA, 317 bp, Glycine max
  unsure (1)..(317): unsure at all n locations
ggaaattcatgccaagatgttatgcaagcacttgcaacgccctgaacaaccaatggagngtgaagatgaattggaagatgctcaagttagaaactctgaggacgatactgagcactatgctaaagtccaatatgcagatgaatcattttcaccagaacccattaaaggagaagttctagaagccaaagatcaggctggctcattttcaccggaactgtttcatggtgacgaaaatgaggaagctattggccctgaagaggcacgatctctactgcgtcaaaaacgcatggctgtaaaggaagagcagcacagacaaa

SEQ ID NO: 25203 - DNA, 272 bp, Glycine max
tttgaacatggcagccacattcttctctcacttgtcccttcttcaatccaataacaacaacagcccttctctctctcccacaccctctcgcatttctcactctctcaccaaccgtgtcaaaccctccctctgtggggtttccgctggaaccccggcaagtcggttggtgccaaacgccactttgaatgccgtggaggccatttcggctaataagctgtccaacatcaaccccattgttgttattcctaaatatgatagcttcacctataatc

SEQ ID NO: 25204 - DNA, 357 bp, Glycine max
gaaggttcatatgagtggctgaaaccatgaatgcttttaagatttgatacagataccgtgtgaattagagtctctcggccttattcttatcatgaaagattgttatgctcttatcagtttcaaataggtaaaaagttacctcacaggtttccaaataagctttttttgtcaagttcatgtgcgaataagttgacaggacaattgctagttgctacagcctacagcttatagatgagctagtacggtaggcggtggagctgctggtttcagcttgatttttcgaataccctcatctggtagtaatgccatgggggctacaatccgtagcagctcaaaattcttgcattcaaagggatt

SEQ ID NO: 25205 - DNA, 489 bp, Glycine max
  unsure (1)..(489): unsure at all n locations
tctgaggcagcagcgtcttacagaggaatttgtaccccgtgcagatttacttctttttgtcatttctgctgatcgccctttaactggaagtgagattgcttttcttcgttattctcagcagtggaaaaagaaagcggtctttgtcttgaataaagctgacatatatcagaataatcatgagcttgaggaagcaatgtcattcattaaggacaatatacagagattgctgaatactgaagatgtcatgttatatcctgtatctgctcggtctgctcttgaagcaaaacttatggctacctctaatgctgggaggctaaatgaagaattatcaacctctgattctcattatggtgccagcagtttctctgaacttgaaaacttcttgtatagctttctagatgggtcaacaatcccaggaatggacagaatgaggctcaaactngaaacacctgttgcaattgcagatagactaatttctgcatgtgaaac

SEQ ID NO: 25206 - DNA, 289 bp, Glycine max
ggcttttgacgccttataacagagtgaatgaggaagatagttttggttccgctgagagagcgttcaattgcgtccatgggaatgcgatggagttggttggggatgcgttcgggaggcttcgtgccaggtggcggcttcttgcggcttcgaggaagtggaagcaagagtgtgttgagcatttgccgtttgtggttgttgcttgttgcttgttgcataattttgttgtcaagttcaatgaggcaatgccggatgaaggggtgagtaactggtgcgtggaaaaggagaagga

SEQ ID NO: 25207 - DNA, 404 bp, Glycine max
cagttttcgcgtgcgattctcatggaaccgaaggacaaagcgctggatcgagaatcttgattcggtttgatttttacgtttttgacttctgattcacgcgcttttcgacaagctgatacgctcttggatttttgcgggattcgatcgtatcgtatttcattgcaatcatgactcaggcggtggaggtcctgaaccggtatgggacggatctggttggggagccgagagattctgattctgagtgtttggcgggttttgagtgttttctgaacattgtgagggcattgggaatgggatcgtgtatctcagaggttggagctggtggtaattcaccttctcttcttgcttattcgcctgaatccaacatggatggtggaaagagaagaatgttgaggggttcctct

SEQ ID NO: 25208 - DNA, 263 bp, Glycine max
gaaagatggcacaagttgttaagccacatgaacctaagacacagtcatttaaacttttgagtggtcataccataccggctgttggattgggcacatggaagtctggttcacaagctgccaattctgtgatcaccgccattgttgaggctggttacagacacatagacactgcttcgcagtatggagttcaagaggaagttggacatgcactccaatctgccatgcaagcaggagtggacaggaaggatctatttgtcacctcc

SEQ ID NO: 25209 - DNA, 269 bp, Glycine max
cttgagttgatcccagtatgtattagcaataatttaaatctatgcagactaaatttatggctacagaatattgtcatgtaatgcacatgattgaccaggcagtacaattagttattaagcttgctgtacatttagtctgcatagatttaaatgatggttaatacatgcttgtgttgaccccggtgctttttttcttaaccccaccttgctggtgtaaagaatgaaacctagaatacaggtactcaggactgatcaagtagtattcgatc

SEQ ID NO: 25210 - DNA, 686 bp, Glycine max
aagaatgaagactgcccttctgcgacgccctttccctcccttgaatctctggccattcatcacatgccttgttgggaggtgtggagttccttcgattcagaagcttttcctgtgcttgaaattcttgaaatacgtgactgccccaaactagagggaagtttgccgaatcaccttcctgctctcaaaacacttacaattagaaattgtgagctgcttggctcttctctcccaacggctcccgccattcaaagtttggagatatgtaaaagcaataaagtagcactgcatgcgttacctctcttagtagagactatagaagtagaaggaagcccaatggtggagtctatgatagaggccatcactaacatccaaccaacttgtctccggtctttaacattaagggattgctcgtcagccgtgtcatttccgggtggtcgtttacctgaatctctgaagactctgcgtatctgggatcttaaaaaactggaattcccgacgcaacacaaacatgagttactggaaacactgtcaatagaaagcagttgtgattcactcacatctcttccattggttacctttccaaatctcagagatctcgcaatcggaaactgtgaaaatatggaatatcttttggtttcaggggcagagtcatttaagagtctgtgttctttgagaatttatcaatg

SEQ ID NO: 25211 - DNA, 257 bp, Glycine max
atagtgccaagcctctatctcagaatttgtggccacggaacccacaaaagcaaatatctgacccaatgttgaagtttgttcaagaactccatggagatttggaattggtgtacgttggtcaggtttgcctctcatgggagatcctgtgttggcagcacaagagagttcaagtgttaaaacaatgtgattcacaatggcctcgtagctataatcttgtggcgggtgattttcaactctttcaagtgctcatgcaacgg

SEQ ID NO: 25212 - DNA, 253 bp, Glycine max
tactcgagccgattcggctcgagggtaactcgactctattgagtgatgcacaatcgcttctccatcttgaactagactttccaacttgcgaagaaaaccaaagtttcgtttggtcgaaaacgcacgcggtttgacccactttcaccttcaccaagaagtggtttcatcacttggtggttacacaccacaccactgtgaagcgtgaatatgaacgttccttttagcctctctttcatttacccttttccatata

SEQ ID NO: 25213 - DNA, 326 bp, Glycine max
ccttggcagcgtcatatcagaacatggatgacgagattgactttgagtcgttccttagggcacatttaactcttcaatcccgagcaatagctaaagatggtggttcaaaaagttcttcctcattcctgaaggcagctacaacaactgttcatcatgcaattagtgaatctgagaaagcgtcttatgttgcacatattaacaactacttggctgacgataaattcatgagtcagtttcttccaattgatccatcaacaaatgcattgtttgatcttgcaaaagatggagtccttctttgcaagcttattaatttgctgttcctggga

SEQ ID NO: 25214 - DNA, 282 bp, Glycine max
cgatctacacggctctgcggattcatccttttcttctgcagagcaaagaaccaaccaacacttgtttcttccgccatggccgatcaacctgaatcatcggacgctaagggcaccaagagagatttcagcaccgcgattttggagcgtaagaaggctctgaatcggcttgtggttgatgaggccgtcaacgatgacaactctgtcgtcgctcttcatcctgataccatggagaaacttcaactctttcgtggtgacaccatcttgatcaagggaaagaaaagg

SEQ ID NO: 25215 - DNA, 372 bp, Glycine max
aagaagaagaaagctctagcctctcacgttgaaactctcatgccattctctcttcacttacccaccaatcacccatcatggaaccttccataccccaagcaaccaacacccactaagctcaacctcatttttcggcgattcccggtcttttcctcgctcagaacctccctcgactgcgtctccgatggaggcgtcgagaagggctcttcttcgaagccaattcggctcccattcgtggtgaggagccccgccagtgctcgagattcttctggaccggtaactgcttgcaggtcgtgagcgtcgacggcggcggcagtgcggcttctgacgtgagttttgatgataggtggctgagggcgtttggctctgttg

SEQ ID NO: 25216 - DNA, 265 bp, Glycine max
gggaattggatttttgggattaggttttcagcctaaatggagactggaagacatacctggagtgcctaaggtacgatataacatcatgcaaaatcacttaggtaaatttggctcacctacaattgaatcattgttcatgacatgctcagttcaggtcaacctggacttcagttctgaagcagacatgatcaagaaaatgcgtgccagtattgctttgcagcctttggcagcagccttattcgctaattcactttcaaggaagggg

SEQ ID NO: 25217 - DNA, 332 bp, Glycine max
atttaatcttacaaaccagacagatagagagctgggcccatttgaagttggcttatctcaaaatgtttcatatggggagagagttgttatgattaatggccttcaatcaatggttttatcagaggttcaggctttaggatctacaaatttccacctgaatctcatagctactaaacctggaattcagagaattacgggaattacagtttttgatactagggagatgaaatcttatgaaccacttccagatttagagatttttgtggacatggattaaaattgtggctaccgcatccaatttggtcagaagtggtagacagcaacattgatct

SEQ ID NO: 25218 - DNA, 612 bp, Glycine max
caatgttgctgcgtttgctatatctgcctatgcttcaactgaagggagaatttgcaaaccatttaacccattactagcgggtaacatatgagggctgactttccagataaaggaattcgatttttctcagagaaggtcagtcatcatccaatgatagttgcatgtcactgtgagggtacgggttggaaattttggggagatagcaacttaaagagtaaattttggggtcggtcaattcagcttgatcctgttggcattttgactttggaatttgatgatggtgaagtatgccagtggagtaaggttacaacatcaatatacaatctcatattgggaaagctgtattgtgatcattatggtacaatgcgtatacagggaaatcaagactactcatgtaaactgaaattcaaggaacaatctataattgaccgaaatcctcaccaggttctatatatctgtttcatggattccatctttacagaggcttgtctttgctatgatattaacttctggctaatatagtacttggcatgtgaacttctctcaggttcatggtattggtcaggatagaaatgggaaaatattgtctacattacttcgaaaatgggatga

SEQ ID NO: 25219 - DNA, 270 bp, Glycine max
gcatggtgaagttggagaaatggaagatggctctgcatcaagtagctaacttgtctgaccttaaaatcaaacatggagctcgatatgaatacgactttattggggagatagttgagtgggtctccagtaagattaatcctgctcattacccggttggattacggtcaaaagtgctggaagttaggaaacttctggatgttggacgtgatgatggtgtccacatgttagggatccatggaattgatggtgtagggaaatcaacacttgcac

SEQ ID NO: 25220 - DNA, 498 bp, Glycine max
gagagaatgggttcctcggaagccgaaaacgaggctctccgtggcgccgaagaagaagagggttctacttctaacaagaaatgcggtatggacccgacggcaaggcggatgttgtttttaactcaccagaagataattcaactctcaatcttagtgatgttcaaggacttgtaacttgggtgctcggtgaaggatttatgccgtcatgggtttttattaagaataaacctcttattcccaaagtggttatgctctatgtgccaggcctggacgcagctttgttcttgtcgcagtctaaaatgcttcccagattaaaaattttctgtggcaaaccaagggcactcctagctcttagctgtgtgtcagatggtatgcagacgatagatgcactcctaacatgcaagatgaaaaggaaaagggacgagaatagttcaattatggggaaatttgctcggacatctcacaaggttttcattattcaactaatatatgaaaatc

SEQ ID NO: 25221 - DNA, 328 bp, Glycine max
caattccataaaagtaaaaattaaaatttgtactgcgtcgtttccgaacaactatgttccaagtagtagccgaagagagaatgggttcctcggaagccgaaaacgaggctctccgtggcgccgaagaagaagagggttctacttctaacaagaaatgcggcaagttctacgatgtttatggacccgaaggcaaggcagacattgtttttaactcaccagaagataattcaactctcaatcttagtgatgttcaaggacttgtaacttgggtgctcagtgaaggatttatgccgtcatcggtttttatgaagaataaacctcttattcc

SEQ ID NO: 25222 - DNA, 316 bp, Glycine max
agaaggcggactggatacattttctcgtagttatgaaaaatttggcttcatacgcagagctacaggcattacttacagagagtgggcacctggagctaagtcagcagcattaattggagacttcaacaattggaatccaaatgcagatgtaatgaccaggaatgaatttggtgtgtgggagatcttcttgccaaacaatgtggatggttcaccaccaattccccatggttctcgggtcaagatccgcatggatactccctctggaatcaaggactcaattcctgcttggattaagttttctgtacaggctcctggt

SEQ ID NO: 25223 - DNA, 1148 bp, Glycine max
gtaaaattgttaacaagtgtggaggattgcctttagctataagaacagtgggaaatatcttgcgagcgaaattctcccagcatgaatgggttaagatattggaaagtgatatgtggaacttatcagacaatgatagcagcattaaccccgctctgagattgagttaccataatcttccttcctatctgaagcgttgttttgcttattgctccttatttcccaaaggttatgagttttacaaggatcagttaatccagttgtggatggcagaaggtttgttgaatttctgccagataaataagagtgaagaagagttaggtactgagttcttcaatgatctagtggcaaggtctttcttccaacaatcaagacgccatggttcttgcttcactatgcatgatcttcttaatgacttagcaaaatctgtctcaggagatttttgtttacaaatagacagcagttttgacaaagagataacaaagagaactcgtcacatttcatgctctcataaatttaaccttgatgataaatttttggagcatatttctaagtgtaacagactgcattgtcttatggcactaacatgggaaattggcagaggagttttgatgaacagcaatgaccaacgtgctttgttttccagaataaaatatttgcgcgtattatcattcaataattgtcttctcacagagttagttgatgatataagcaatttaaagcttttacgttatctagacctttcctacaccaaggttaaaagattgcctgactccatttgtgtgctgcataatttgcagacactattattaacatggtgctatcatttgacagagctccccttagatttccacaaacttgtcaacttgcgtaaccttgatgttcgtatgagcggaataaatatgatgccaaaccacataggaaacctgaaacatcttcagaccctgactagttttttcatcaggaagcatagtgggtttgatgttaaggagttggggaatctcaacaatctccaaggaacactttcaattttcaggttagaaaatgttactgatcctgcagatgccatggaagctaatatgaaacagaaaaagcatttagaaggattagtgttggattggggtgacaaatttggaaggcgcaatgaaaat

SEQ ID NO: 25224 - DNA, 831 bp, Glycine max
agattgttgaatcatcacatggctgtgacaaaagagaaagaggatgttcggaacactgggaagagattgaaatgcatgaggaatgaagaagaagaagtttatgaagaagaagagagtgagcttcctttaaagccaggatttttcttctacccaacaacacccacttcctttgttgtatctgatgctcttgaacccgattttcccatcatatatgtcaacaaggtctttgaaatctccactggatatcgtgctgacgaggccctcggtcgcaattgtcggttcttacagtatagagatcctcgagctcagaggaggcaccctttggtggatcctgttgttgtgtctgagattagaagatgcctcgaggaaggtgttgagttccaaggtgaacttctgaatttcagaaaggatggtactcctttggtgaacagactgagacttgcgccaattcatgacgatgatggaactgtgacacatgtgataggtatccaactcttttctgaggcaaatatagatctgaaccgtgtctcatatccagtcttcaaagagacttgcaatcaagattttgataagactggtaaatataatcctaagagttggacaatcattgtacagtcagcaccaagagatgtgtggcattcttcagctttctgatgaagtcttggctcacaacattttgtcacgcttgacaccgagggatgttgcatccattgggtctgtatgcaggaggatccgtcaattaacaaagaacgagcatgtcaggaagatggtatgtcaaaatgcgtggggcaaagaagtgacgggcacattggaactgatgaccaagaagtt

SEQ ID NO: 25225 - DNA, 398 bp, Glycine max
gagtgtgaaaatctatggctacaactcagagcctgttactttcgatttcaacacctccatccccaatggcacgtggtatgggtataatctgtgcgagactcctccttcttcttcttcacaccaactattccctcagaaatggctcatgagtttggttctaggctttgttcttagttttcggctgtaataatgttacgcacttaacttaatcacacatagcaatacaccttttgcatatagccgtgaaaggtgtaacttagtagtagtagtcttctatgcccaaagtagggacatgagatgtgtaaggccaaagtcagttgctttgtgacttggtggttttcatgctttgtcgcacctatgttaaaattttagttaatgaaaggaaaaaaattagttat

SEQ ID NO: 25226 - DNA, 268 bp, Glycine max
caagcacaaaaaatccaatgaagaaaaaatggacttccctggacaagaaataataaaatttggagatattgtacaagccccaccaaagttagctgttcctcctaaggcattcaagaatgcttctcaagagagacttagactccaggctatagaggaatacaggagtcgcaaaggatgggcgtcaaggctaggaagtcaccttccacctcctgcgactactttggacccttaaatcactctcagcatgttgtgaagcatactatgctta

SEQ ID NO: 25227 - DNA, 354 bp, Glycine max
gtactattagaaaggggtatccctgatacagctctcatggtcttgaggtgggctgggcgtgatggtggacctcacttgacttcactcagagatggtgtcactgcagtgcgggtgagggttgagtgtgggcttctgactgaagcatttatgcatcagagagtgctctgcaccagagtgaaggaaaagaatttcaataaaacagcatctgggaatacttctgagaagcaaaaaggccaatgtaataagtgggtggagtggatggaggtcctggtgactgagatttgttgcctctgtattaggaggaactggtggatcgaatgctagaattgccatggaattctgaggtagagaagt

SEQ ID NO: 25228 - DNA, 365 bp, Glycine max
gtagtgcggatcaccctctgcgtctccgatcggaattgtcaactcggcttggtgatggaacagcggttttaagttttgtgtgaattagaccgtagacgtgatttggtttggtctctaataatctatggggaccgaagatcctggtcgtccaaccttccctccttcaagacctgcttcatcgccttctgccgctgcacagacagtgtcacctgtttcgtcaaccggtcccgtggctggatcagagcctccttcttttcgccctagtcctccagctcctccgccgcaagcctgcacgccgttttcgtcggctggacctgctgcagttagacctggggcacccagttatagacctgcaccaccaggga

SEQ ID NO: 25229 - DNA, 479 bp, Glycine max
tcgaattggggataatcaattctctgggaagatacctaattttattcaaagcttgacaagtctccaaaaactagtgattcaagggagtggattaagcgggccaattccgtctggaatttcatttctagaaaacttaacggacttgagaattagtgatctgaatggatctgaacattctcttttcccacaacttaatcagatgaagaacttgaaatatctgattctaaggaattgcaacatcaatggaacactacctccatatcttgggaatatgacaactttaaaaaacttagaccttagctttaacaaattgactggaccaattccaagtacctatgatgccctaagaaaagtggattacatatatttaactgggaatcttctcaatggacaagtacctgcatggacagaggaaagtgacaatgtggatatttcatttaacaacttcagcgtcacaagccaagggagtacatgtcaaa

SEQ ID NO: 25230 - DNA, 274 bp, Glycine max
ggaatacgacgtcgtttattattcgtgccaagaagtccggtggcatagcatcgcttgtgtcgcctggccctgtgacccccgcagtgctgcctacgcctatattgtcgccgtcgagggaggtgttaggggatatggcgcaggaggagtggggtgttgatggatatgggtcgatgaagggtttgattaggcttcgatcgcccgggaatgacgctgatgttcatgcattatgagggtgaggaggacggtgggtccagtgagagtgatgtggacgaac

SEQ ID NO: 25231 - DNA, 483 bp, Glycine max
ctcgagcgattttgcatgctcttctcttcccaagaatatgcaccgctcaaacagataccatttttgaaaccccttcttctctgttttcttctctgttttctcctctgcttccattctgcatccactcttttctctcttcttctttgtttctttgtttctctgtctctcttggtccctcaccaaatgtaaagaaggattttctcacacccggcgccattagtccttctttcagattttaggtgtggttactagttttttggatttggaataagcatttccataacagaataccatgtccatttaagtgtgtgaagaagagggggaaaatagaagagaaggaaaacccagaaatggcaaccacgtataataacgtgaaagagtttacgagcgacgacgaggcatctccgagggcgattctggagacccctgtttcggaaacagagtcagacaacagtggaagcagcgagagcttcagttctgtct

SEQ ID NO: 25232 - DNA, 438 bp, Glycine max
tgtcaaattctgtttcagaaccatacgacttgaccctcattgacttggatgtatccagttaccctgaagaggttcctgcggctgataaagctggtggtaggtgaccatgaggaatgttcagagctaggtttgatgggaaaaatgttatcgcttgaggagattagagggagaggggcgtcagacataccttctgtgcttggaatgaacgaactatgattgtggtttcttaaatcctggtaaaggaattaagcagatcatgtggaaacatacgtttgtgtaaattaccttaagcatctagttggccactccaaagcaaaatagtccttgatattggtctctgtcttcataccgtaattgtgtccaatggttgtgtcctgtgtgtaaattgtagatactaaaaagattgatttagaatttattaaaaaaatttttaacatt

SEQ ID NO: 25233 - DNA, 269 bp, Glycine max
cctaattcaagcattttttaaaagtgcttcagtgccacaattttttcatccttccttgctccattttgtatcatttaacaatagggttacgcaagtggaagatttcaaatttgaattgatgaatccaatttgaaatcttccacttgcgcaaccctattgttaaatgatacaaaatggagcaagtggaagatttcaaattggattcatcaattcaaatttattttgaagatatttctagatgtaactcattactaagtgtatttgatagc

SEQ ID NO: 25234 - DNA, 341 bp, Glycine max
accatgtttgaaatcgcttgagcccacccctaacacgaccccacttatcgttgaagccgcgagaaatgcctctgggagacagggcaggggatcagagcgagtctcgctactgcggtgtagagaccgacttcaacgatgacatgccacacgtcctccatttcaacctttattctggaagcttcgatttcgttgttgctcctctgatggatcattcttatcggccaagtttagtgcaaaaggatgctttggggtctggtgttctgccatttgctgggtcagacttggtcttgagtccatcccagtggagtagtcatgtagtgggaaacattagctcatggata

SEQ ID NO: 25235 - DNA, 271 bp, Glycine max
gaagaagcagagtgtatatcgaacttgttcaaacccatatacctgaaggaggtggctgagctgaggcagtatgtccccaacctccaaagccgccccaacccactggatcacaacccctactttgacacccgccaactacaacaacaacagggcttctaccttacagaatccgacgtcctactccgccagatcggcaacgatctctctccctctccccgcttcgcctaccaccgcgctggtccacgcaaaaacatcttccttgacccttcca

SEQ ID NO: 25236 - DNA, 926 bp, Glycine max
attctgtctgttagcattggagttctccaaagtgacctactcgccttcaatccaaccttacccagatggaaattggatgccatcgagaaatgtgatgtgatggtgtacactaaaatctttctcaagtttccgtataagttctggccgagtggacccgataaggaattcttcatctatgctcacgagcggagaggctactacacattttggcagcacatggagaacgcgtatcctgggtccaatatgttagtggtgacattgactaatgaggaatcgaaacgtgtggaagctcaacctgatgaagagaccttgagagaagctatggcagcgctcagggatatgtttggacccaacatccccaatgccattgatatacttgttcctcgctggtggaataacagatttcagcgtggcagctacagcaactaccccattatttccaatcataaactttttcataatattaaggttggtttatttacgcattttataattgtgtgacagtttcctttttaatctgttctgttcttaaatatatcaatccatgctacattttgtctcttatgctattcgtctctcttgatatgatatactgcaggcccctgtaggtcgcatttttttcactggagagcacactagtgaaagatttaatggctacgtacacggtggatacctggcaggtgaggcactaatatttcaagtttgtattgctaatggttgataatagcaataataacttgaagacctgacacgggctgctttaactaacaggtattgacaccagcaaagcgttactagaagaaatgaggaaggaaaaagagagtcaaactctgttgttagagccattgctagcatcattaacaatgtcgaaaccagaaacagtctccaatatccacaagtgcgatattcctacacaattatatctc

SEQ ID NO: 25237 - DNA, 447 bp, Glycine max
attaagctccactttagataaacttctcaacgagaatttactggagaagaaaataaatcaaatttctcttatgaattaaaattaatttatgtacatcagtcttttttagaagttctttcatttaatttttcagaaactgatgtgcgtaatttaattttaactttttagtagaaatttgattcaatatctctatttcttctcttttttattgataaaattatctaaattgggtttaatattttagaattgggatggctggtgctaaattggttcttagctcgagaatttaccctgtatctatgcaaagcttgtccgtgccaatgtaaattgtattactgtccttttcagatttttaaaatttatgaaggacaagcaattgtacggttataggaaaaattgtaaagcaactccattaccatgaatcgaaagcatataaacttcaggtgt

SEQ ID NO: 25238 - DNA, 306 bp, Glycine max
atcgaacgcgatgaaattcatgccgatatcgtctgataatgaccatctgttatgcataactcatgttttatgggccgatgtgtgtgcaatgcaaccaaatgaaagtgtcatgtgaatgtgacgattaataccgagcaaatcagattatttatgatttctggagtgcgataactggaccattgatgtgtggctctcggaagctgccaagttcaaattatttatgtcatacgggctatcggcatagtagctggtgttttagtggttgttcttctggtgctgcttctcatgaggaggatgggatggtta

SEQ ID NO: 25239 - DNA, 933 bp, Glycine max
  unsure (1)..(933): unsure at all n locations
aggtcttccacatgacatacgagttgantgaagctgancagaggaaaactcangacttggagaattataaatcagatgttacaggactggtcactggaatggtaaagccatctgtggatattttgtggttcacttggagaatgaagctgttaacaggtcggaggggagttgccatactctatgcttacatgttactcggtttgcgatttctaagaactgttactccagattttggtgatttgattagtcaagaacaacaacttgaaggaacatttaggttcatgcatgaaagactttgtactcatgctgaatctgttgctttctttgggggtggtgctcgagaaaaagctatggtcgagtctagattcagggaacttctcctccactccaagtaccttttaaaaaagaagtggctgtttggcatcctggatgattttatcacaaagcaacttccacataatgtgacttgcggcttgagcttaatatatgccatggaacacaagggagaccgcgcatcagtaactactcagggtgagctagcacatgcactgaggtttttggcatctgttgtttctcaaagctttttagctttcggtgatattcttgaattgaataaaaagtttgtagagctctctggtggaattaatcgtatttttgagcttgaagaacttctagatgcagcacaatctgagaatttcacgagtgttagtgctatacctccaatgagggatgttcattccagtgatgtaatttccttctcaaaagttgatatcataacccctgctcaaaagatgttggtgagggagttaatatgtgacattaagcgtgggggaagcctacttgttactggtccaaagcgtgctggcaccagaaatttgttggacacacggttaaaagttatcctagagagtggtcggttgaattatcttctag

SEQ ID NO: 25240 - DNA, 362 bp, Glycine max
tgttgccatcaacatttcaagacaagatgaaagaacaggaagcattgagaaggagactcaaggcaagaatagagtatgcaaggttccttcaggatacagtcaaagaaatggcaaaagaagttcagaactcccgcagtggagaactaaagaaaacagctgaagatcttgatgaatttttaaacacgattagaagaggtgcaactgtctccaatgtggaaattttgggctttgctaagttgtttaatgatgaacttactctagataatataagcaggccacgattactcaatatgtgccagtacatgggaatcagcccttttggcactgatgcatacttgcgttatatgctaagaaaacattta

SEQ ID NO: 25241 - DNA, 646 bp, Glycine max
ctcttattaaaatgataggatgttgtaataagagcgcgggccgctatgtgagtgcatgttttaacattgatgatgtgtaaacagcggcttatatgtcgccggaatatgcaatgcatggaccatcttcagaaaagtcagatgtttttagttttggagttatagttttggagataattagtgcaaaaaggaatactcgttctgttttttcggatcatgatgacctcttgagttatacttgggaacaatggatggatgaagcaccattaaacatatttgaccaaagtattaaggcggagttttgtgatcacagtgaagttgttaaatgcatccaaattggtttattatgtgtacaagagaagccagatgacagacctaaaataacacaagttatttcatatctcaatagctctataacagagttgccacttcctaaaaaaccgataagacaaagtggaatagttcaaaagattgcagtaggggaatcgagttcaggttcaacaccatctatcaatgaaatgtccgtgagtatatttattccccggtagtatttctagtcttgtatataaataaatcacatatcctgtatacattgagttaaaatctccattaagatgatattgtgttgatcttaaaaaaaaaaaaataa

SEQ ID NO: 25242 - DNA, 428 bp, Glycine max
ctcttattaaaatgataggatgttgtaataagagcgtgaaaggttaccttctatcttttatttcttaaactgaatgttaacttctatctaacaaatgaagaaataaaagatagaaggtaacctttcacgctcttattaaaatgataggatgttgtaatatatatttagttcactatgtgtatgcattttctaacattgatattttgtaaacagcggttatatgtcgccggaatatgcaatgcatggacaattttcagtaaagtcagatgtttttagttttggagttatagttttggagataattagtgcaaaaaggaatactcgttctgttttttcggatcatgatgacctcttgagttatacttgggaacaatggatggatgaagcaccattaaacatatttgaccaaagtattaaggcggagtttt

SEQ ID NO: 25243 - DNA, 317 bp, Glycine max
aattattcaatttgaaactactattgtgtggatatcatagattgcaaatcaaatactaatagctaggcaccattctcgtagcagaagtcctctatcgagatggcttctaaagtggaagtgaggttccacttgggcatgaagcttctaattgcatccaatatttacattgaaatagggcaattgcttagtgcacttcccgaattgcttcccataattcctgcgcctcccaccggaagcaataaggaaagtgcatgaagcaattccagaaatgaaaaacacccttgaattagataaaaggtcaacacaggctctgcctg

SEQ ID NO: 25244 - DNA, 1238 bp, Glycine max
tcgcccacgcgtccgagaaaatctgaagaaaaggaaaggggaaaaagatgaaaatgctctgataatctcttagtcttgccaggctagtaaagtctcaatcatttcccagtttttaatttcaaatgttttctcccaaaacataaggatttctagtctctgattttctgactgatgagttgctgttgaaatatcaagaggttgctgtgaagaaatttttggatcaggatttttcaggcgctgcattatcagaattcaaaagagaagtgcggataatgcgtaggctacgtcatccaaatattgctctttttatgggtgctgctactcgtcctcccaatctgtcaatcatttcagagtatctaccaagaggaagcttgtaccgaattcttcatcgccctaattgtcagattgatgagaaacgaagaataaaaatggctctggatgtggctaggggcatgaattgcttacacaccagcacacctacaattgttcatcgagatctaaagtctccaaatcttttggttgataagaactggaatgttaaggtatgtgatttcgggttgtcacggttgaagcacaacacttttttgtcatccaagtcaactgctggaacgccggaatggatggctcctgaagttctccgcaatgagccctcaaatgagaaatgcgatgtttatagttttggagtcatcttatgggagcttgccactctaaggttgccgtggagtgaaatgaatactatgcaagttgttggtgccgttggtttccaaaaccgtagacttgatattccgaaggaagtcgatcctatagttgcaagaataatctgggagtgttggcaacaggatccaaatttgcggccctcgtttgcgcaactcacagtggctctaaagcctctgcagcgtctggttatcccatctcatcatgaccaggtagctccacatatgccgcaggagatttctgtaaattcaaccccctgaaatgtctcgcttcaagtgtgaataattaggcattttgcatagttatgtgcgtataagctataaaggtaacaagaacacaataaaaggggaaataaatatatcaaagcttgtaacggaaaatgtttgtgttgaggaaaatatcaactgctgcaaccaaacaactgcagagccattttgtatttgtgatgatagcttgtccgaggaaccaaaactcggtaatgtgtaaattactgttcttgaaagcaagaatatttatacttttgc

SEQ ID NO: 25245 - DNA, 245 bp, Glycine max
cgttgaaccggctcaggtgattggaagtgagggcctccgtcacactcacagtcagcatcgaagatcggaggcgaggcatgagttgtgtgctaactactactcttcaaaccaaacacgcatcgccacaaaaccccatcagcggcgcaatttagcatcagtccgatacgacgtcgtgtggagcacgatggagaccctgcagcacgcggaggagcttctgagggagtttctggtgttccgcggcttca

SEQ ID NO: 25246 - DNA, 684 bp, Glycine max
atgtagcagatgagcatatgaacttgtactaccaggatggtgaacagaccctttcacgaaagaatgcaatatcacgtatccgaagtaatactgcaggcagaaactatcttcttggacctaggtccatgtctaccaaaagatcaaggtcatataatggcgttaggtttaaaaatctcacagagaagaaaatcgatgctaagtttgctgctgccctcctagcattcaaggaagcacaagaggagattttaaattgtgagaaaataaaggacgatgctacatctgctcttgattccttatacgatgaaatacggcctgccattgaagagcacgagagggatagccaagacagtgtatccaccactgtagcagagaagtggatacaggcttgctgcctgaaattgaaggcggagtttgacctttactcatcaattgtcaaaaatgttgcttgcactgcgcaaagggcacctggccaaggaaaacctactgaagttgataacgaaaacgaaattaagctcttgacaggttgaaattcttatcacatttttccccatatataatctgtaatttacagtgtcacaaaatatatgggattctttttaaaaattcataaaatagataatctgtgactcgatgaaataatccttactataatttttttatttattattttgcctttttctgccc

SEQ ID NO: 25247 - DNA, 521 bp, Glycine max
tgacaataataacaagtctgtggtctcatcagacaccgcgcacgatagcaagaagggcggtggtgggtcgccgtccggcagtggtgacgcggctccgccggtgtggccgccaaagttcgtgattgccttgacaaacaaggagaaggaagaagattttctgctcttgaagggttcaaagcttccccagagacccaagaagagagccagattcatacaacgaaccctcaatctcgttagtccaggtacatggctgtgcgatcttactctggaacgatatgaagtaagggagaagaagatatccaaaaaggtaggagaaaaaaaaagaccaagagggttgaaagcaatgggcaacatggactccgactctgaatagaaagaagcgaggcaatgagtaaagttggttttttttttcttcttcttctttagtctaagggtgtgagaaatgttgagatattgtaaagcatggcaacgcataccagcgttccaagaaatcgaaatcaaatataaattggtttctctct

SEQ ID NO: 25248 - DNA, 315 bp, Glycine max
ctttgctagaacagttatctgcaagaatttggatgtggcttcaagggttgctcgttctgatggtctggactgcataacactggatggtgatcaagtaagcaagaaaggtagtatgactggaggattttatgatcacagacgatcaagattgaggtttatgaatatcattaagcagaatgcagacactattcatattagagaggaggaattggagaaagttagatttaatctacaagagatagaccaaattaataaatgaatattctttttgtatttttcatttctcttaggcaaaaactcattataaaatgcata

SEQ ID NO: 25249 - DNA, 298 bp, Glycine max
ctacatccatcgttttctcgctttgctacttgagctgagccactatcttcgcgccccattcatcggaaactccattcttctctttgtctctctattttccgttccgtttaccgatgccccttctcgatcgcggtgatgtttggaagagcaaggcgcgatccttgcagctacagttccgggaccgtttccgggtcgccgtcgaccaccattggcgccgccgacaccaccacacctttatcccctctgccgatggctacttctcctccaccattcaacgctgcctcagccgatttcgtga

SEQ ID NO: 25250 - DNA, 244 bp, Glycine max
ccctagtcaataagcggtgttggaatttctctccatagcatcgtttcctagctctacactcgcgctttgctacttgagctccccattcatcggaaactccattcttctctttctctctctatttttccgtttcgtttaccgatgccccttctcgatcgcggcgatgtttggaagagcaaggcgcgatccttgcagctacagctcagggaccgtttccgtgtcgccgtcgaccgccattggcgcc

SEQ ID NO: 25251 - DNA, 278 bp, Glycine max
gctgctccaacatctggagagtttcaggaagttgaaggggaaactgaagaaaggcgacgagccaggttggagcgccaccacaggactaaggagcgtgctgctaaagcattggcggagaagaatcagcgggacttacaaacccaaagagaacaagctgagagacataggcttgccgaaacactggattttgaaattaagcgctgggctgcaggaaaagaggggaatttacgagctttgctttccaccttacaatatgtactgtggcctgaatgtggttg

SEQ ID NO: 25252 - DNA, 278 bp, Glycine max
tcaatatttagtattttattttactcactagaacagatttagaaccatacagggagaggccagaccccacgtacggttattatggcgatgaaactcaggtatctgtcttccattgccgaggatgtcatcaagagatgttcacagaaactggacacttcggtagagaaattggtggtggattttgaaggggggtggcaccctgaaatgggaaactattgcagaaaattagttgaattttgcagtgggaaggctgtgagtgaattgtgccacaacataga

SEQ ID NO: 25253 - DNA, 324 bp, Glycine max
aagctccctatttagttcctcccatcccagatgtcataagggcatttttgaggaaaaaggaaaagaggagctgcaaaactcaactcgccacgacaagcagagccaccaccacaatgagaaaaggatagagatcaagtaaaagagtgtgaagactccccacgacaaatctacacctcgccataacaaatcctcattctgagaccaagaacatgagcaaaaactcaacaacgagtgaaaattttgccatatcgagactaggtgcagagagcatgaagattctagagaagaaggcttttgcaagagatgaagaattactgcaaagaa

SEQ ID NO: 25254 - DNA, 384 bp, Glycine max
tttcaatttctctctggaccaaaccctcgaatagttcgatttcaaaatccatggcgagaccttccaagctacactcatcttcgcgacgaagcgctctccaatgcttcgagttcctccgatgaagaggagcaagtcaacgagcagatcaacgaagaggaagacgaggaggagctcgaggcggtggcgcgccctgccagttctgctgacgacgacgacgaagtcgccggcgacaatccgccggactccgatgaagatccagccgccgatgacgctgacgatgaccaggatggggataatgttgatcccgaaattagcaagcgagagaaggcgagattaaaagaaatgcagaaaatgaagaaacagaagattcacgagatactggat

SEQ ID NO: 25255 - DNA, 302 bp, Glycine max
atggacttctcacgacaagaaaatatagatgatccagaggacgaggaagaatacaagaatgtgcgtagagctgtgaaggagtaccgagggacaatgaatgaatattataaagcagcagttgattcatttgcaaagggggatcaaatgaaagcagaaaaactgttagaacaggggcaattttttctaagaaaggctcacgatgctgatgaagaatctaacaaaatgattcttgaaaccagaaatactgaagcacaagaaatggtgcttgacttgcgtgaccatggttcaaaagaggctatacg

SEQ ID NO: 25256 - DNA, 391 bp, Glycine max
tagagtaatttttgaatgcttgagtctacaggaagagatataattttatcttgtgtctgtttgtaaatatgttcagttaatcgcctgtgtatgtaaatgtcaatagtgtgtcttgtgtaaagaaatattgtgtagtctctccaaataatcatatacagggttgatttgggtgttagacttcgcccccgccctttgtttagtagtgtctaaggaaataccattctcttttttgtaagtagaggtctttagaggatggaggatgtttcattttgattttcttttatgattggtccttgaattgtaactagtagcggcttaagaagcatttaatctgtacccaaaggaatggtttgtgtgggaattaaaagttcaaaggtcttcttttgaaaaa

SEQ ID NO: 25257 - DNA, 292 bp, Glycine max
atcctatttgcttcggctttgtggtgtgcgtgcgaacaagcagcaagcttccttcttccgatgcacttgacgttttgctgaattgcacccactctcttacctgagctgacctgagctcccatgcctttgtttgagataacaaatgcgcaactatccttccgatattctctgactctgaggagcccaatcccaatgccatatcatgctaaaggaggaccttcttggatttcattccacacccttaaaaacctaaacttgaatgtcattaaggctgttgcagccactttggatg

SEQ ID NO: 25258 - DNA, 421 bp, Glycine max
acgggactttttttttctttttccagagggatttttagtgcaagtgtgatgtctgtcttcccttgaaaaattgtcttgtgtggaaacaaacttcggaaagagaaagaaagaaagaaagaaagccactttttattcttattttttctctctctctcactaatatatctgattttctctctcacttcttctgttctatgtaatgggtgttagatgtgcttagtttcagagtgtgcaacacaacaccagcaacatgtctcagaaagagaagggtccgggtatcaggctatttggaaggaagattccggtgccggaatgtcagattccggcaaactctggacccacggatacttgctgcagcatagcgaaaacaggactcaaaatacctagtgaatgtggagaaaactctgagcaacaagaaaat

SEQ ID NO: 25259 - DNA, 846 bp, Glycine max
ctctcttcttacttcccttctctctctgtctctaaaaaccctttttttctctctctttcacacacaccaaccagtctcgatcagtggtggcagatagagagagacatgatgtcaacttccggcgccggcaggtacatggcttttccgccgtctccgtccgcgcctccgtcgccgcacctctccggtcttcgctccactcccctctccgacccggacaaatatctagctgagttgttgggagaacgtaacaagcttagtcccttcatggcggtccttccccactgctttcgattgttaaaccaagaaattttgcgtgtaaccacgctgatggggaatgcatcagttttaggtcaaagtgggcttgaacatgctagccccctggctaccggtggaatattttcaaatggaggtgccgatgtgaacggatgggcatcacgatttcaatcagaaagacctagcttgttacagtcctcttcaacacaaagctggctgagtccacaaggtagctcatctggtattattgttaaaaagacggtcagagtagatattcctgtggacgcatatcctaattttaactttgttggtcgcctcctaggccctagaggaaattctctaaagcgtgtagaagcaagtaccgagtgtcgtgtcttgatcaggggccgaggtagcattaaggatccagctagggaggaaatgatgagaggaaaacctgggtatgagcatctgttggaacctctccacattctagttgaggcagaattaccagttgaaatagtagatgctcgcctgatgcaggcacgtgaaatacttgaagatttgctcaaaccggtggatgaatctcaggat

SEQ ID NO: 25260 - DNA, 409 bp, Glycine max
tgtactacttctatggaggttgctgatgtttgtagctaaatgcataggtatccctatcccagccaccatagaagtagctctaatttatgcttttgcctctcatctgatctgtttataattctgctccgctcccaattgatgcttatattattacttaagttgatcctgaagagtatcccaatctattggaatcctttagcaagagaagaaccagcccaataaaaggcggaggaagatggatgtaatatgatttatgagagtgattggcgaagggggaattagtgtttttcttctttgtttttcctttcctgcagtttcatagaaagtcagtcctcgcccacaaggcttggtacatgtagcggtaacttttctttcatattcaccgaaatcataggcatagtatggtgtt

SEQ ID NO: 25261 - DNA, 248 bp, Glycine max
ttccacattaccgagaaaagggctaaagttcatctggaattgggtgcagcattttacgactggaattttgatcaggtaggtgaagacgggaagctattgtggacagaagaagaagagaaaaaattcgaggatgcgatacgatcaaaccctccatcacctgagacatatttctgggaccatatctttagggcatttcctacaaagagcagggcagatttagttagttactacttcaatgtctttatttg

SEQ ID NO: 25262 - DNA, 239 bp, Glycine max
atttgagagagagtcagaattggagagcatgtggtgggggtggtggtggtggtggtaggaggagggaagcgatggataatgttctcaagcccattcgtgttaaccttgtctctcttgatatccctaccaatcctgttcttggtggccccacgcatcctccctcctcctcctcctcctcagtccttccacatctccccctccgtcgaagtcgatgacatcaagctcttcaaccgcgccat

SEQ ID NO: 25263 - DNA, 733 bp, Glycine max
  unsure (1)..(733): unsure at all n locations
tttcttgtagcaaggcccaagggagagctgcgcaatgtctttataaaaagctatncagagacaacctgtttaaagagatgttgcgagaaccagatgagatagccttaaaaagaaagcgctgtcgagactttctcccgagcgtatcagcaggcttttaaggacttggaggagctgcctctggaagctgacacagttgaaagaggatatggtttgcctgaaaaaactggtttacctaaaattaatggattaccaacgtcatccatgtactctgcaagcagttcaggagactattatgcagctttttcgaagtaccctaagtcgaaaaagtcctcccattctggggagcttcaatcaccattgcatgctgatgcagattccaatggaagtggaaggccattgtatatataaaattgagtctgtcccttgggtagtaaggcttttatttgggaagctaggaataacaaatttaataacatgtttagaaattagtgaagagcctaatttatgatgattttgaggagttaatgaagttgtgcaaacaaaagtcccagtattttctttgggatcttttgtttcttgaaaaatgtcctcaatccttcattcacatccatcaccaatttttgtccccctttgaacataaacgtgaattttaaactaaaattttgtattttttattaacataccccaattccaaatttaagttnnnnnnnnnnnnnnnnnnnnnnnnnnnnnn

SEQ ID NO: 25264 - DNA, 279 bp, Glycine max
gtgaagaaaccagagacaatcacatgatccctaacctaaacccctgagaaattattgaaattgatgcatggcggaactgaacactctggtggtgcgaaagccatgttttggccttccaaccggttgcactcaatccctctctgcctacatttatctcaaattcgcccaaattcccttccaattggacttccacctcaacaaccctcattctaatcaaattccttactttgaggttggtgactctgtggcttataataatgagaaggaggggatcattga

SEQ ID NO: 25265 - DNA, 572 bp, Glycine max
taattcttctcttctctttctatccccgttttctctttctctttcttcaaatccctagcccccttttgttgtataaatacttaaccagaagagctctaacacaagaaaagctagagagagagagagaaagtggagcgagaaaaatactgaaaccctccctcgccattcttgttctgctccgtccctctcgatctgcgtcagggattctctggcaggtattgttgatctgttcggttctagatcttttcgtgcggcttttgttgacggcaccgtcatgtcttccctcagcagagagcttgtttttctcatacttcagtttctcgatgaagagaaatttaaggagactgttcacaagttggagcaagaatcgggatttttctttaacatgaggtattttgaggatatggtgacgaatggggagtgggatgagggggaacaagtacttgtctggttctacgaaggtggatgacaatagatactccatgaagatcttctttgagatacggaagcagaaatacttagaagcattggacaagcaagatcgagctaaagcggtggatattttagtgaag

SEQ ID NO: 25266 - DNA, 268 bp, Glycine max
ctagaactagttctgagtctaaaagacatactaaactgatgttctgattcaaacatattgaaatgcatgcatcaaataattattgcgggctgagatggtttaattttattagttttatttaaggctctcttgatatacaggattcattaatgtcagtattaagaatggtgctggaaccctatccggcagcaacaccacatcctggaaatcatgatgactctgttctttacagtgtaacctatggaaaagcaatgctgcatcaatgtgg

SEQ ID NO: 25267 - DNA, 426 bp, Glycine max
tgttacgcgtccggcagagctgagcagtttgatttgccaattcaaagctcatcttcctgctcttactagaaccttccaaatcaatttcctctaattagggtttatctagggtttaattactcatcccaattcccaaaaccataatcctactttctccttctcaatacccaaatgctttgctcccatggcgtcaccctcattaatcgccttgctcgtcgatctttctgtcacgccaacgattctgtttatcaagcacttttccaaaggggttataggacattgaactctgggccttgcaatccatctagagttgttggtagctttgcatccaatgctggagatggcgttaatttgaagaaatggttgctgttgggagcggcaaataaatattggggaccgtctagatcaattcatggctcggcatca

SEQ ID NO: 25268 - DNA, 243 bp, Glycine max
ggtgagggacatgaaccacacactcagagagttccatcaacgtaagaacacattcaaagcccatcttcctgctcttactagaaccttcccaatcaatttcctctaattagggtttatctattgtctaattactcatcccaattccccaaaccccaatcctagtttctccttctcaatacccaaatggttcgctcccatggcgtcaccctcattaatcgccttgctcgtcgatctatctgtcac

SEQ ID NO: 25269 - DNA, 412 bp, Glycine max
  unsure (1)..(412): unsure at all n locations
gttctataaccagccgtttgaggtgtcggttgagggtcggaggagaacggtgtacttggaagaagcggagacaccgcggaggccacgtgagcagatagttcctgggatattcagccgcgttcgttctcgttttctggatagtttcgatgcagcaccgccgcctccaccgcctaatgctaaggggggaggtgaatatccgaaggagagaagcgatgggtggatggaggtggaattgggtgacttcttcaacgtcggcggagagaaggagaaggagaaggaggtggagattggagtctacgaggtcaagagtggtgggtggaaagcgggcattctcgttcaaagaatcgaaataaggcccagacacaanaattaaaaagcatgcacaatgtacaatgttgtttcttctcttttt

SEQ ID NO: 25270 - DNA, 682 bp, Glycine max
tattttttgtgtttgacagcctggcattgttcatctctctggcagttgtggtggttcaaacctctgtcgttgtgattgagcaaaaggcaaagaagcagctcgtttttgtcattaacaagctcatgtggatggcttgccttttcatttccattgccttcatttctcttacatacgtggtggtgggatcacactccagatggcttgcaatatatgctactgtgattggaagcttgataatgctctctacaattggctccatgtgctattgtgtaattttgcacaggatggaggagacaaaattgagagccgagagtcgatcgttctccatgtctcatgcatcagaccaagagattttgaacagtgaatacaagagaatgtacgcactgtagtctgtagggtagttgatatatctgaatggaatggcttgtatctctcctcatattcttgaagtgataataggtagtttctactatcagtatcagattttaccaagacaagctgtctatgttagactacaggtaccgtgagaaaagagggaaaagaagaaaatgggtggggaattctcgtcacatccactcgtaattataaatgatgtcaaatttagcatcatgtcagtgaaatgattgtggtgttgaagaatgaagacttatatccatttgtatttactctagtattctattat

SEQ ID NO: 25271 - DNA, 292 bp, Glycine max
aaacttgagttggaggaggataacagccgttgatttgaaacacaataacgataaatgaaaatgattgcgggagagagagtgagagtgagaaaagagatattatagaagagaagagaaaagaagaagagagtaatggcagtagtagcagtgtctcattcatcagcaccacccactttcaacttgaacaagtctcccaaattccctccctccccaatctctgctacctttccaatccctaactccgccacttccacttccagaattttctgccgcgtcaccaattctcgcaccg

SEQ ID NO: 25272 - DNA, 300 bp, Glycine max
cgaagacaaacacaacaatcgagcttgcaacttcacccaagtctcaaacaaccttttaaacctcatcaaacatgtctctgattccatcattgctaagcaacagaaacatcatggaccccttctccaccaacatctgggcaccctctgactccgacagcgaggtttccgccttcgtgaacgcacgtgtggactggaaggaaaccccggagtcgcacgtgttcaaggcggacttgccggggctgaagaaggaggaggtgaaggtggaggtggaggaagggcgcgtgttgaacatcagcggag

SEQ ID NO: 25273 - DNA, 332 bp, Glycine max
atctctctctctcttcattcttgaggtcttctttcattttataccattcttcttatttctttttaccaatcactacttattcaatccaaggatggcttccgccggcgatcttttcaggcatggtttgccggaagttggtggtgccgggaagttacacgtgcttgctgttgatgacagccacgtggaccgcaaggtgatcgagcggttgctcaaaatctcgtcttgcaaagtgacggtggtggaaagtggtagcagggctctacagtatctggggttggatggagaaaaaagctccattggttttgatagtgtggatgttaatttgacaatga

SEQ ID NO: 25274 - DNA, 247 bp, Glycine max
gcgagccattcaagatgcatcggtcatcattggcgcccatggtgccggtcttactcatatagtatctgctttgcctaaaactgtgattctggagatcattagcagctatttcagacgaccccattttgcatatatttcgcggtggaaagggttagagtatcatgcaatcaaccttgctggatcacatgcggatactggaaccgtgatcaaagaactggttgacataatgaaaagccttggatgttga

SEQ ID NO: 25275 - DNA, 301 bp, Glycine max
ctcgagttatgccggaaatcaatttttgctacggcgtgcggtggtcggagagtagaaagaaagaacaagaataagggtttcaggtcttgtattctcccaaattggattcaaatatgagtgtaaaagggcacaaaatcaacacaagacaacccagactatgaggtaaccatttctcaaaggtttttctccggtcgccgccgcaccgccgcgccgttaagacgaagagtagaagacgggaataagaaggttttacagagttcccttcccttcaaagcctttcttcgacccatattcactcttt

SEQ ID NO: 25276 - DNA, 457 bp, Glycine max
cacactgttgctgctgtagctgattgtttttgcctggctaaagatgctggtttcaaggttgttgctcatatgatgcctgatcttccaaatgttggtgttgaaagggacatggaaagtttccgggagttttttgagagtcccttgtttagagcagatgggcttaaaatatatcctacacttgtaattcgtggaactgggctttatgagctctggaaaactggcaggtatagaaactatccacctgagcaacttgtggacattatagcaaggatccttgcaatggtacccccatggacacgtgtttatagagttcagcgggatattcccatgcctctggttacctctggggttgagaaaggaaatctgcgggagctggcattagctcgaatggatgacctgggattgaaatgtcgtgatgttcggaccagagaagctggaatccaggatattcaccacc

SEQ ID NO: 25277 - DNA, 668 bp, Glycine max
gcaaaatgcggagtgcgaaacctaactaaaacagaagaaatggcggagaagtcgggagcagcagaagagagctctaatccgatggcttttcaccatacgacgacgaagcttgtcgttttggcagaccttaacgtcgaagccgaagccgaagccgaagaagacgattcttctctcgtccctcctccactaattaccattttggcaaatgacgaaaacagtcaagataaaagttcgttgtccaaagacactgatagcattgaagctgaaagtaaaaagttgaacaaactgagcaaatcccgctcaagaaagacagattcttctcttgattttgtagctgatgtggatggtgatcaacatgttcaagggcctccttcatctcgggaggaaaaagttagcagtgtgaagactggcttggttcatgttgcaaggaagatgcccaaaaatgctcacgctcattttatactcggcttgatgtaccaaagattaagccaacctcaaaaggctgtgttagcatatgagaaggcagaagagatcttgctgaggcctgaggctgagattgacaggcctgaattgctttctttagttcagattcaccatgcacagtgcctgatactagaaagttcatctgaaaatagttcagataaagaacttgaacctgatgaacttga

SEQ ID NO: 25278 - DNA, 348 bp, Glycine max
ctcgagcgctggttttgtatgcaactcatatattgggcaggcaccatattccatggatattgtgaggatatttaacttaagtgatgaaatctgcaagagaattgttcggccccccatttctgacttgttatcacaaaaagaatcacctgaacaaactctgcaacctgatgatgcgtgcaatgtggaaagccagtcaaatgatcaaatatctgcatcgaccagcatggaggatatctctcattcatcggaaaatggaatttctgatcttggggctgagaatactgcacctgctaaagaagtttggaaagctccaaaggccggagaaagggcgcaaaaagaaatcattga

SEQ ID NO: 25279 - DNA, 880 bp, Glycine max
ctttcagatcaattctaggaaactcctacaatattatgacatcataccaaggcgtgttctagctacaaaaggatacgacaagtgcgatgaaaagggaaaagttgcttttgtttcagcatatgggattcaccagctccatatattcatctttgtgctggccatttttcatattctacaatgcattgtaacactggctttgggaagaactaagatgagaaagtggagagcatgggaaaatgaaaccaagactattgaatatcaattttataacgatcctgagaggttcaggtttgcaagggacacaacatttggaagaaggcacttgaactcttggagccagtcaacaatttcgttatccatagttagcttcttccgacaattctttggatctgtcaacaaagttgactatttaacattacgacatggattcatcacggcgcatctggcaccgggaagtcatgcaagatttgatttccaaaagtacatcgaaagatcacttgaggaggattttaaagttgtagtggggataagcccaatcatatggttcttcgcagtgctattcctgctgactaatacacatgggtggtattcctattattggcttccattcatcccattagttataatcttattagtgggtgctaagttacaaatgatcataacaaagatgggactgaggattacagacagaggagaagttgtcaaaggtgcacctgtggttgagccaggcgatgatctgttctggttcaaccgtcctcgcctccttctctttttgattcatcttgttctggttcagaatgcttttcaactcgcatttttctcttggagtacttatgaattctccgtaaagtcttgcttccacgaaacaaccgaagacaat

SEQ ID NO: 25280 - DNA, 548 bp, Glycine max
gatcctcgaagaatgggagctcttgtttcatcccaagatgctcctggtgggccttctgggtcagaggagaacaaccccggtttggagaagcagcaaatgcaacattatgcccatccaatgatgcctcctccacctggccaataccatcagtattatccaccatatggttatatgccaccacctcccccttatcatcagtaccccccacctccatacaatgctgcagtggctccgtcccagccaccagccgcaaatcatccttatcagcattctatgcagccaggttcttcacagccaggatcttcccaggctgcatctgcgccagctgaaactggaacatcaacatcagggtcatagcagcaataagatttgcccatttactgatcatatttctagttatgtttaattattgtcctaagcttttccccttgagctgaccgtgctgacagggaagatattttcacccaagctgtctatttactatctctgctagcttgatattgatcgccttgtcttgaacaagttattttatgatttgattttgtgct

SEQ ID NO: 25281 - DNA, 513 bp, Glycine max
ggctcgagaagatactgttccggcataggtttcctctagggttccatagacccagcaagaagcattcaaagtgtgttctgttttcttagcttaatcaattcatttcttatcccccctcgtgcccaaagcttctccgatattccagtggtggtttttccgatattgtcgtttaactgttttcccaagatcttcagaaacacatccaaagcggttatatcggcgatttgtgatgtggccttggagctgagataagagatggtcctaccaaagagaggaatgttcggtcaccgacatcctaagacaacaacgagtatgccaatcggaaggattgaggtgacttcctgaacatgctcagagcagaagtgccagagcataataatctgaatttttcttgcagcaattatttgatacttgctgtgcttctccattttctgccatgtcaaatgcctcaaaaagtttcgttgcatctgataaatatgaaagagtaggacctgattactttggctattactc

SEQ ID NO: 25282 - DNA, 590 bp, Glycine max
tgtattcagtgcttgttctctagccttgtgttgctcaacttcatgaagtaatgatctcatcacggactgaaagcttctattttcttcattaaggtgttcaatttctcttttctgattcatgccattttctgatagttcaagaatctgcctgtctaggttttctctggtcaatcttgattcttttttatccatcttcatctcctcaatatatctacaaaactccccattcaatttctctgcagccttcagccttgtctccgtttctagcagctctatgtctttcttcttgagaagattctctgaattttcaacttgatgacttaaacgacaatttgcatttttgatttcccgcagctctttatccatcctcttagtagcctcattcagataaacactctcttcttctttcagctcaaacttcttccttaacacaccaagttcctgattgaggtcactgtttaaacggctaagattgctgctgagatgttcagaaagagctttttgttcgatgactttctgggtgagaaagctctcataaaccaagttgaggttgcttagagccagtacctcatggagtattacactgatat

SEQ ID NO: 25283 - DNA, 416 bp, Glycine max
aattggcgttggcttaggagccagcgagagagagagagagagagacagattcaccggtgaccggtcggtgttgttgattgaattcacctgacgttcaacgcatctctgtcaatgtctccagtttggagaatcattccgtttattcggtgaattataagatagagtggaagcaaaggcttctttcttccttttggtggcggtggcggtggcgatggcggaaggggaagagcttcggcctgacttgctgaaaaacacgccttctaacattgcgagattggaggacgtgatcgaacactctaaagcaaggcaaaagtatctcgcccatacttctagctcctctgatggcggtgatgttcgctggtacttttgtaagatctctttggctcccaacgagttggcagcctctgtcccgccaa

SEQ ID NO: 25284 - DNA, 526 bp, Glycine max
tttacgcgtccgcccacgcgtccgcccacgcgtgcgcccacgcgtccgtgataaatgcacttcaactagcacaagcaaaacaattgatgatgttcaagagagacggagagggaaaagggaacgtaaaccgaaagttcactttgatgaggtaacatacccaatgaagtctgaaacaaaggttcgtcggttgaagataatgcggtacctcggccttgctcctccagttggttctcccttttgagttttgaccatgatcacgagtaatgcatatttcaaatgtttgcagctttacagctgtagtcgattctccctttctttaaccataataatcatgaaatatgcatatttctaaaaattgcttctacttcttgccactagctctgtaaaattttgtaggattatatagtctcaaatagtattacattactatctgtaaaatccatataagaatttcatggaatatcagattagttctccaataaaagttccatttagcacaaaaaaaaaaaaaaaaggggcggccgcc

SEQ ID NO: 25285 - DNA, 368 bp, Glycine max
gagatatggctggggctattatgcaacaacacaaggagctaattataaatgaacgttgtcttggtctagatcatcctgacactgctcacaggtatggaaatatggctctgttctaccatggccttaaccagacagaacttgcacttcgccatatgtcccgtgctttgctattattaagtttgtcatcggggccagatcatcctgatgttgcagcaacatttatcaatgttgcaatgatgtatcaggatataggaaagatgaacacagctcttcgttatctacaagtagctttaaagaagaatgaaaggcttcttggagaggaacatattcaaactgctgtttgttatcatgctcttgctattgcattt

SEQ ID NO: 25286 - DNA, 582 bp, Glycine max
ttgcaaaggtattgggaagcactggagattattaatctctctctaagattggcccatacatctctgtctactgaaaagaaagaggagcttcgatctcttggagctcaaatggcatacaacaccacggatcctaaacatgggtttgattgtgtaaaatacattgttcagcaacatccacacggtgttgctgcttggaattgctactacaaggttatctcaagattggaaaaccgagatacaagacattacaaatttgtacgtggtatgcaaggaaagtttgtggattgtgtgcctcctatcctcatttctggacatcagtttaccatatgtagccatcatcaagacgcagcaaggaaataccttgaagcttataaactattgccagagaatcctttggttaatctttgtgttggaacagccttgatcaacttagcattgggtttcagacttcaaaataagcatcaatgtgttgtacaaggtttagcattcctctacaataatatgagaatctgcgagaacagccaggaatccttgtacaacatagctcgggcattccatcatgttggacttgtaactctggcg

SEQ ID NO: 25287 - DNA, 344 bp, Glycine max
caaaaaattgcctcctggttccatgggttggccttatctaggagagaccctcaagctctacactcaaaacccaaattccttcttctctaaccgacaaaaacggtatggagatatattcaagacaaacatattggggtgtccttgtgtgatgatatcaagccctgaggccgctagaattgtgcttgtgactcaagcacatctcttcaagccaacataccctccaagcaaagagaagttgatagggccagaggctgtgttctttcaacaaggtgcctatcactccatgctcaagaggttggttcaagcctcttttttaccctccacaattaagcactcagtctctg

SEQ ID NO: 25288 - DNA, 361 bp, Glycine max
atttaaaggccggcgagtagtcactttccacaaccagagagacttcatattcttccggcatcatcggtatatttttgaaaccaaagaagttaaaaaagcagagtccaaaggtaaaaaggacaaagatggcgagagtgagaatgttcctgaacagaaaacaattgcccgacttcaggaatgtggtcctcgtttcacattaaaattgattagcctgcagcatggaacatttgacaccaagggtggggaatatgagtgggttcacaagccggaaatggacacaagccgaaggaggttcttcctatgacttgtttgggaaggttgcattttagacatcattattatccggcgaagagggttaatt

SEQ ID NO: 25289 - DNA, 259 bp, Glycine max
gttgggtttcgattcgtgaacgaacaaaagctctcattccagaccggtgaacgactcgctcttgaaaggagaaattgtatgaatggattctcaggcaacaacaagaaggacctaaggtggccaccattgatgttgttacccatttgcaggtatggacttaaaagatgctgctgttaagggcatagtcccttgggatgggactctctcttcatttgattttacctttctgggcaaaagctcctacaaagtggaaagggtt

SEQ ID NO: 25290 - DNA, 267 bp, Glycine max
cacttcatcctaaagaaattaagctacaaagctagctagctagatatacatgggaaactgttgtgccagtgccacggaatcatcatctatggattggggtggtgatgattggggttctttttcatcatccaagagaaggaggagttcaaggaagaataaggtgtttgatgaagttcatggggagagtttagggaacgtggagaaggagaagctcttgggtgctttgagagcttcttctgatgccaatgggaaagtgaagataaagat

SEQ ID NO: 25291 - DNA, 449 bp, Glycine max
taaaaaatcaaaaagctttcgccgccatcaaagtttctccctctgtgcacggtgcgtgagaatgcgtggtggtggcggcggcggcggcgaagtcgaagtgaaaagggtgtttattggagcgggatgcaacagaatagtcaacaacgtttcatggggtgcttctggtttgctctcttttggagctcacaacgccgttgctattttctgccccaagagtgctcaaattttgactactctcccgggtcacaaggcagttgtgaattgcacccactggcttccatctagcaagtttctatttaaagcaaaactattggagcagcactatttgctatctggagatgcagatggtgctatgattttgtgggaactgtcccttgctgatgggaagtggaggcaaatgttacagctgccacaatcacacaagaacggtgttacatgcattagtggaa

SEQ ID NO: 25292 - DNA, 447 bp, Glycine max
cccacgcgtccgttaataaccggtcatagaatggaaccaccttgtttttcccgacctaggtagcgcttttttgaagtcggagaagaaacgttgatgctgttgcgtaaccctgcgttgacagcgtcgctgctatcagccaccacaaagaagctctacaaccaccgttattctacacctgctgcattcatggcgtcttcaggtgtcgcgtgcagtttgctggttttgtgtggcaaatcactggcagagaatgaaactgctaaagctataaagaccaataacacactgaagctccctgaggatgaaaaactctcactcgttttgcattcggagatggataaatcagttatgcaagggtttttccaagttcattcctatatggattctctttccaccaatcaatttggcaggcttctcgtttggtctccagacttaacttcaacacacgat

SEQ ID NO: 25293 - DNA, 482 bp, Glycine max
attacacctgacactcagcaattgttcttgaatgaactgacaaaatataatcttggagaagactgccctgtatttgacaacttatttgaattttgtcagatttatgctggtggaactatagatgctgcacgtcgattaaacaatcaactgtgtgatattgctatcaactgggccggtggactacatcatgccaagaaatgcgaggcatctggattttgttacatcaatgacttggttttaggaatcttggagcttcttaaatatcatgctcgtgttttgtatattgatatagatgtgcaccatggtgatggtgtagaagaagccttctacttcactgacagggtgatgactgtcagttttcacaagtacggagatttgttcttcccatgtactggcgatgctaaggagaaagagaaggaaagttttatgccataaatgtcccattgaaggatggaatagatgacagtagcttcactcgactt

SEQ ID NO: 25294 - DNA, 301 bp, Glycine max
gactagtgctactgtagatcctgttcatgtcaggaaaacatcttcaagtggctcccaacagactgataaagatccatcttcaccttttacttctgcatcaccagttccagctgtgtccaaaactgagatccaaaagacttcaactgcaagattaactgaaagatctgtggcacaagtgcctatgatgtcaagaccttcaagtgctcctttagttcctggtcccaggccaactgctccggttgtctctatggttcaaacttctcccctacttgcacactcagtgagtgcaactcggttgggt

SEQ ID NO: 25295 - DNA, 269 bp, Glycine max
cttcaccaacaaaaaaagtagcccaaaaccgcaactcaccgcttcgacacgtttcttcgatcattatccacattcctcttctcctcataggatggaacagcaggatatggctgatacaaccacccttagttattggttaaattggaggttctatctgtgtgcagtttgtgttttgctgtctattgtcctttcatttcttgtaatatggaaggataagggttcaaggaaattcagatctggaaaaggagaaaatcaggaagatgggactt

SEQ ID NO: 25296 - DNA, 756 bp, Glycine max
agcttctcctggggccctgatggaaagatctccatcatcaacaagcattgagcgcaggtatgtgaatagaagtagtgttaagcggaatcttgaaattgacgaaagtagaaggaggaacagtactaatgtaagagatttctctgcttctgatgatagacttggcagggagtctactctagagaaaccgctcttggatgagccctctcaagcagattcatctttatatggtaggactaatcagagcaatgcaccattgatttcacccccacctggtttcagggctaccttagatagaccttatatgggttctttagaggatgatgttagagataactctaattcacgatacagaagaagtagtgaacctggatttggaagaggacatggtggcaattcctggagggcagttccaaactggaattcaccagtaccaaatggatttgttcccttcccccctgggccagctcatggaggttttcaaacaatggtgccgcagtttacatctcaatctctctttggtgttaggcctcctatggaagttaaccacgctggcattccttatcatattgctgatgctgacagatttccaggtcatttgcgcccacttgggtggcaaaatttgatggatggtacaggaactgctcatttgcatggatgggataacaataatggtgtcttcagagatgatcctcacatgtatggcggttctgattgggataggaacaggcattccactaatagtcatggatgggaatc

SEQ ID NO: 25297 - DNA, 306 bp, Glycine max
agaacctccacctcaacctcaaactctccgaaccaggaccactctgttcagcatttggtgttgtctggtggaaaagatgatttgtgtgctctcgctgttttcgaggacagtgtcaagaagctcaagagtcctaggaacttgtcgcatgttgctcctcctgagttgaccaaggaccaggttaactctgctgttgaattgctggcagattggttctacgagtcttgtggctctgtgcctctctctgctcttgaacacccaaagtttcaatcttttctcacccagctgggtttgccggtgactctgtta

SEQ ID NO: 25298 - DNA, 515 bp, Glycine max
gcatccccatcaatcagccggtgcactgaagttgagaaattctcttcagacattcgactgaagccaaatgaagcctacattttcgagcaaatgaagtcccaagatggatttatgcagaatacttttgggaccttggatgacataatgggtgtaatggtcaaaagggagcaaaatgagtcgacattgttggatggagaaatgggatttgatgcctaccctgttggatcatgcaactgatttcttcttaaccagaacgaatccaggagcaataaaatcgtgaaacttgctccagtctctgaaaccgattaatgtacacctatttttatgttctgctactaaatttattttcttggccaacattttgttgtttcacttatggacttttgttagccatctgatctgttccatctttttttcctttcaatctgtagtgtatccccataaaaattgcctttggtttagataaaataattgtaatatgaaaatttctaggtgctcaaaaaaaaaaacaaaaa

SEQ ID NO: 25299 - DNA, 1067 bp, Glycine max
agctgacaccttgaatatgaaccttgattacgctggacgcgtggccaaaactgtaaccgttaaggatccggtttcgggtttggtttacactaacctgtttgaccaaatggtggacgcggtttattttgcgatgaagagattaggttttccgggtgttcggatctttatcgcggaaacgggttggcccaatggaggcgacttggaccagattggagcaaatacttacaacgctgccacttacaaccgaaacttcataaagaaagtcactaaaaaaccgcgggtggggacaccggctcgaccgggttcggctcttccgtcttttttattcgccctcttcaatgagaatcagaaaccgggtccgagtacggagcggcatttcgggttgttgcacccgaacgggtcgagggtttacgacgtggatttgtccggggaaacgccggaggcggagttccggccgcttccggtgccggagaataatgaaaagtttaaggggaggatatggtgcgtggcggcgcgccgggataacgcgacggcgctgacggcggcgcttgcgtacgcgtgctcgcaggggaatggcacgtgcgacccgatccaatcgaaggggaagtgttttaaacccgattcggttttctggcacgcgagctatgcgtttagtgcttattgggcgcagtttaggaaggttggcggaacttgttacttcaatgggcttgcaactcaaaccgcaaaggatccaagttatggatcctgcaagttccctagcgtgacactttgaagaaggaggaatcaaacaaaccaagcaaaatagagctttcgttacgcgatcatataatgattatttaatttcactatgtcgacattgggaattttgaattagggggatcgtttttactgtaggggatagtgtttctttcatttcatgaacgtatgttcctcctatagatagagcatccgaacccactaagaaggaacatacattggtgaatgattttgaatactccaaccaccggatcgccattatttaacaccatgttggtagaataagtgatgaggtgcaatgttttctgctt

SEQ ID NO: 25300 - DNA, 256 bp, Glycine max
tcggctcgagattcaattggctctggttatatttaatagagccataaacatctgttagataatcaatattcaataaatgcttgacagctccataagtaccatatccatcaggtaccatgggcaactcccaagagggaactgaataatttaaagcactcaaagttttctggagataatcagaaatagaggggccaaagaatagttattgtgaatcacaagtatcttgtgcaaataatcttcataaaatcttgtccca

SEQ ID NO: 25301 - DNA, 146 bp, Glycine max
ggcacgagggtagatcgagtgatgcatttgggtaacactacaatcgacaggtttgaaacagcacattggaggctggagaacttgcttcaagatagtggggggcatatgtgtagttgttgggatgctgcgaacaacatgattaaatt

SEQ ID NO: 25302 - DNA, 244 bp, Glycine max
ctttctctctcctctctcatcacacactcaaactctctctctacactacattggttcaaaggcaaaaatcctgacttgggtctcaatcgaaagtgataggccacaaaagagagcctttagtttcaacaccacacttcactctcagcttccatggcgatctcggggaacgtgccaccgttgctgcacgttaacttcaattgggtttgctttctgctttgaatttgccaaaaaaagagccaaaaat

SEQ ID NO: 25303 - DNA, 1286 bp, Glycine max
tgctcgtttcacatggcttccccaaacccaaaagagatcgttgcagagattcctacctatatcagagtcttcagcgacggcaccgtggaaaggccaagagaaacaccctttgtgccaccctcaattgatgaccctcaaaccggagtctcatccaaagacatcgtcatctcacaaaaccccttagtctctgctcgaatttaccttccaaaacttaccacaataaatcaagttcccatcttggtcttctttcacggtggtggcttctttttcgaatccgctttctcccaactctaccaccaccacttcaacaccttcgtttcccaaacaaattgcatagtagtctccgtggagtacaggctcgccccggagcaccctctccccgcatgttacctcgattgttgggaagctctcaaatgggtcgcatcccattccagcgaaaatagccccatcaacgcagaacagtggttaattagccacggcaatttccaaagagttttcattggaggtgacagtgcaggtggcaacatcgttcacaacattgccatgcgtgctggcactgagcctttaccttgtggtgttaagttactaggagctattttcgcccacccttacttctgcagctcatacccaattgggtcagaacctgttacagggcatgaacagagtttaccctatgtggtttgggattttgtttacccttctgtacccggtggcattgataaccctatggtcaacccagtggctcctggggcgcctagtttggctgaattggggtgttccaagattattgtgtgtgtggctagcgaggataaactaagggatagaggggtttggtactatgaagctgtgaagaagagtgggtggaaaggggatctggagttgtttgaggagaatggtgaggatcatgtttatcatatcttccatccggaatctgagaatgccacgaagttgatcaaacgcttgggtttgtttctgaatgagtagaataaatgtctttgcttgatttctcctgttgtgttgtgtgagaatatgaataacaacaaccatggaatggttcctctgtgatctgaaattctgaatattgtgattttgtgttccttgttctcttcctctgttccagtttttgttactgtttgggttttactttcctatatgatgtaaaatttacacatggaataacgtggaaaaagtaggtggtgcaaaatacaaaaagaaaaaaaataatggacaaaagtggtctattaaaggatgatactgatttgtcaacagtaggggtgaaagaggga

SEQ ID NO: 25304 - DNA, 648 bp, Glycine max
cgctacgcgatcagagtagggctcaaccgtgaaatcgacccattgagctcactcagccgcagtcagtgtttcgttctgtgttatgatgagccaatccctaatctaatacccactatctatcttttcttcagaattagaatccaatttcggtttggttcggttttggaaaatgttgggtggtctatacggagaccttcctccaccttcctccgccgaggaagacaacaagcccacccccaacgtctggtcctccagcaccaagatggctcccgacacgctccgcaagcccgcctccctcttcgctcccccccaaaccctcctccgggcccagcccaagcccaggcccaccaccacaaccatccccaagcccatcctctcctcctcgcccgcccctccccctgatgacgccctcctccagcccgccctcgttggcgtccagtccaccgtcctcgaagaatacgacccgacccggcccaacgactacgaggactaccgccgcgaccgcaagcgcaaagcccgtgaggccgagatgctgcgcgagctcgagcgccgtcgtcacgaggaggaagaggaggagaaggaaagggaaaaggaaagagaaagagagagagaaagagatcacagcaataacaacgattcgtcgtcgtc

SEQ ID NO: 25305 - DNA, 787 bp, Glycine max
agttcactaagcagaagaggaatttctagtgtacaggagttactagacattccaaaagcagcattgcagactgtaactgcaaatttcccagcttcaagattgtaccaggatcttcagcatttccctcatgttaaaatgaaattaaaagttcagaggaaggacactgatggtgacaggtctcgcatattatctgttagattagagaagaccaattctagacgacactcttctagagcatttgtacctcgatttccaaagataaaagaggaacaatggtggttggttcttggtaatacctctacgtctgagctatatgctttgaaaagagtttctgtttcagatcacttagttacctcaatgaagttgcctctgactccagctaatcttcagggcgtaaaactgattttagtctccgattgttacattggatttgaacaagaacactccattgaagaacttgatgtatgttaagtagtggagacaccattggtcagtgccattgtacatacaacgtaaacgtaagatttcttgaagagggttggggctgcccaggttgtaccaaaaaatgttttttttttaacttgagaaaaagtcaatatgtatatccataggatttgcaatctcttgcatttaattgttttataggtaatcataatgatcttgtttttagattttctttatttattttccaagtcgtgtcgccatttgtaagtataaaggtttacagtgcaaggattgaaagatgtctgaacatttataaattgtgaaggaatggatctccgcaagc

SEQ ID NO: 25306 - DNA, 248 bp, Glycine max
gtccaattttgtctgggcttagagtactataccctgtaaaacggacatactggtttgatatttataagaatatcgacaaagttggtgcggtcaaatgtcctgttttggttatacatgggactgcagatgaagttgtggatgtgtcccatgggaagcagctctgggagctttgcaaggtaaagtacgaacccttgtgggtaagtggtggtggacattgtaatcttgaactttacccagaattcattaaa

SEQ ID NO: 25307 - DNA, 272 bp, Glycine max
tggtggcagcattcagcaaatttagcatgttatgagcaccaggatgctcacgagtttttcatttcgatgttagatgctatccatgagaaagagagcaaaacaaggaatggaagcaaaggtaatggagactgtcaatgcattgctcataaggtgttctatgggttattgagatcagatgttacctgcatggcctgtggattcacctcaacaacctatgacacttgtgaggacatttcacttaacttggataccaatgtctccttcacagaaaa

SEQ ID NO: 25308 - DNA, 319 bp, Glycine max
gaatgacctagtggacttagctcaggtggcgcttgagcggggcttcccagcagtgattagtcctttaggtagaaggaggcttccttttccaagtcaaagttttgatgctatacattgtgggggctgcggcataccttggcattccaatggtggtaagcttctattagagatgaatcggattctacgacctggtggatactttattatgtcaactaaacatgacagcattgaagaagaagaagccatgaccacattgaccgcatctatttgttggaatgttctggcgcataaaagtgatgatgttggtgaagttggagtt

SEQ ID NO: 25309 - DNA, 578 bp, Glycine max
atctttcctccctcctacgccgacgccgttttcacacccttcgatgacgacactaacgacgtcgagtcttctccgtcttcgccaatttccctctctcgatctccgtcttcgagttcggagtatctaaagataaccgtttcgaaccctgtcaaggagcaagaaacatcgaattcgattgttcctggtagcaacagttacgtgacctacttggtcaccacgaagacgaacattccggaattcggcgcctccggcgccgatttcgcggtccggcggcggttccgtgacgtggtgacgctctctgatcggctcgcagaggcgtaccgcgggtttttcatcccgccgcggccggacaagagcgtggtggagagccaggtgatgcagaagcaggagttcgtggagcagcggcgcgtggcgctggagaagtacctccggcggctggcgacgcatccggtgatcaggaagagcgacgagttcagggtgtttttgcaggtgcaggggaggctgccgctgccggcaaccaccgacgtggcgtcgagggtgctcgacggcgcatcgaagcttcccaagcagttgatggg

SEQ ID NO: 25310 - DNA, 621 bp, Glycine max
cgaggctttattctgcggaagctctgaattcctgagattctcttatcatttttattcctcttttaaatgcacatctcatttgtagccacagttcattagagaaaaaataatggcaattggctttcagttcatactcacactcttctctctattttcggttccctcactcacttttgcttttgcccctatccttcccagatttccttcttcagcagttagtgcagagctgaagcaacgctcacattcttccccaaaatgggctttacagaacaaaattcttcacccagatactggatcacttcaatttcaatccccaaagcaatcacacttttcaacaaaggtatctcatcaacgataccttttggggtggtgccaagaacaatgctccagtctttgtctacactggcaatgaagggaacatagaatggttcacgcagaacacgggctttatgttcgaaaatgctccttcttttcaagcccttttggttttcatcgagcatagattttatggaaaatcaataccatttgggggaaacaagacggttgcatatgcaaatactagcacacttgggtatctcagctcaacacaggcattagctgattatgccgctctcatcattg

SEQ ID NO: 25311 - DNA, 214 bp, Glycine max
gaacaatccagcacaacacataatcgaagcctggttcatcgtcatcgtctctctctgtgtctgcgttctcatcagagccatcttctccctttttcacaacaaaaccatttccaccccaccaggccctcccaacatccctgtcatcacaagcttcctatggctccgaaaaaccttctccgaactcgagccaatcctccgaaacttccacacaaca

SEQ ID NO: 25312 - DNA, 271 bp, Glycine max
tgactctcgaaggacatcatgctgatatttggtgtcttgcagtcagtaatcgtggtgattttatcgtcactggatctcatgatcgttctattcgccgctgggatcgcactgaagagcagttcttcattgaggaagaaaaggagaaaaggttggaggaaatgtttgaggctgatattgacaatgcatttgaaaacaaatatgcattgaaggaaaaataccagaggagggagctgtggctttagctgggaaaacaaacccagagaacctttct

SEQ ID NO: 25313 - DNA, 283 bp, Glycine max
gtttgctactacggccagcattatcattgctttgcttatagccatgaccatgaacagtggattatgtatgatgacaagactgtcaaggtaattggtggatgggcggatgttcttacaatgtgtgaaagagggcatctacaacctcaggttcttttcttcctagctgtaaactagatttttggtggaactgataacatcatttgctggactgaagaatgttgacttttgggtttcaattggtttctggagtggcttgtttatgcagatcattgcataacacaaa

SEQ ID NO: 25314 - DNA, 589 bp, Glycine max
tggtttttcgaattcccattcttccttccctccttctgcttttatcgatctccaccgaaaccaaaccatgtcgctcaggccaaatgccagaaccgagattcgccgcaaccgttacaaggtcgccgtcgacgccgacgagggccgccggagaagagaggacaacatggtcgagatccgcaagagcaagcgcgaagagagtttgctcaagaagcgtcgtgaaggcctccaagctcagcaacagtttcccgctcctcttcagaactccaccgtcgacaagacgctggagagtcttcctgccatggttgctggagtttggtcggatgataatagtattcaacttgaagccactacgcaatttcgcaagctgctttcgattgaacggagccctccgattgaggaagttattcaagctggcgttgctccacgttttgttgagtttcttgttagagaggatttccctcaacttcagtttgaggctgcgtgggctctcacaaacattgcatctgggacttctgagaacactaaggtggtaattgatcatggggcagttcctatatttgtcaagctacttagttcacctagtgatgat

SEQ ID NO: 25315 - DNA, 1347 bp, Glycine max
aaggatagcaagtgtagctgctggtggtcgccataccttagcattgtcagatataggacaggtgtggggttggggctatggtggtgaagggcagcttggtttgggttctagaatacgtaatggtgtcctctcctcatctagttccttgtattaattcctcttcttatggtaaagatatggctcgaggaagcatgagttcagatgggcaaaatttcagagttcctggaagttatattaagggcattgcctgcggaggtcgacacagtgcagtaatcacagatgctggagctgtgcttacgtttggttggggactttatggacaggatcaacatgtaggtaaagtagaatatggtgggcaaaagcaatgtagatgttgaagatgaggttcactctaacaagggataatatctattctgttactttacaatatttatatttctattcgctctctttgttgttgcatgctaatgcttgttaattattctaaattaatgtcatcttgtgttggaaaagtgtgggcaaggaagtacagatgatgaactgagcccgagttgcgtatcttccttattgggtattcaaatagagggagttgctgcaggactgtggcatactgtgtgtacatctgtggatggtgatgtatatgcatttggtggaaaccagtttggacagctgggaactggtggtgatcaagctgagactataccgaggctcttggattgtccgagcttggaaaatgtgaatgtaaagaggatatcttgtggggctcgtcacactgctctaatagcagataatggaaaagtcttctgctggggatggaacaagtatggacagcttggccttggggacgtgatagaccgtaacatcccttctgaagttaccatcgaaggttgtgtagctaaaaacgttgcatgcggctggtggcatactcttcttctggcggaatcacccacttgatgtcatgtggcttttctcgagactcatgacccaattttgttagttagctgttcttttgtttggtaaaaatcatatgaaagtccatatgcatatgtatatgtacatacattagtggtatacatatgacatatgtatatatgcttgtattctttcatggtgtgaatcatcatgactggctctagcatttaaacaacatccaatagagatttctggtttgcatgggaaggaaagtattgggtccttttcattcatgtaacattattcatcatagtgtatattttcttttaattgtattaactaaccagtgtaattagataccctacaagttaggtactgtcccctggcatgtagttgtattttagggggaataatggggtggtccttaggctttgt

SEQ ID NO: 25316 - DNA, 288 bp, Glycine max
agaggatctcaagtgcatgagagatttgaagaacgcaactatgcaaatgttttgcagtcatcatctactttttgtttgcactcgggtgaaagagtggaggaaggggactgttcaggtcaacaacggggaagcatcttgtcagagcacacctcacagaggcgtcttgctattcagtaaaccactgcatgtgttgatgctgaggttggtatatataattgagtgaactagtaggttgagtaccttggctatctatctgtaaacattggcaatttgcatgcatgtcaagcg

SEQ ID NO: 25317 - DNA, 971 bp, Glycine max
caaccttgtcatcacatataacatgcacagatgttgctggaacctttggttacttggctcctgaatacttcatgtacggcaaagtaaatgataagattgatgtctatgcattcggtgtcgtgctccttgagcttctttcagggagaaagcccataagccgtgattatccaaaaggccaagagagtcttgttatgtgggcaagtccgattctaaatagtggaaaggtgttgcaattgttagatcctagtttaggtgataattatgatcatgaggagatggaaaagatcgtattggcagccactctctgtataaaacgtgctccaagggctaggcctcaaatgaaccttatctcaaagctccttcaaggtgacgccgaggcaatcaagtgggcaaggttacaagttaatgctttggacccaccagaaatgcttgacgatgaagcgtgtccacctagtaatctacagtcacatataaatcttgcactgcttgatgtggaggatgacttgctctccatgtgcagtgttgagcagggtctcactttggaggactacttgagaggccggtggagccgtgcatcaagctttgactgagcaaactgctagcaaatcgctagaagaagctcaaccctttgaccttaatctcttttgtagatacaggttttcttgtgcctcttccattaacaatggcatcttctatgggtttaaaatggatttagggtgacaggatgtttgtgtgtgccctcctcctttccttaataatgaggaaactaggccttataagttgttaggctagttaccccttttcattctatacttgaaatggtttctatttttgtccatgatctcaattcgatcgagttttgtaatttgtattgataaaaagatgaagaagttgtatttagagcataaggatcatagctttgcattttaacaagactatagcaatttcgtccactgggtttcttttatttc

SEQ ID NO: 25318 - DNA, 352 bp, Glycine max
taataaccaatatgccagagtacaatttttaatcatatggttgaggaaatttcataaaataaaaataaaaatcctagagttagacttgttagaggcaaatactgaatgatggattaaagatgctagtttttctaaaactccctgctgcgatgtttcatttgtttctccataggaaagttttgctgcacctatgattttttcttaccagatctgtttatattgatgattgactaggttttggaagccaatgcaacattgcttatttctttgttgattatgtgcagcatagtgtacaagatgacttggcgaacataatagcaccactcatgattagaccaattacaaggtggcc

SEQ ID NO: 25319 - DNA, 311 bp, Glycine max
gatttgtggagatggattatggattctcccttcatccattcttgctttgctgaaaattcgtcccccgatctgcatgagcttcctgtcagccagtgccagttagaacttagaagttcccaataacattcaaatatatagatagacgcagtcaacttagtacctacgttcattattatgggcataatgtcgtaggaggcttgcttattagcaatttcattcatgaagattctgctcttagagaatcttgaacgacatgtaaatattttgccatccttgttgattagagaaagtaatcaatttgagcgcccaat

SEQ ID NO: 25320 - DNA, 402 bp, Glycine max
cgattcatcaaattgtgcttcggactccaaggcgtgcttcagcacaggtatgcttacatggggcgcaggtcacttcatggcggaatgagcatggggaagaacttctattcacaagcagcaaggcaattttcaaggctccaaaagccatacgaggaggaattcctatatgttttccacagttcggaaactgtggatcgctggagctgcatggttttgcgagaactagaatgtgggcaattgatgataatcctcctcctctgcctgcaaatgattctagtgggaaatccttcattgacctggtactaaaatcatctgaagaagatatgaagggctggccacatagttttgaattccgtcttcgggtgtctcttacaacagatggagacctgactttgatatcta

SEQ ID NO: 25321 - DNA, 738 bp, Glycine max
tgatgatattaggaaaaagcactatagaggagttaggcagagaccatggggcaaatgggcagcagaaataagagaccctaagaaagcagctagagtgtggcttggcacctttgacacggcagaggctgcagctatggcttatgatgctgctgcattgaggttcaaaggaaacaaagccaaactcaattttcctgaacgtgttgttatgccaatacaaccacaaacaaataacaataattccacttcttcatcagctcctactacacaatcatcttcttctcttccaccaccacaatctctacataataatagttctctttcagcagaagggtttccaaatcttgaggagtatgcaaggttgctgagttgtagcgatgatgatgattttcaacgtgttgcattggggctctaccagcatcacaataatgaggattttatttgtggttcatcacaaccaccaccagtgccgttttttgtgtcctcttcttcttcttcttctgcaatgacatcgtcatattctgattttttgggccaaggagggagtactggttttgatgaagggaacaagagggggtcgtagttttatgtctctgaattttgagcactgcatgcaggttgcttccacaacaattaaggaagttcaaatctctcatctcttatatgttcttttgtttttattattccaattacaaaataacacctgaggtataaaatctataatactcatctttcgtcttt

SEQ ID NO: 25322 - DNA, 253 bp, Glycine max
gtacaattgtaaggatgaacatttggcatctatcagccttagtggagacctaatgcttcataaccttgcttctgggcaaaaggctgcggagtcaaagatcccaatcaacagatgttgagagttcttgattattctcgagttagtcgtcaccttcttgtgactgctggtgatgatgggactgtacatttgtgggatacaactggtcgcagccctaaggtttcatggataaagccgcattccgcaccaactgctg

SEQ ID NO: 25323 - DNA, 252 bp, Glycine max
ccaaattccaatcaagtggtattagatccaccaatattgttagattattaggaattaaagttatttggtttgtgttatacctgtattattttgttacatgaagcctaattttattttgggattttatctttgcaattataattatgattgtaagtttggaattttttttcttttcaatcacgatataataatcatcatatgtgcgttcatgttttgcgttcggattccatgagaaaaactatttttttctcg

SEQ ID NO: 25324 - DNA, 257 bp, Glycine max
tatatatatatatatataaggatcaaattatactcacttattcctaagatttcctgagattgcacaaaatattcctccttttataacgattacagtaaccccttacagattacatggtgtgatatatttcttgagtaacatggagttcagtataatctactcataaattaaaccaatattcttgaagtgatgtgatccagcaatgtgtcaactcctatctttctatatatgtgcagcaattcaaattaacaacttga

SEQ ID NO: 25325 - DNA, 493 bp, Glycine max
  unsure (1)..(493): unsure at all n locations
cttctccaagcccaatttatggtggccaaatggaatgggaaaacaatctttgtacaatgttgttattgtcattgatgttaaaggatttggtgaatctgattcatggagccatcactttggattccgcaaaattgagagcctcattgatgatgctaccggtggaaggttatttaaagtcaatggagaaccaatttttattcgagggggtaactggatattgtcagatggactactgcggctttcaaagaagcggtataatacagatatcaaatttcatgcagatatgaatttcaacatgattcgatgctggggtggtgggctggctgaaagaccggagttttatcattactgtgattattatggccttctggtatggcaagagttttggattactgnggatgttgatggacgtggtgacccagtgtccaatccaaatggtccactggaccatgaccttttcttgttttctgcaagagacacaggtaagcttcta

SEQ ID NO: 25326 - DNA, 265 bp, Glycine max
aattctggtgaatgcgtagagaaggtgaatatagagattagcgtgaaaaatgatgggtatgttcagcagctaccatagtgtcgccgccggaggagatcgttgccgccggcggccgtacgaccgatcgccgaagatgacggcggcggcgctacggaaatggatcgaggcgtaggacccctccgccgtgtcgctgcaggtcggagaggatctccagctcgcttatacacaccagaaggcgtcgccggttcagcacagatcctttgct

SEQ ID NO: 25327 - DNA, 271 bp, Glycine max
gaatccagcccgagagcagaaggaggaacacgaatggcatcgcaaggaggaaaaacacggaggaaagggaagtgacgaggaacaagatgaacgtgaacacccacgcccacaccaacctcatcaaaaggaagaggaaaagcacgaatggcaacacaagcaggaaaagcaccaaggacaggaccagtgaagaagaagaagacagaccaagacgaggatgaggagcacgacaaagagagccaagaaagtgaaggttctgagtcctcaaagagaa

SEQ ID NO: 25328 - DNA, 546 bp, Glycine max
ctcgcttcacgtattaagaagagcccaaagcgaattcgaagttggatcttaatcttcacgtcgttcttcgatctcgcgaaccagtgagctggagtttcaacaatgatggagaaggaagactctgtgcagaagctgtacacgcgtatgcgactctgggaatttccggatcagtatgtgattgagccaacggatggatcttctggttcttctttgtctgttagtcgtgtcgatggatccatgaagctcattgataaggttccagaatgcagcacgcttcgagttcctaagatttatacgattttcggtgttgttgggatgttgaagctcttggctggatcatatctgctggttataactgagcgtgaatctgttggatcttactcggggcatccaattttcaaaatttctaaattgaaggtttttccatgcgacaattctcttaaaaatacccctcctgaaaagaagaaaatagagatggaattttctgggctgcttaatgttgctgagaaaacctctggtctgttcttctcatatgaaactaattta

SEQ ID NO: 25329 - DNA, 271 bp, Glycine max
ggtgtcccttcagaagatatttcaacagcatcttttgctttgaatggtcccaattactgggaagccagtgcctccaacaacagcaatggaagcaacaacacaagtgatggcagcagagagttgacaactacaagtagcaagaacagtgtactctcttcttggggattgacagatgaaacaaagtggtctgagtacctccaaaacccactgctaatgctggcagcgcctgaatcattgtgcaaccaaattaggccagccacacatttggtac

SEQ ID NO: 25330 - DNA, 284 bp, Glycine max
ttcagagtgaagaaggtgggagatggagaagccacaaaacggagcagtacaaggaagaaaccacggcctctttctgcggttacgattctcttcaccgtcttctcaaggataatcttaacccccatcacttccaggaagtcagccgtttgcttactgggcttaattgtggaaaagcacttgaagcagtttctctcccagaatctgcaacttccctctctgtggaacatggctggcggaattaaggttgccaattactgccgggaacatcttcattcggtgttggt

SEQ ID NO: 25331 - DNA, 1935 bp, Glycine max
gtaagaccggatagaataaatcttataattggttctggtgggaaaaaagtgaagagcattattgaggaatctggagtagacactattgatacagaagatgatggcactgtgaaaatatttgcaaaagatttacctagtttagagaagtctaaagctattattaatagtttgacgatggttccaactattggtgatatatataggaactgtgaaatcaaatcaatagcctcatatggagtttttgtagagatagcacctggacgagagggactatgtcatatcagtgaactgagttcaggttggctacccaaggcagaagatgtttttaaagtgggagatcgcattgatgtaaagcttatagaggcatgtcattttactcaatctttgaagcatgttatgctttaccattggctctatacacaatgttgtagtaactcgtgtttttttcttaatggcgattcaacatagccaagctattcctttattcgatgtttgtcctatttgctgggttattttagtgagttacataactcacttgttctcacttgaaggtgtttgtaagcaagaactcaatattctatagactgttgactacatgatttgtgttttatttgcttaaaggaacataaggtaacagtattattatcttcatgtaattgtggtagtataattggataattagggacttgaaaggaaaatgttgaaatttctgaatattattgttgataatcaaactgtacaaggttttacagtgtatacaaggctgcacgattgctttcctaaaatacaataaataataggtaaccgtaaatctatcttaattacaataattaccagattaaattatataccatttgagtgtaatgagtaccaattgtctgtcttttctgctctgctgtcttctattgctcgatctgcccccatgactagagggtgaagggaggacctgggagagaaagggggttgcttctgttgagcttagagcagtgattaatttcactatattttatgttattttctttatatgaatgatcagaacttgggatttttaaccccagtaccagaacatgggtttttatcccaaaaatatttatccagcaatacatgtttagccttcatcatacccattagaaatggactgggcctaattcagctattacacgtgagagaaattttctctaactgaaatttcttatatttttatttttcgagattcttctttttataatttgaactttttctttctttctgaaattggtgaaattgtactcacggtcaagtcagccaccttattttcattagttcccgactcatgttatgaagtatgaacaatgtaaaattttattatatatgaaggatatgattcttgtttttgttgtttcaaaatatccaattttatgatattgtgtggtaggcattcagtcttatgattttaatgatgcactgcaggtaaatgaaaaggggcagctgcgccttagtcaccgagcactgcttcctgatacagaagcttcaccaaaagatggtttagtggaagaaaagactgaacagtctaaggataagtctagcactcccaatgtcacagcctcttctaaaagaagttcagaggatgattctgtacttccttctaaaaagtttgtcaggagattggtaagctcttcccaggataagcctttcactaacaaagacaagagaaagaagagtagcaacaaagcagttggtagtgtgtctggcgaagatgaaagcagtttggttagtggagaagcctaaaactgacgaccaatatatttgcaaataaagcagagacaaatgatgcttgctagaaaaaaattggtttcatatgcacaagaaggctgaggttgcaagctcttacaaactaacatatgaatgtgaaattttttggaacatgctggtgcctaaactggaatataagaaccc

SEQ ID NO: 25332 - DNA, 472 bp, Glycine max
  unsure (1)..(472): unsure at all n locations
gtctaaagctattattaatagtttgacgatgggtccaactattggtgatatatataggagctgtgaaatcaaatcaatagcctcatatggagtttttgtagagatagcacctggacgagagggactgtgtcatatcactgaactgagttcaggttggctacccaaggcagaagatgtttgcagagggggagatcgcattgatgtcaagcttatagagataaatgaaaagggacagctgcgccttagtcaccgagcactgctgcctgatacagaagcttcaccgaaggatggtctagtggaagaaaagactgaacagtctaaggataagtctagcactcccaatgtcacagcctcttctaaaaggagtgcagaggatgattctgtgcttccttctaaaaagtttgtcaggagattggtcagctcttccctggataagcctttcactaacaaagacaagacanagaagagtagc

SEQ ID NO: 25333 - DNA, 583 bp, Glycine max
cccacgcgtccgcccacgcgtccgccactggatctgctgttccctcgcctcgctcatctgcctctactccaaatgtcatggacatggctgctgcaatgagcctctttcctggttcgccgtcatcaatttcttccatgtctccatctccctttgcacagccaatgtctccatccacaagtggcatttctcattcatctaatgcttggccgcagccaaatgttccagctcttcatttaccaggaagcaatattcaaactagccgattgagatcttctcttagtgctcgtgacatgccaccagaagactttgatgtgttgcaagattttgatggccagcaacaccttttgagtgacttgggctgtttctcgcagccccgtcctggcgccatttcagtgagtcgatctggtcggtctaagacactaaccccatcaaatctggatgaactattctctgccgagatttcgtcatctccccggtattctgacccagcagtggcttctgtattttccccaagacacaaatcaactattatgaatcagtttcaacagcttcaaagttcgttatcacccataaacacaagtgt

SEQ ID NO: 25334 - DNA, 423 bp, Glycine max
tcggttacacagtaaagatgaataagctgctttgaacattcaataagaaaaggacgcagcaacccccttttggttttgccgaaccacttcttccttgacttcttgcatggttcgggaaatcgcaaaaccctcacagaatcaagttcatagcctttgtacaatcttaacacccacacaccttttctccctcaatgcttcaattcaagctgcaagccacttccgtgtttcgttcttttcccataattggacatctcagattcttctcactcatttccttcactttgtaactgttttctctgagggcatctattcaagtgagagacgccaacgtaattctgaaatttcgactgaaactcagtgtaggattgtcttttgggtgctggatcttgtcacattcagagcacttttctttctcacatctca

SEQ ID NO: 25335 - DNA, 568 bp, Glycine max
ccctcgagcccaatcgctcacactccgctccgcttaactgtaatggaaccattccatgctccgaatccccaacttcatcgctgtcaacgtccgtcaccgtctccgtaacttccctaatcctattcctttccttctctccgtttccgtcgctgcatctctccctccgttacggaaccgaagcccgtcacagatggcggctcgcgaatcgatgatggcggattacgcgaaatcggggaagtcgtcgtgcagggcgtgttcccaaaagatcgaagcgaaggcattgaggctggcttcggtctccaaaggaaatggtccgtacgacatcgtcaagtggcaccacctccgttgcttccctctttcctctcactctcactcctctcctgagagcatcagaggcttttcctccttgaagagtagtgaccaggaagctctgaagaagttatttgctgaaaataacaagtctgaagagaaggttaatgaagcagtggaagatgtacgaaatgagctgcaagagactggagagcgtggttcaaagagattaaggagtagtgaccaggaagctctgaag

SEQ ID NO: 25336 - DNA, 380 bp, Glycine max
cgcgcaggcagatgaggaggaagggaggttgctcgaggacagagatgacaacaagaggaacgaacagcagacttaacttttatttattttgtttcgttccctgttttattttacacagattcaagaaaggaaaaaaacaaacaagaggtttggtttggttttcgaggcaaatatggaaatgtcatcgtcctctctgggcatattgccggttcggtattgtttttttagttgctagatcttcttcacgttgccaatgcggtgggtagttaattagtagatatgggtttgagatttgagaacaattatgtgttactagagctagagtctccaatccttttattattattattattattatgttcttttatctcattcccgtt

SEQ ID NO: 25337 - DNA, 349 bp, Glycine max
gaatgttctgccctcatcaacaaacccaacacgccctttaacactcaatactatagatgagcatcttgacatgttgatggtctgccatcatctgaatagggaaattccagaagacttagcttttgcatgttcaaggataagagaaggaacgattgctgccgaagatattttgcatgatattggggcaattagcatcatatcttctgattctcaggctatgggtcgagttggagaggtgataagcagaacttggcaaactgccaataagatgaaggtacaacgaggaccactccagcctggtgaatcgacaatgacaacttccggatcaaacgatacattgcaaaataca

SEQ ID NO: 25338 - DNA, 373 bp, Glycine max
tacatcacttaaaccttcttatcccatccataagctttcaaaaaccacgatgatgacacccaactgcgttagattcagtttcaactacaactcccatgcctcttattcgcaaatgggtacccttcttcttcttcacttccactttctcttcagaataagcccagaaaatcggcatcagtggttgtgagtgcccgaaggaaagacaagaaagaagatacccatagctctgttcccaaacccgatgaggtcacgggtttcttccccgaagccgtgctccttaaaaagagaacagttgaggaagaaggtaagcttctcccggagtttgaagacgctgaggaaagacaactctttgaagcgctgatgcttgagctag

SEQ ID NO: 25339 - DNA, 289 bp, Glycine max
tgttgttgtgccttcatattcgttcttctctcagcagcaacagcgaaccctagacctgaacggctgaacctcgccgtctacggcggcggagctgtttgtccgacgtccttaggagacaagccgtcgtcgggtcggaacttgcgctgtggtcgaagtgttcatagattaagaagagtgatggatgaggcagaggaggagcagcaacgtcgtcgtttaaagcttgaagaggcccttgaaatccaatccctcagacgcatcattagtgcttacctcaactatcctgatgccg

SEQ ID NO: 25340 - DNA, 486 bp, Glycine max
aaaacactgaatgctacaagcaatgggaaaatgtttatcaggacaacattgaagcaagtgcttcagttctggagaagctttctgatgattggaaggagctatcaacaaaattgtctcctcatgatcctctgagggataccataaagaacttcaagcaaaagaatgagaaagtattggactctgagactgatgctgctcgtcatgcacacttcaaggacgccgataaatattgcaagataatcttaggaagagtttcgcgaagtcatgggtgcatgacttgtttaacctttacagttcttgctttggctgtgggtgctgctgtttccttgtcccccaatttggaatctttggattttaagaagctctctgaacttttcaacgttcagcactgagtactctggagaatattccgcattaccgcagttggttgcttcaaaacggcgattttcttttcagcccatctcattcacaaatccaatgggtaca

SEQ ID NO: 25341 - DNA, 527 bp, Glycine max
atcgagccgaatcggctcgaggaagaaccctgcatttaagccacctaccggattataggcccaccaagcttcagaagaagctttatataccgatgaaagaataccctggttacaatttcattgggcttattattggtcctcgaggtaacacccagaagcggatggagaaagaaactggtgctaaaattgtgattcgtggtaagggatcggtgaaagagggtaggcttcagcagaagagggatttgaaacctgacccttcggaggctgaagatttgcatgtgttagttgaggcagagacaccggagtcgcttgaggctgctgcgggtatggtggagaagctcttgcagcctgtggatgaggtattgaatgcgcataagaggcaacagcttagggagcttgctgcgttgaatgggacgatcagggatgaggagtattgcaggttgtgtggtgagcctggtcatcgccaatatgcgtgtcctactaggacatcaacgtttaagagtgaagttgtgtgtaagcattgtggg

SEQ ID NO: 25342 - DNA, 343 bp, Glycine max
ctttctctctctttccatcgctttctggttccgatttagggctacttcactcacatcacaaccttattgctcatctttttttcctcttcttctttttcaggtctctccctccttgatccccaacttcgatccatttcattccgatcctcccccttcaccgtcactgcataacgttctcatcactcatacaattttattgctctcgccgttaggttgttgattggttttgaggacaagaacttttacattgttcacacatctgttatcattgaaggaaaaaagggactggtgtttttcagtgctgtgatgacatttggcttgacgtattgaaattcatgcaatg

SEQ ID NO: 25343 - DNA, 384 bp, Glycine max
gaaccattaaaaagacaacataatttggaacagaaccgaagcgaaagagcagcactcacagagagagtgagacagagagatggcagcaacagagattgggttgttggagtgggtgagagtgggaggggaagaagaagaagcagaacaagcaaaagggtgtttgagcaagttcgtcgataatggcagcgtggagagtcacagatactacttgtctcgcagaaccactctcgaaatgctcaaagacagaggctactccattccctctcacgaaatcgacctttctctctccgatttccgcgacatgcacggccaattccctgaccctgatcgtcttcgtctctccctcactcatgccaccaactcctccaaaaggttttagtcata

SEQ ID NO: 25344 - DNA, 279 bp, Glycine max
atgaacatgtctgctacagttggaaaaaagagagatggagagaaaataaaaacgggaggacccatgaagcttattaagaggaatggctaatgagaacaaagtggctatgcttttatcccgagcaatgcttcttcttgcttggagaccccacattttggaacaggagaaactcatcatgaagattgaggaagatggagatttatgaatgattgcagttgcacccacataaaaagtcatgtccactccacaagagggtttcagtaataggaataggagaat

SEQ ID NO: 25345 - DNA, 536 bp, Glycine max
tggatcttcaactgttatttctcttctggaagatgccttgaggtgtccttctgataatctgcgcaaaggtcaggccctaaacaatcttggaagtgtttatgttgattgtgggaaattggacttagctcgtgtgtgctatatcaaggcccttaaaatccagcacacccgagcccatcagggtcttgctcgtgttcattttctcaaaaatgataaggctgccgcttacaaggaaatgaccaaccttattgagaaggcaagaaacaatgcatcagcatatgagaagaggtctgagtatggtgatcgtgatctcacgaaggcagatttggagatggtgactagattggatccacttcgggtgtatccttacagatatcgcgcagcagttctgatggacagccataaggaagaggaagccattgcggaactctctagagcaattgcattcaaagctgatttgcacctcctgcatctacgtgcagcattccatgtacacaatcgagatgtcttaggtgcgctaagagactgtcgtgctgcgc

SEQ ID NO: 25346 - DNA, 346 bp, Glycine max
gtctgatatacacgctgaattgaataatacaagttattgtcaggcatggataaatgcagcctcctagaatggggtgattcaatgtcctggaatgatggcagaaccaggttaaagcttgaactcattgcagaatagcttttgtagctataatagaatggacgagtttcctcgcatcaactcggtcatattgttatttacacgtaggaagttcctggccatctttgttgtaccaaagctgtatttttttgtttgttttaaacatttatgtgcagttttccatgtccataagatgttttttcaacaatgagaagtttgacactgcggttaacaatcagtttgatgatgt

SEQ ID NO: 25347 - DNA, 884 bp, Glycine max
cgctatctgtcgtagccgccagttaaagttttgtttcggaattctgactttgcttactctctctctccgttaagaaccgttctttgctttgggtacgcagatttcatacgcagaacattcttcactgcaaatcatcaatggattcctctgccaacaacaaagagattcagatagtgcaagtgcaacccacacccgaagaagaccccgagaagaaaaggataaaggaagaaaaggctagagagaagcaattgaagaaagagaagtttcttcagaagcaagctcagcaacaagcacagcaatcatccaatgcttctacttctaaaaagagtgaaaagaaagttgtgaagcgtggtggggagggtgagaatcctgaagattatgttgatcccgagactccatcgggtgagaagaagcgtatggctcggcaaatggccaagcaatatagtccaactgccgtggagaaatcgtggtatgagtggtgggaggaatcacagtattttgtggcagatgctaacagctccaaaccaccttttgtcattgttttgccccctccgaatgtgactggtgctctccatataggtcatgctctaacagccgcaatagaggatacaatgattcgatggcggagaatgtctggatacaatgccttgtgggtgcctggaatggatcatgctgggattgctacacaggtagttgtggagaaaaagctatttggcgaaaaaaacctaaccaggcatgatctgggccgagagaaatttgtctgtgaggtttgggagtggaaacacaattatgggggcacaatattacaacaattacgccgattaggagcctctttggattggtctcgtgagtgcttcacaatggatgaaagaagatctaaggct

SEQ ID NO: 25348 - DNA, 320 bp, Glycine max
agtgagtctgccaaggcaaaaagagccaacttaggtacagcaagaaaatgccacccaaattcattagatagaaataaagtcaaagggaagattgtgatttgcgatggcaaaaaggatccgaaatatataactatggaaaaaattaacatagtgaaagcggcaggaggaattggtctggctcatattactgatcaagatggatcagtagcatttaattatgtggacttcccggcaacagagataagaacaaaagatggcgtcgcactcctgcagtatatcaattcaaccagcaatccagtgggaacaatactagctacagt

SEQ ID NO: 25349 - DNA, 390 bp, Glycine max
gtgaaattaagatgagaaaaacaatgtgtagatcaatccaccatgtttccctcttgtttcttctaaccatgtgtttattaatcaatgcagattgttctgaatcttcttctctgaataggtctgcaattccaagcaattaccacctttcatcaaacgacacaaacatcaacatattgtttctttccattgctagtggtatgtcccctaacgacccaccagtgttcttcttttacaactacggagaaactcgaatctatttgcatcccggaaagccttcactaaactcgccaattttgatcacaaagtcattctaatgtattgggatgtattgtgtgtgattttctatgcatatgatcctaccatggaaggaggtcatcaaaagatctattg

SEQ ID NO: 25350 - DNA, 330 bp, Glycine max
atttgatatttgcatgaagctacctcaatgggctttgcagattttgagacagctagcacctgaggtttcttatcgaagtttagttgcacttggcattgctagtattcaggggttgcctatagcttcttttgagaaagatgatgctgaacgcttactgttcctctatcaagactgtgagatagatagctgtacaaacaagaataatataattgttagcagtccccctggttggttgaaaccaccccctcctactaggaaaaggtgtgaaccaagacaagaggctagccctggtcttcatgaaggtgtctttgcagggcagggtggtgtttg

SEQ ID NO: 25351 - DNA, 253 bp, Glycine max
gtgtttttagctctctgattgcaaaagctgctcaaacaaagttatccaaagacaattttttacaatctgttgagagtagcaattctaccaggaattccagatcagaaattatatcttctagaaaaattgatgctggtggattatcccaagcaactgctagaagaattttggaagttatagatgactcactcccatctgcaatcccaccattatctccacccagccttgatcatgctgaccttattatatccta

SEQ ID NO: 25352 - DNA, 339 bp, Glycine max
attataaatagctcctgtctcaagaacctgcttattagtatttattatcctgtgtttaaaccatcaccaaaatctttgttattcacgaaaccccgatagcactttccttatcttttccgaatccgaggagtggcagtagtgtgtggtttttcacaatcattacctcgtttcagctcaattttgttaattgggcttccattcattaaagtttacaagtttgcggctttcaaacgattatatggggagttgtgtgtctaaggtgattgcaaatttcagtgcaacatggtgtggtccttgtaagatgattgcgccatattacagcgagttatctgagaaata

SEQ ID NO: 25353 - DNA, 270 bp, Glycine max
acgaaaccccgatagcactttcctaatcttttccgaatccgaggagtggcagtagtgtgtggtttttcacactcattacctcgtttcagctcaattttgttaattgggcttccattcattaaagtttacaagtttgcggctttcaaacgattatatggggagttgtgtgtctaagaatcatgctaaggataatgattctgatcatgatgtggattttgctgctgggaatgtgaaacttattaccaccaaagaagcgtgggaccaatcttt

SEQ ID NO: 25354 - DNA, 396 bp, Glycine max
cctagacaaggtttctgtcccggcattgctggttctcgaggttgagcgtgtccttaagccaggtggcgttggtgtcttccttgtaggcaccacaagttctcaccccaatgacatgataagagcagccacacctgtgtcctcgttattaaggtcttccaatgttgtgcatgttggttctgtcaacgaccataaccttgttgttttcaagaaacgagttgaaaacgctactttgttttaccaacatggtttacccgctgattgtcccagtgtcaccttcaccaaaccccttatagagttaatggagcctctcgtgagtgagaaacaacaacaaccaccgattgagtttcgcaagaggaatattccctatttgcctaagtttgtggatgtttccactag

SEQ ID NO: 25355 - DNA, 300 bp, Glycine max
tggttgatttgtgatatcactccagcttatatttttagtttctatacttggattttaattgaattatactgacagtgtaaagttttttctaactgtcatccaatcatggactgtcatataattgaaaattattgacttttgtaataattattttaagagtcatatgtaggataatttcttattagtcaacaatgtaaaaatctttacattattaaacacttagcatgataggattattaaacacttaaagcatgatagggaaaaacatgcttctttttggtaagaattgtaacagtttac

SEQ ID NO: 25356 - DNA, 360 bp, Glycine max
ggctggaaggattccattgtgactttacaaaccacaaaggcattgcctttgtggtcagaggacttagcaatttcaagcagatgcattgaggcaattgcctcaaaggccttaagccacccatcaaaggtgagtttgtcacacagcccttcccggagggtgagggatgatgtgtcttcatgcaccggaaccgaaagcctgagacacaaatcaacaagcaggggttggtgggctgaggatttagcagatttgagcatagacttgtattggagaaccatgatggctatcaaatctggtggcaagacaccctcaaatctcattggtgatgcattgaaaatttatgcatctagatggctaccaaat

SEQ ID NO: 25357 - DNA, 906 bp, Glycine max
cttagagatgaagaatgcgttagacaagccgtgaaaagggccttggcttttgttgtagcctggtccttagatcccttggtttttggtgagtaccctcctgagatgcactctattctcgggagtcagttgccaagattctctcctgaggagaagagtctcataaaaggcagcatagacttcattggcatcaataactatggaactctctatgccaaggactgctccctcactgcttgtcctcttggaacagatcgtccaatacgaggcttcgtagaagcaactggaacaagagatggcattccaattggtgatctgacaggaaacccaagattttttgtggttccaaggggcttagagaagattgtagactacatcaagataagataccataacatgcccatgtatattacagaaaatggatattcgtcaccgcacaaaccaaatgtgacaatggatgatctactacaagatttcaaacgaatagattatcataaagcctaccttgcagctctgcttagagccataaggaaaggcgcggatgtaagaggatatatgatatggtcattgatggacaactttgaatggacaagcggctatggcgtgagatatggactttattatgtggatagacacactctcgaacggattcccaaacgttctgttcaatggttttctagttttctcaacgacacaagccacagcaataaacaagacttgagtgagcagtatgtcagaagcaaagatgtgacaactgctggtttcaaagttgtttgaacttgctgaaatgtatggattctagtgtaaactaagattctttatttatgataaatgctagcagcatacactataacattgttatttgctgaaatttattggatactacaaaaaaaaaagttttacctcatc

SEQ ID NO: 25358 - DNA, 249 bp, Glycine max
tggggtatggagaagcttgtagagtacattaaaataagatatcgtaatatgcccatgtatattacagaaaatggtgggtgaacattgattacataactacaaaaaaatttctgttttcatttctgctacgcacaatttttttgaaaaatgtcattgtcattgtatttctgttttcttaatgaaataaaattaaacggaagccactctatcatttctactttatttctggttttctaatgttgtatcgga

SEQ ID NO: 25359 - DNA, 440 bp, Glycine max
gttgtccactaagaatgtcaagacaggagatcaagatctgaagccttgttgaagaggctgcttctttggatctgaacaatgcctctggctctggatctttgccgcgccttcaaacattgaaaaagacttccatttcttctcgaaggtctggtactgccactttccctagtcctggtacactcaattatcgcgttgcaatgcacaagggatggagctccgagcgagttcccttgcatgcaggtgctacccggaagcacgttttgccgttcaacaatgggaaaacattgccgtcaaagtgggaagatgctgagaggtggattctcagccctgtttcggcagatggcactgggagggcctcgcttaatgcaccccaaaggaggccaaagtccaagagcggtcctcttggaccccctggtgttgcgtatcattctatgtactcg

SEQ ID NO: 25360 - DNA, 418 bp, Glycine max
tctcaatcagagagcatgctctatctctgatagttgaaatgcttaaaaatcagaaagatgccatggaaaattcagttgagattgttgttgaaaagctgcttaatgttacaaaggatattgttcccaaggtctcaaatgaagcagagcactgcctcaccattgttttatctcagaatgatccattcagatgtttaagtgttattgtccctctactggttaccgaggatgagaaaactcttgttacttgcataaattgcttgacaaagcttgtggggaggctccctcaggaggaactgatggctcagttaccctctttcctgcctgctttgtttgaagcttttggaaaccagagtgctgatgttcgcaagaccgttgttttctgtctagtggatatttatatcatgcttgggaaagcatt

SEQ ID NO: 25361 - DNA, 249 bp, Glycine max
attcccgaatcaccctactggtaccaaacctcggagtattcaacccggtgccgcttttccacaccacgtcagatatgaagttatccatttgagttatcttcgtcctcggagtggcatggcttcgctttgtgccctaaactatcctcctgctcgcagagacgattcagtcgtcgaagattaccatggtgtcaaaattgccgatccttatcgatggctcgaagatctcgtgcgagagtgaaggttgtgcga

SEQ ID NO: 25362 - DNA, 517 bp, Glycine max
ctttttgctttgcctttgaatgtgttgttgttctcttttctcttggtggggtgtctgttgtgctgcgatgatatttgtcttggatttggtctcttagtacgtggcatagttatcatagattcttgtggcaggtgcttctttcagatatcaaaagcttcaagcacttgttttgtttcaatccagaacctgaagcttgtttataaaaaaaaaagggaggagcacaactgcaatttgcaagcaagatgtggcaaagaagccacaagtcatcagaggagaggaagctggagcttaggcttggtccacctggtgaagagtcgctcaatgaaagcatcagaaaatgcaacagagaaagacgtagaaatgaatcacaattcactcttggttgcttctcaactcaaaatttttttacttctgacaagcaaggtccaggtgggactacgttgccctctgcatggccttccacatcctatcatcatgaacaccaggctaaagctaaagcttcatcatttcttcagct

SEQ ID NO: 25363 - DNA, 259 bp, Glycine max
aaattattttttcattctttagttggcattcaattgtaaagtattcattttaaagaggggcagggatatttttaggattagtgagcttgcgttgtatgtccatttttgttgtcctggtcaatctggtaacaaaaccgttagaaagtgaagctgagctgcttataattttgattgggggttccaagctcactttccactcattttttttacaatgtaaagggtcaagaatgaacattgatatgtaatgaataggtttttc

SEQ ID NO: 25364 - DNA, 361 bp, Glycine max
cggtttgttgggccaagtgtcagtaataactaacaggcaggacttaatagaatacggagtcgattcggagagatcaaccatgaagaacgaccacaacaacaacaacaacaacagcgccgagcatagcaaagacactaccgttggaatcctagattcccgattcaaccagaccctcagaaatgttcaagggttactcaagggtcgaaacattcctggtaaaatattattgagccagagggttgaatctcccgattacacaagcttatcctcaccgacttatataaggagctcctcatacagtgaaactggcacaagtgaccagacatctgagacagtagaggacgaagttcacagtacaagt

SEQ ID NO: 25365 - DNA, 266 bp, Glycine max
attgcaaaggaaaaccttgactgaggcatctaatttgcagcaaccatttgcggttactgggcatggtcctgaagggaacttttcatcaggtggtttaataggaaacaaagatacagtcactggaaaatacccacatgtcttcccatctggcaattctgtatcatcagataaatttgttggaagtcagtcttttgtgccatctaatttttccatgtcaaaagctcactcatcagggccgccaggattttcattgtccagcagaatac

SEQ ID NO: 25366 - DNA, 321 bp, Glycine max
aacactacggcctatccatacctagcagctcacctgataatgtgttggttaaatctatgcaatctcaagaattgcagtataatactgacaaattgaaagatttaatgattaagaatgcagacagtaaagctgctgcattatataatgaggtttgtaatttaaaggaacagtgtgatttgtcattggattctcaatctcaagtagtatcagctaatactgaagtggaagatgatgtaacaacttttgataatcagagacttaaggctccagaagttattggttcttatttgcccgagtcagccagtttccttcatgtctcaa

SEQ ID NO: 25367 - DNA, 460 bp, Glycine max
ggggttcatcaaactcatcccggagctctgtcttggatcatgaagtggttgatttgttatccacaccaaggtatgccaacagatcatctgaagaccagatgataatgacaatagctcggaagctcaggcacggcaagtggaagcagatgagagattggcacgtgaactccaagaacaactgtatcacgatgatccttttgaaggcagagggattgatgaagatttagcatgggacctgcagcgtgcagaggctcttatgcgtgcaactattgatagccacagcataagtcaaccgagacagcttccaagggcaatcagacagcctcgtacacggtttccagaaaatccttctagaaggagagctatggctcaagcttctttctctaatagaatgtcacagtggaagagtcgtgctacaagtcggactcgagcacctagcacatcatctggaggaagaggc

SEQ ID NO: 25368 - DNA, 288 bp, Glycine max
ctcattcgttcacatcatcacctcaacactccaatcttgcatatcctttgctttcacaatgctccatcagttcacactcttcgctccgattttttccggcggaaacaacgccggccgttgctcgtttgccggaaattcgtccgtccgtgacgtgaggtcgttgaggtttatgaagcaagcatcgggaagacaatcgaacaatgaacatggtgtttttagcgagccaatggatcgtgccaagcatagggcaactactgcttatggtggtcgtgctcaagaaggtgttct

SEQ ID NO: 25369 - DNA, 312 bp, Glycine max
aaatcaagccaatcagactgcttgcagcgtcaggaatcatggaatcatcatgaaagttgtgaactgagtccagtagagtctgaccaaagtcattctggcgagcaatatgaacaatttgataaaccagtattagcagaagacaaaggaggaaagggcatttgggaaaacaagttcgcacatgatccaggaaaccccccacgaagtttatcaggaaattatttctctgccatccgttttttgtgttgtggccctgagaatgaatatgagaaagaggttcaacaagaaatgagatggatcaaagcaaaacacgaa

SEQ ID NO: 25370 - DNA, 394 bp, Glycine max
cagtgattgctgaattgcgggaaagacttcaatcacattcaatgaaatcatatcgatctcgatttcagcgcatctatgatttgtttatgagtgatgatttctcatcgttctcacggattgcgcaacagtttcctcatctgaagcaatggcttggctttaaagctgctgggcactgcggagcttggtcatatagttgcgtcccctgttattcgaactgcaacttcaattgttcctttgggatggaatgatggactaggagcaaaaaatggagaacctctgaaagttgatattactggttttgggttgcatttatgtacacttgttcatgctcaagtgaatggtaactggtgctcaactactgttgaatcatttccttctccaccaaactattctt

SEQ ID NO: 25371 - DNA, 259 bp, Glycine max
gcagaaagagtcacaaatgctctacgcttgatctctccaaagagatctttacaccaaggctcgtcttccttatcaagatcaaaatcaacagggtcctctattgattctcatagaactgctgctgttgaggactgcattgagttcatccactcttccttttccagatcaaattcatcaaccgaagcaccccgccaagattctattcaagctccttgagttgagatgcttgcaatcatgtgcttgctactatgcttaggtt

SEQ ID NO: 25372 - DNA, 525 bp, Glycine max
ttaggagtttcacaacgcagctgcgcacagcacagtcctgaccctcccagaaaaccctaatcagcgtatcgaatagttggaatctccaattcttgtctttatctcttgaccagaaaaaatgtgcgaagccgtagaaattgaagaaaggcccaaatacaaagatatcagacgctattactgcgagtactgcggtatctgcagatccaaaaaaacccttatcacctcccacatcaatttgcaccacaaggaagagtatgaaaaagcaagagctaaaagagatcccgaagcagaggcttcgaaatcgaacacttgcgaggaatgtggtgccactttcaaaaaacacgcctatttgttgcagcacatgcaaagtcattcacttgaggtatttgaactcttgattaattattatttaagaaaaataagttggatacagtcaaactctaaaagcacataagaaaactgtatttaaaagctatgtcttatagaccgttgtgttccttgagaaacatttgatttgcggaagac

SEQ ID NO: 25373 - DNA, 261 bp, Glycine max
accgaacagaactcagtcgcaacttccaacctccactcattgcacagtgcacaccactttcacaacacaaaccctttccgttacaatcaatccattttccccatcctctcattaccctctcgattccatttccatcatttgcatttcggtagagcgagcgaggggagtgtgtgtgactgtgatgtattgtggcgaggaagcgaacaatggagttgtggaaaagctggggcagtaaatttgcggaaagtgagttccatcgtg

SEQ ID NO: 25374 - DNA, 268 bp, Glycine max
gcatcattgaagatgtatgaagatatcaagcaaaaaagtgaatcagctcgaaatgcataccataattgcagaactatcagggctgaaaaattttaattctcaaagtatatgaatttttttctgctgtgcttgcttgacattaatttatattatcaaaaacacccaaaataaaactatagacgcatgatcatggtccttgttggagaaagaaatttgtgagatgaaaaatggggtgtaagtgtctgtaaatgagctgcatgttatgatg

SEQ ID NO: 25375 - DNA, 429 bp, Glycine max
cttctatggacaaagacggcctgtgctgcagcgtggtgcaaaacttctgtgtgttagtgacttgcttctattaggaagagccaaccattgaagaggcacgcggcctcttacactggttggactctgaggcaggttttggcaagatgggggtttgtggacttagtatgggaggagtacatgctgcaatggttgggtcacttcaccctacacctgttgcaacactcccttttctgtccccacattctgctgctgtggcattctgtgaggggattttaaagcatggcactgcctgggaagactgagaaaggatcttgcagcccaaaaggttgctatgactctagaggaggttagagaacgaatgaggaatgttctgtctctcacagatgtcacacgctttccaattcccaaaaaccccaatgctgtaatctt

SEQ ID NO: 25376 - DNA, 563 bp, Glycine max
ttctttatctaatattggagtggcttttatttgttgtctccttcattatgcactatcccactttcaccaccctgatgagacaagcacacgtaatgttaagagggaagatgataagtgctggcttttgcccatcatcctttttctattcaagtctgtacaggcccgttttgtcaattggcacatagcgaatctagaaatggaagatttttctctattttgtccggatccagatgctttttgggctcatgaacctggtttatgacagaaaagaaatagaagcattagaaatgtgaacctggatgttaagtttttggtaaatccaacagttcaaaatgatgcttcgtttcggcgtggagcaggagccttgccgtgtgaatatatatattcagagatgtacaggagaatgaagtacagttctgcactttttcgcttctttgtaaaaaaaatctctagagtttcaaggtataatagttacacggaagacacctctttctagtattgtcttttagtttatatattttttgggttcgctttctcatgattaataccactgaagcttcacc

SEQ ID NO: 25377 - DNA, 272 bp, Glycine max
gaaccccgtcgcccagagtttcaccgagttctacgataaatgggtttggaagctcgaggagatcctccaccagctccttgaggtgtccaagcagagaacccaggtggtgaaaactgaacaagagctgcaggttttgatttccaaggtcacatcccatttgaaggaatattacactgtcaagtgggcttcggctcatgaagacgttctcgtgttcttctcgccaacgtggctgagtcctttggagaatgcttatttgtggatgacggggtgga

SEQ ID NO: 25378 - DNA, 516 bp, Glycine max
ggaaaggtgggtgatgaagtgaagtgttctgcgattgcgaatggaagtgagcgcgaaggtgaaggtgggtgggtttctatggttggagggtttggttgaggcgtgttgccttcatcgcgttgttattctgtgtatgaggtcaaacaacctattgatgcgaactggtcagtgtttcctcttaaatggtttcatcttcttaggaagtatattcgtcctaaactcggttgtcatccctgcattgtggtggatattacctgaccaaagctcacagtttgtttctcataaactctgtgacttaggtggcactttgaaattttattctttcgtacgtcttgcactcattcagctcttttatgtgctttggttttacccattatacgtgtttagcatagttcttagcacaatttggtacaacgacattgcgaagtatgggtatgctgcaatgggaagatctaagtttactgtagagaaaggctcaagccaaaacaactcaccaactttacaaaatgctcatca

SEQ ID NO: 25379 - DNA, 408 bp, Glycine max
acgaggcgcagagaaagtagcccaagggtgaaggaaatctctggaattttctttggcctaataaatatacgtttcttgttttccaaggcctgtgaatcggaattgggatttaaatttaatcattatgtctgtttcttcaatcggaatcacgaacaacatggaagtgagaattgggcaaagggtttctcgcggaatgctccctatcctcgctctccacaccttcagcgagtattaccgctccgaccacaaacctccggtcaccgccgccctcatcgccgccaacaccctcatctacctccgcccctccttcctcgaccccctcattccccccatcgaacaagtctggttcaaccctcacctcatcctcaagaacaaggacttgaaacgcttcttgttgtcgccgtttta

SEQ ID NO: 25380 - DNA, 620 bp, Glycine max
attaaagtgattgacaaagataaggttatgaaaactgggcaagctgaacaaatcaagcgtgaaatatctgttatgagactggccaggcaccccaatattatacagcttttcgaggttttggctaacaagaataagatttactttgttatagaatgtgctaaaggtggagagctcttcaacaaggtggctaaaggaaaactcaaggaagatgttgcacacaagtattttaagcagctaatcaatgctgtagactattgtcacagtagaggtgtgtaccaccgagacattaagcccgagaacattctattggatgaaaatgggaatctaaaggtttctgacttcggtttaagcgctctcgttgattccaagaggcaggatggcttactccatacaccatgtggcacacctgcttatgttgctcctgaagtcatcaaaaggaagggatatgatggtaccaaagctgatatatggtcttgtggaatagttctgtttgtcttgttggcaggttatctcccttttcacgacccaaatttgatagagatgtataggaagataagcaaagcagaattgaaatgtcctaattggctcccacaagaagtatgtgagctgttgggcatgat

SEQ ID NO: 25381 - DNA, 368 bp, Glycine max
tggtgttggggcgccactcgatgtcgaggcccacggtgaggacgcgctgctggtgctggtgctggtggtcgcggaggacggtggagatccaggagtcgacgagggaggggtcggaggtgaggagggtgtagatggtgtgggtgttgttgaaggagacgtcgtagaggttgtgggtgtcgtaggggaggccgtggtccaccacgctgatcggcgccaccacgggggtggtggtggtggtggaggagctgagcggcgcgccggtttggtcttgccgcgatgatatcatggcggggaattggagaagagtgagagaagaaagggggttttgattttggagaaaccgtgtttcaatggaaacaatggaattt

SEQ ID NO: 25382 - DNA, 263 bp, Glycine max
atttggcgctgtattcttcttcacaggcatggttgtggtggttcctcttgattggctctcttttcagcattgtcttcgcaatcgcacaacccatttgcccctctcctccagattcaccaccaccaccaccacctctctctgcttccactctcccataattcaagccaagttgccttttttcaccaattccgactcctttcaagtgggtcgacccattggcacttatggcttcatcaacgtcaccagctactctgcctttccct

SEQ ID NO: 25383 - DNA, 266 bp, Glycine max
ataacttttgcaggcgaacaatatcacaatcatgcccattttgccgcgacagtctgaagagagtgaactcaggtgatctctgggtattcaccgatagaagggatgtggtagacatggcaacagtgacaagggagaatctcagaaggcttttcatgtacatagataagttgcctctgattgttccagactccctttttgacacatatgactctcacataaggtaagtgattgcaacagaacagattttaatgcatgctgttttcttg

SEQ ID NO: 25384 - DNA, 874 bp, Glycine max
atcccccttctaagtgttgctacttcctttgttgccgaggacattgccaagtcttcctccgctgcagatgccattacacaacaacaactctcctctgtctccactgctctgctattggcactcgcccttggctttttttgaggctttagctttatacctgggagctggagcttttctccatttaattggtgttcctacacaaaatccaacatatgttcccgcacgacactttctctctttaagagctgttggcgctcctgctgttgtactttctttggctcttcaaggcattttccgcggttttaaggatacaaaaactcctgttatttgtctaggcattggtaacttttcagctgtcttcttatttcccttacttatgtattactttcggctgggtgtaactggtgcggccatttccaccgtcatctctcaatatattgggaccatgttgatgatctggtgtctgaataagcgagctgagttactacctccaaagatgggagacctgcaatttggcagttatattaaatctggtggtttccttcttggaagaacacttgctgttctttcaaccatgacattggggacatcaatggctgctcgacatggtccagtagctatggcggcacatcagatatgtatgcaagtgtggttggctgtttcccttcttacagatgcattggctgcatctggtcaggcccttattgcaagttctgtatccagacatgaatacaaagttgcgaaggaagttactagtttggtattaaggattggactggtaatgggtatttgcttgactgcaattctgggtgcatcgtttggatctttagccaccatttttactcaggacactgaagtcttgcaggtgatcaga

SEQ ID NO: 25385 - DNA, 472 bp, Glycine max
ggaaaatatactaacctctcagatgcatatctttctgtactgaaggcacttttgcatgcttctgctgcttgcaatcatgagcttgttgtggatttggttcccgctgaacatctcgaagatgatacctctaaagaggatcctgatgcatataaagctgcttggggtcttttgaagggtgctaatgggattctagttccaggaggttttggtgacagaggagtggaaggaaaaattcttgctgccaagtatgctcgagaaaataacattccatatctgggcatttgcttggggatgcaaattgctgtcattgagttttcaagatctgttctgggtcttcatgatgctaatagcacagaatttgatcccaaaaccgaaaacccttgtgtcatatttatgccagaaggttcaaagactcatatggggggaactatgcgtcttggttcaaggagaacttactttcatgttgctgact

SEQ ID NO: 25386 - DNA, 280 bp, Glycine max
gatgctccactttgttctttcttttgttatgcctcatggctgcaactgcaaccgcaaaaaccaacaatgacaacaaccctgaaataacaagggaggaaatccaaactgccatagccaaagcagtggaattaagggcccttcatactgcattaacacaaggaagtagtccaggcacaaacaatgctagatttccgtcaccttccccggcttctcacttctctgcccaagactaccctgttttcacaccaagttatgaagatgaggcacaccagaacccaac

SEQ ID NO: 25387 - DNA, 273 bp, Glycine max
gtgccctcacagagaacacttcacggaggcatatttagagcatgttcagattttgaaaacgaggctgcagtgctcttcaacagcaagctctcatcccaaatggatgctcttaagaaacagtttcaagaggctagatttgtctaccttgacctttacaacccagtactaaatttgattcaaaacccagctaaatatggttttgaagtaatggaccaaggatgctgtggcactggaaaattggaagtaggcccgttgtgcaaccatttcaccttg

SEQ ID NO: 25388 - DNA, 753 bp, Glycine max
gtgtatcctaaaaagtttattgagatagaaattcgttttacaaaatgaagaaagtgtttgttgcaatttttcatctactagttgtatttgttctcacagccacagcttcagaaccagagccaccagttacaccttcaggaccaccaaaggcagggccaccaagagcaccaatttcaacttcggggccaccaaaggaagggcccccaagggtactgattacaacttcgaggtcaccaaaggcagggccaccaaggacactagttacagcttcagaaccagagccaccagttacaacttcaggaccaccaaaggcagggccaccaagagcaccaatttcaacttcgagaccaccaaaggaagggcccccaagggcaccgattacaacttcgggcccaccaaaggcagggccaccaagggcaccagttacagcttcagaaccagagccaccagttacaccttcaggaccaccaaaggcagggccaccaagggcaccgattacaacttcggggccaccaaaggcagggccgccaagagcaccgattacaacttcggggccaccaaaggcaggaccaccaagagcaccagttataacttcaggatgaaaattttattgagctcgtgattaaggcaaaggagaaagtagtataataaaagggatgggtactttgaagttgctttattccaaaaaaaaaaaaacttgtctaatatatgtgaaacaaacatttgatgttacaaataataattaatgaaaca

SEQ ID NO: 25389 - DNA, 472 bp, Glycine max
attctttcgcaagtgtatcctagagagttcattgagatagaaatttgttttacaaaatgaagggagtgtttgtaacaattttttctctactagttgtatttgttctcacagttacagcttcagaaccagagccaccagttacaccttcaggaccaccaaaggcagggccaccaaaggcagggccgccaagggcactgattacaacttcgggcccaccaaaggcagggccaccaaaggcaccagttacagcttcagaaccagagccaccagttacaccttcagggccaccaagagcaccaatttcaacttcagggccaccaacggcagggccaccaagggcaccgattacaacttcgggcccaccaaaggcagggccaccaagggcaccagttacagcttcagaacaagaaccaccaattacagcttcagaaccagagccaccagttacacctttaggaccaccaaaggcagg

SEQ ID NO: 25390 - DNA, 255 bp, Glycine max
gtagggtttaccatctttcgtggcctcagttgttaatcaaacaagaagcaatcttattcgcatcaaagggttgggggtgaagataatagtggtgggtgctctacaaccccttggatgccttccccaggagacagccacaagctcgttccaacgttgcaacgccacctccaacgccctcgtgcttctccacaacagcctcctgaaccaagcagtgaccaagttgaaccaattagagaccaccaaggaccgttttcc

SEQ ID NO: 25391 - DNA, 257 bp, Glycine max
cgacctgtggtggaaagatgaggtttgctttggttggttggtactttgttgtagcatatagtcagtaagattatatgtttcttttttctgttttataaaaaaagttgtttattttttgggagaataaataaaagtccgatcagagagggaatttaagatagagaccaataaagaagaagaggggccttaattaaggttgtatttttttttttttttatctccatcttgttttttatgttcgttcctggtgcgtaaat

SEQ ID NO: 25392 - DNA, 471 bp, Glycine max
gttattgttgaatcagcctcattccacaaagaggctaacatcaatcctcccaaaaaaagtcctgttcctcccacttttgtgaaaactttcaccattgcatcccttcaacagtatacaaatagcttttctcaagacaatcttataggtttaggcatgctggggagtgtgtatagggcagagcttccagatggaaagatacttgctgtgaagaaactagacaagagagtttctgatcaccaaacagatgatgagtttcttgaattgataaacagtatttgacagaattccggcatccaaatattgttgagcttattgggtactgtgcagagcatggccaaaggcttctgatttatgagtattgcagtaatgggtcgctgcaggatgcactccattcacatgatgaattcaaaacaagactgtcatggaatgctcgcattcggatagcactcggggcagctagatccttagagt

SEQ ID NO: 25393 - DNA, 412 bp, Glycine max
gtcagcgacatccaatgcgacactgtgaaggaggagaatgcaataacggaggagctatcagagtggcaggacagtgtgagcgagatgatgggcccaggtgcgaacatcaacgacaagatcggacggctggtatgcatcataaagaaagcagatgatctacggctgagaaccttgcggagtgtggtggggctactgtcgccgcagcaggctattgagttcttgattgcatcggcggagttgctagttgggatacgcggttggggattgaatcatgaccgtccacgtggcagatgaaagtggaattgagtttaggccacaatttctctattttgattgaaattcattgtggccttaaaatgattgtgtattatttattactagttactagaactagaacagtccttgctgaaca

SEQ ID NO: 25394 - DNA, 268 bp, Glycine max
gtcataatatggaacagaatggacttttattcaagataactatttgcttgaactgtatgtaagactttaattttacaatatgtacataccagtatcattttgctgaatttgagattctgtcctttgcaagtcaatttcttcaactcaaatgctcatttcttattacaagttaatggtagtgatctttctttatttatggtgaacttgtccagtgattatttgtgttgctggcatttgggttgagtgttagtttaattatttggacata

SEQ ID NO: 25395 - DNA, 275 bp, Glycine max
gaggttctctatttgtggataagtggggtccacctggccacgtggaccgcgccgagccgggagtgtttaacctgctgggagccgctaattcggctcgcggcgccgagctgtgtctccgtttgtttggagtggtggtggtatgagatcatgattttgttgtgtgggttgttggtggaccccactgccagcgtggcggctatggggattttaatccagactacgtccttgatctacgtttttccctcctcgctggggcttgcggtgtctacgcgcgt

SEQ ID NO: 25396 - DNA, 672 bp, Glycine max
acggcgcaggcgccgaatccggagatttgaagggagagacggcgccggtggacggcctcttgaactggcagaatgcgagattgaaggcggagattttaacgcatcctctgtacgaacagcttctgtcggcacacgtggcgtgcttgcggatcgccacgccggtcgaccagttgcccaggatcgacgctcagctcgcacagtcccagaatgtcgtcgccaagtactctgccttcggacaagccatcgttggcgacgataaagaactcgatcagttcttgtcccactatgttctgttgctctgttctttcaaagaacaacttcaacagcatgtccgggtccatgcaatggaagcagtcatggcttgttgggagatcgagcaatccttacaaagtttaacaggagtttcacccggggaaggtacgggagcaacaatgtctgatgacgaagatgagcaagtagatagtgatgccaatctgtttgatggtgctttggatggtcctgatagcatgggattcggtcctcttattcccacagagaatgagcggtcccgcacggaacgtgtaagacctgaagtaaagcacgaattgaaacagggttataaagagaaaattgtggacataagagaggaaattttacgcaagagatgagttgggaaacttcctggtgacacga

SEQ ID NO: 25397 - DNA, 759 bp, Glycine max
ttctggctttcctcgcggggaggattatccgtctcctgagatctttgcgaattggagtcctgtgtatttattcacttcaaaagaggacatggactccaaagaatctgaagcagctttttgcatgggcgggcaggtaacagaggaaggcctaaagtggttactggataaaggatataaaactatcatagatctcagagaagaggatgtaaaagataacttctatcaagcagctgtgtgtgatgctatttcatctggaagtatcaagttggtcagaatccctgttaaagttaggactgcacctacgatggaacaggttgagaggtttgcatcatatgtttcagattgcagcaaaagaccaatgtatcttcatagtaaggagggagtttggagaacatctgccatggtctccagatggaggcagtacatgactcgccctgcatcacagtttttttctaatcaagcagttatttccaatgacatgtcatcatattatacaattggatctggaaagctgcaggactcaatgattgccgaaggatcctccctgcaaaaagatactaatttgctgcaagagggtttgggtgcaacacatggttctgccggcacatttgactcatgttcctcttcaaaaaagaataacgaaaaaacacaaagtaatggagctttaagtgaacttactcctgatgatattgcttcatcacaagccactgctgctactggggaaggatcttttcccagtttctccagtgaaactagccc

SEQ ID NO: 25398 - DNA, 303 bp, Glycine max
ctgatgttttgggtgcatgttcacccaagactttctcctgtaaaccgttaccctaaacctttccaaagtcttgtaagccattactcaccctaacgtacttgctccgttcgtaagaacacttcgactttgcccttcgcctcgcctcgcctcgcctcgcctccgatttccttctttctccaccaatggaagttccttcggaggtaccatctactgacactggcaccagcaccggcaccggcgaaaccatgagcaagaatgcgttgaagcgggagctgaagaacaaacagagagaggaagaaagga

SEQ ID NO: 25399 - DNA, 273 bp, Glycine max
gatcttctctttatcctctcatctcctctcgccgtctcctgcacgaaacccataacctcacgcaaccaaacacgcccttagctccaacccattcccctcgtcatcggaaaattcaaccgccacgccgtgaaatatggaggctccggcggtggttggcgatcttgttgggatccaattgacgttgtcgtgccgctacttgtttgggatctctaagcgtatctgttttctgactttcttcgtcttcaaattttaaaaacgatggcgagaatcgag

SEQ ID NO: 25400 - DNA, 292 bp, Glycine max
cactctcacattatttctaggatccctttttttcatttcacttcacttcatccatctttcagctatgaacgctctagcagccaccaaccgtaacttccgacgtgcagctcacattctcggtttggacactaagcttgagaatagccttctcattcccttcagggaaatcaaagttgaatgcacgatcccaaaagatgacggaacactagtatcatatgtaggattcagaattcaacatgacaatgctcgtggaccgatgaaaggagggattcgttatcacccggaggttgac

SEQ ID NO: 25401 - DNA, 263 bp, Glycine max
gtgcccagcgctgaaaatatcagctttttgggcaattaactattgacagaatggatcccaaaattgatagtaattattaagggttgtgcccagcgctcaaaaatcttgttttgctttgtattttataaatacttagtttttcctagtaattcagagagatattacgcgtctactgttaaataatagatacatagacaagatacctcaccagtggacaattcatgggttctttaacttgtgtgttagtggaccttacgctatat

SEQ ID NO: 25402 - DNA, 404 bp, Glycine max
caagcctgtactgggcagattgaaaattactctagtgagtcttgcaacttcattacttgtatgtgcacttatcctcattaacattgatggggaccaaaacctgacatcaaaagaacctagagttcgagttgtacctggagtttacaatgatgattctgcaagattatttgaaccagatgcctttcgtgatgaacttgatcttcaataatacatgttgaccgcttatactaaagaattatcaacgctggaccctccattcaatgacagcatgtagttatttgggaggaacgggtgctccatatgttcagtatcaaattctataatgtacatatcttatatttgcctttttacacaccatatgtttactgtaaagttgaaaataaaatgaacatatgtacattttc

SEQ ID NO: 25403 - DNA, 596 bp, Glycine max
  unsure (1)..(596): unsure at all n locations
cttgcggatgatcacaaaaacatgtcttcctctctctaccaaactctaattcgtccaccacctttgctgctacaacaacagaatctgatgaacaacacaagagacctagaaggcaaagattttggtattggtattggtaatggtaataatggtatctttcctagtttaactttgccttttcctattcatcatcaaagccaaagcctactcttccctttctcaacctcaagcagctcttttgataccaacccttgttcagtagtgtcaacttctcttagatcctccaatgtttataactatggggaggatcagtttaaagcaatagaggaaccaaccatcaatagtactattacaactactactatagtgcctagcaccaacaacacacatcatccatgggagatagcagcagcaacaagtggtgttggcttgggaacttcttcaaattcaaactattggaattgggaggattttgattcattggtctcaactgatctaaaagatccctgngatggttcagatatcaaaccttgagatcaaactatcagaaacacatcatggtagtgtccatagattagttatttaatttaattggg

SEQ ID NO: 25404 - DNA, 620 bp, Glycine max
ggagattggtggaagtagctcgtatagatactcaggtacttttgatgcggtacttaaaatgatacgttatgaaggactacctggcttttataaggggatgagcacaaagatagtacaaagtgtttttgcagcttctgttctattcatggttaaggaggagcttgttaaggcttttatggttgtggcagataagagcaaaaaagttgtatcaaatataagtagttgactttcttcttttggataaagaaagtaaaacaagtagttgacttctttaccatatgaaagggataactccctcttgatctacctctccctgttggttattcacagattctggtgagagaatcatgaacttgaagtcttcaccaaataatggatgaaactaactccactagtctagatgagccatcctctctggacatatgttatctctttgaagtgctgcagatcactttggaaactgtcacatagctgatgttcaagatccaaggaactgtcaaactcttaaacatgaaagtggcttcctcctacagcagattattcttgttttcagtgactgcccttttgtgttctgaactttcattactaagtttgccatatatcagtgtatttctgtgttt

SEQ ID NO: 25405 - DNA, 252 bp, Glycine max
gtccaaaaattatttgatgagatgaaagcaagacgcatttatcctaatgatctaacttactcaacattgattaaaatatacactaaaggtggaatgtatgctgaggcgatggatgtttatagagagctaaagcaggaaggcatgaagacagatgttgtattttacagtgctctaattgatgctttaatgcaaaaatggtttgattgaatcttctctgaggctgctggatgtgatgacagagagaggaagtag

SEQ ID NO: 25406 - DNA, 258 bp, Glycine max
taacgcacgatccaaaagcagagagcaaagttgtttgactgataccagtttattgattttgatatccgaacacacattctttcagcaaataagtacggatctatatatgtaaaaaaatgaacaaaaaagctttgtccattttgatgcgcgccagaatgaagcccaacgatcgtacaagcctttctctctctcctattcctctaacaaacgcgaccagtcaaatgcagcagcagaattcccgccaaaacggatcgccag

SEQ ID NO: 25407 - DNA, 350 bp, Glycine max
tctcgagccgattcggctcgaggacagtggctgcagcgggtctaacatgtgcatctccgcattggtccatacgtgtgtgacggatggaactatggtggtttccctctttggctgcacttcattccgggaatcaagttccgaactgacaatgaacccttcaaggcagaaatgaagcgattcactgccaaacttgtggatatgatcaagcaagagaagctatatgcctcccaaggaggacctgttattttatctcagattgacaatgagtatggaaacattgatacggcctacggtgctgcgggtaaatcctacattaagtgggcagcaactatggctacatctcttgatac

SEQ ID NO: 25408 - DNA, 260 bp, Glycine max
agcattgttgctgacaagggtctaaaaaagccactctatacatctgctcgtttaaagaagggagaagttctttatctggagacacactcctgcagatatgagctctgttttactggagagaagatggcgaaggctataccagcaactcagatgcatgacccagatacagagaagtctcaaaatcaccatcaccatcaccatcctgcaaatggtgacaaagctgattctgataatgttatggttgatgtatttcgatggtc

SEQ ID NO: 25409 - DNA, 122 bp, Glycine max
atttgttgaaactatatacaaatttcacattgatcagatctaaacacaacctttgcaagttgcaacaacattcaaaggttgtgactagatctgatcaatgtaaaatttgttgaaactatata

SEQ ID NO: 25410 - DNA, 668 bp, Glycine max
aggggatgctgctgaattatgttctgttctttttggaaagaccaggattcggtccagaatggctgctgcacgttgtgttgaacctctggtctctctccttgtaagtgagtttagtcctgctcagcattcagttgtccgtgcattggataggcttgttgatgatgagcaactggctgaattagttgctgcacatggtgcagtgattcctcttgttggcctactttatggtaggaattatgtacttcacgaggccatttgcagagctctggtcaagttaggaaaagacaggccagcttgtaaaatggaaatggtgaaagctggagttattgaaagcatacttgacatccttcatgaagcacctgattatctgtgtgcagcttttgcagaattgttgcgtatattgaccaataatgctagcatagctaaaggaccatcggctgctaaagtagttgaacccctgtttatgttgctgacaagagaagaatttgggcctgatggacagcacagtgcattgcaggttttagttaatatcttagaacatccgcagtgtcgtgctgattacacattgacttgtcaccaagatattgaacctcttatccctttgcttgattctccaatatcagcagagcaacagttggctgctgagcttctctcgcatctacttttag

SEQ ID NO: 25411 - DNA, 558 bp, Glycine max
tgtccagataaattaaagccttgggagtgaaaatggtactttctggagaaggttcagatgaaatatttggaggttacctgtattttcacaaggcacctaacaagaaagagtttcatgaagaaacatgtcgaaaaattaaagctcttcatctttatgactgcctgagagccaataaatcaactgcagcatggggtgtagaggcacgtgtaccattcttggataaagaatttatcaacgtagccatgagtatagatccggaatggaaaatgataaggcctgatcttggaaggatagagaagtgggtattacgcaatgcatttgatgacgataagaatccatatttaccaaagcacatattgtacaggcagaaggaacaattcagtgatggggttggttacagctggattgatggcttgaaggatcacgcaaacaaacaagtcacagatgcgacgatgatggctgccaattttatttaccctgaaaacactcctaccacaaaagaaggatacctctacaggacaatttttgagaagttctttccaaagaatgcagcaaagg

SEQ ID NO: 25412 - DNA, 716 bp, Glycine max
cttgtaagatggagaacattaacatcacactggttttgcgagcaaagagatcgaagccagtgaagagcgagcgagagagctaggaacgtgacataacataccacaatgaatcatcgaccacctttccaagaccacatgaggctcatgtctcagttattccctgctgatgcatacactcaaattatttctcaacaagggtagcaatgagaatacctagctacatgctcaaactcaaaaacgttactcttgtgttgtattcatcaaagttttctttataaaataaattggaagagcttcagctagctatatacctttgtttttaactttttcatgtgtatcattatttttcaggagagactaataagaagccaagacgccgtcgtaacaagaagaacaaaggaggagaaaacggtgcctcggaagccaaccagaagaggaagcttagtgaggtgcaagttaatttacttgaacaaaactttggaaatgaacgcaaacttgagtccgaaagaaaggataggctggcaatggagcttggtttggaccctcgacaagttgctgtgtggtttcaaaacagaagagcccgttggaagaacaaaaagttggaagaagagtactccagccttaaaaaaaatcatgaagccaccttgcttgagaaatgttgcctggagagtgaggtgttgaagctcaaagagcaactttctgaggcagagaaagag

SEQ ID NO: 25413 - DNA, 259 bp, Glycine max
cacaaggcacctagaaaggttgcaactgttgatcaaaattctggacattccaagctgaagattactattcctagagagcctgacctagaaacagctcacagagcacaaaggattagacctaaacctgctgcagaggcagaagttgtgacagtggctgtccccagattcaaagcacgcccgttaaacagaaaaattctaaatgctccttcgtttccacttcccaagaggagcactccacgattgccagaatttctagaat

SEQ ID NO: 25414 - DNA, 267 bp, Glycine max
gaatttacatataaatattacatgctttgattttaataaacttctatatgaaaaaatggttcatgcaatattttcttaggacctaaatattatattcaacttgctattctaaaataattaatattatttcagtctcaaatattggtgtatttagactaaaagggttaatgttattttatcttgacttactaaattatttttttgatgttagaatatcatgcttactataaattgttgatgatagtttttgatatttcaaatagaaaa

SEQ ID NO: 25415 - DNA, 405 bp, Glycine max
gatcgacacaaattatgtttcgcacaaattatgttttttcattttgttctctctgatgacgacgacaacaacaaaaacaccaacctttttatcgtttcacttgtttcccatatttcttagcttcagatctattcgattcactcttttttttctttaaattatttttacttcaacttagttatcattgtttcgcacgctttttgttacctccaaaagcatgattttttcaaggattgcgcgctccgtttcgcgttcgcctcgcgctagaaattttttgcacggtgatgggagattcggaacccatgtcggagtgccacggacgaatgcgtattctgaaggagccgagagggtattaggatttgctaggggctacgtgttttctgccagagctcttagtaatggctt

SEQ ID NO: 25416 - DNA, 250 bp, Glycine max
gtatgatgtcaagttcccttatgtggtggatcgtggtccaccggcgtaaatctattcggtgtttactcccctcgaattccccaataaactttcaatcacaccttgcgagaaggaaatgcttgcatctattggttggctaaatgaggagcaaactctcaagataacttccttttgattagttcttgttcttcacccatgcatcatttgttaattgttaaaaaatacaaattatgctagatatattgttaat

SEQ ID NO: 25417 - DNA, 304 bp, Glycine max
cggtcatatttcattagagagagagagagagagagatgcggaagagaaagggtgcatctgcagtggtagaagacgaagaagaaaacgaaaacgaggattgtgaaggaaatggtttctttgcttgctacctcttgacatccctcagcccccgctacaaaggccacacttatatcggattcacagtgaatccgaggcgccggatcaggcaacacaatggggagattgggtgtggagcttggagaacgaggaagaggaggccttgggagatggttttgtgtatctatggcttcccaacaaatgtctc

SEQ ID NO: 25418 - DNA, 263 bp, Glycine max
ggaacctaaccttcaccacttgtggtgcttatggtatcttggcctatatctctatctggtccaacctccctcataggaaaactgattctgatgagttccatgttccgggattccctcaaaactaccgtttccacaaaacacaactgcctaggtttcttcaagcggctgatggcaccgatgactggtcaagattcctcgttccacagattcaactttctatgaagtctgatgggtggatttgcaatacgattgaaaagatagag

SEQ ID NO: 25419 - DNA, 567 bp, Glycine max
catgaatcattacttgtggagtttcttgtgtgctcttggggaagctcagtacctgaaccgaacattgattatggatttgagcatatgtctgtcttcgatatacacatcatcgaagcaggatgaggagggaaaagatttcaggttctactttgattttgagcatttaaaggaggcggcgtctgtattggacaaggagcagttttgggcagattggaaccaatggcaacaaaaagatgggatgagtcttcatcttgtggaggatttcagggtcacgcccatgaagcttatggatgtgaaggatgccttgatcatgaggaagtttggatctgttgagccggataactactggtatagagtctgtgaaggagagacagaatccgtcgtgcaaaggccgtggcatttgttatggaaatcaaggcggttgatggatatagtgtctgcaatatcttcaaagttgaactgggactatgattctgttcatgttgtgaggggggaaaaggcaaggaacaaggagctttggccaaatcttgatgcacacacctcccctgatgcgcttctctcaacctt

SEQ ID NO: 25420 - DNA, 293 bp, Glycine max
acttacagaagcctcttttaatttccaccccctctagattttctctctaactggttttccttagatctctcacaatgacctttaatcttatgcttttgttctgtttggttgcagtgatcaacaatgttgttgttccaactagtgcaagacaactcatgagtaccaccactacttcaccagacgagaaagaagtgatgatgaatattggcactgcaaatagagggcatgatgaaaaacatgatcatcaagtacaagtagatgatccaacaagcaagaactataacgtggaaaag

SEQ ID NO: 25421 - DNA, 1121 bp, Glycine max
tagctgcttttgtatctggtgtcacgttgatgctattaacttgcattgtgtggttaaaattggtgtcatatgcacatacaaactatgatatgagagcacttactgtttcgaatgaaaagggagaaacattacccaatactttgattatggagtatccgtacactgtgaccttcaggagtttggcatacttcatggttgctcctacattatgctatcagacaagctatcctcgcacaccttcagttcgaaagggttgggtgtttcgtcaacttgtcaagctgataatatttacaggagttatgggatttataatagaacaatatatgaatcctattgtacaaaactcaactcatcctttgaagggaaaccttctatatgccattgagagaattctgaagctttctgtcccaaatgtatatgtgtggctctgcatgttctactgctttttccacctttggttaaatatacttgcagagcttgttcgatttggtgatcgtgagttctataaagattggtggaatgccaaaactgttgaagagtattggaggatgtggaatatgcctgtgcacaaatggatggttcgccacatatattttccatgcttaaggcgtggtatacccaagggtgctgcttcattaattgcattcctggtttctgctgtgtttcatgagttatgcattgccgttccttgccacatgttcaagttgtgggcttttataggaattatgtttcaggttcctttggtcttgatcactaattacctccaaaataaatacagaaactcaatggttggaaatatgattttttggttcatattttgtattcttggtcaaccaatgagcgtactattgtactaccatgacttgatgaatagaaaaggagaagttgactaaggtagcattacactgttcatgtggatgagcttttgcgttttctgagtaaaatcgatgttgatatgttggcttctttgttttgtatggggatcaccacctgttttgatagtgagtcctctgggttgcatttccatgttaattgcctagtctttcgagcttaattcatcttgatgtatttctttgacttagttgctttggcgcttttatcatgaaagcaattttggaagc

SEQ ID NO: 25422 - DNA, 411 bp, Glycine max
cagaaaactctgttctcggccatggaagaattacggaaactagagaaagtacatagcatgctggaattcatggaatcacggggcgtttcaaacctcgatcatcactctaaccgcttcctcgctaatttcattctcttcttgatagaaccctccggagaccttgccataaacgacaagtgctccttgctttcccagcttattcccactctctcatcttcattccttgaagacgcgtcatttgcatttgcattttcatttcatttccctttcgcttttgcagctctcatctgcattcctcgaagacgcgtatcaacaccaccttttcaccacctctaaacaacaaaattctggtggttttcaacaaagtcttgttggaaattctttgcttagttgcaatcagatgaaagaata

SEQ ID NO: 25423 - DNA, 255 bp, Glycine max
tgactacacagcttttgcagcaactacttagccctcctccagctgcagttcttgtagcagatgtgaagttgcatcatgagagtgtggtctactctgttgccagattagcattaggagaagcatgcagttcaatctcatggtccagatgtgatacacttttgcctcctggcaacaagaacctgctgccagagaagtgcaaatcatccgataaaattgatcattacattttgaaagttacggactttgttgatagag

SEQ ID NO: 25424 - DNA, 829 bp, Glycine max
gtctcatgcaagcacttgctgtcctagacttgagctgtaacatgttaagtggaccaattcctcctatcttgggcaatttaacttacacagaaaaattgtacttgcatggaaacaagctgacgggcttcatccccccagagcttggaaatatgtcaaagcttcactatttggaactgaatgataaccatttaagtggacatatcccacctgagcttggaaagcttactgatctgtttgacttaaatgttgctaacaacaatctcaaggggccaattcctagtaatcttagctcatgtaaaaatctcaacagcctcaatgtgcatggaaacaaattgaatggatcaattcccccttctttgcagagcttggagagtatgacctctttgaatctttcttccaacaatcttcagggcgcaattccaattgaactgtcgcggattggcaatttggatacattggatatttcaaacaataacttagttggttccatcccttcttcccttggtgacttggaacatcttctgaagttgaatctaagcagaaacaatttaacaggaattattccagcagaatttggaaatcttagaagtgttatggaaattgatctttcaaataatcaactctctggcttgattcctgatgaacttagtcagcttcaaaacatgatatccttgagacttgaaaataacaaattgactggcgatgtggcatcactttcaaattgcattagtctctctctacttaatgtgtcctataacaaactatttggtgttatcccaacgagtaacaactttaccaggtttccccctgacagtttcattggaaaccc

SEQ ID NO: 25425 - DNA, 510 bp, Glycine max
tttttcataaagggaattgcataacatctatcatgatggtgggaagacagttcataaaaacgaaatatgggatacactagtgaatagtgacttcccacgttttgccaaattgtcaatctggttacatgaagaatgttgctgaattataattcaattcatgccaatttcccttccagttggaaacaaaattctggcattttcctccctttgcttgggtttctataaccagtggccaactaaaacaccacttgaccaagggaaaaatgctaccggggtctacacagggttgatatcagtttaaataatacaaggtatcgttatcatcatcactgcattaaatactgttacaatgaacatctgatcataatgtcaacagcagactcttatttctcctacttatcctcctttatcttccattttgctctaggaagaattctcattataaagttgtgaacaatagtatgtgtatgagtcatgcgcaaggttctgttcctgagagcggaaatacat

SEQ ID NO: 25426 - DNA, 346 bp, Glycine max
gccacgtttgttctcacacgagaggatttggagaagataaagaaaagggtcttctccaagtgggaccaagtgaaagacccagaaccagaaccagaatcagaatcagaatcaaaatcaacggttaattcttcttcaaagccaccaactttatcatcctttgttcttgcatgtgcatattctgttgtgtgtattgcaaaagcggttcacggggttgaaaaggagaagcaaaagtttggtttctggttcccggtggattatagggctaggttagagcctccaatccctgatacctattttggaaactgtgtgtggagccacttggtggatgcagaacccttggacttca

SEQ ID NO: 25427 - DNA, 267 bp, Glycine max
gaaaatcgtgtggggtcatctgtgatggaagttgttgaaatgataggaccattgtatgagctggtttgatccgcttattttccctgcatcctgggttgtgagtttacaatataggttttaagctttgcatgctgcaacttttcatgtcttatgttctgtttgtctctggcatgattccttggctgtccatattgtatttttttctcccttcagtgtgtgtgatcattaacatgtaccttatttgtgtaccccaaacttctgtgtttg

SEQ ID NO: 25428 - DNA, 687 bp, Glycine max
ctcggctggtatggtggagaaaaatggtgaacttggagggaagagtttggggctttctgggaagcttaagaaggaaaatagctttgtgaatcggagagaagctttttcagattcaaggtctaatagtggtcactctagaaagcaaaagaagcacgatactgggttttcccatgaacttggtttatcgtctccttcacctggggggaaacaggtgagtcagaggggttctattctgggaaaagcaggcgagagagcagtggaagttctggacacaattggaagtggcatgcctaagttaaacactaatagcgggtttgtctctggcacaacttttagagggaataagatatcaatactggcattcgaagtagctaatacaataaccaaaggagcaattttgtttcaatcacttgctgaagaaaacattcagttccttaaaaatgaggttttacaatcggagggggttcagctattggtatcgaatgatgtggagaagttaataactcttgctgaggctgacaaaagggaagaactcaatgtcttctcaagggaagtaattaggtttggaaatatgtgtaaagatccacagtggcacaacctagacagatatttctcaagattagactttgatgtcctggatgacaaacgatatcaggaagatgcagaaaagacgatgcaggagtttac

SEQ ID NO: 25429 - DNA, 442 bp, Glycine max
gattgtttgaagggcaagaaatcagattctaatgggggggtatttgataatgtatggggcgttctagatgggagggagttgtgtgatactaatagggtgaagggtgtgagtccagagtctaatggggacaagaaagttcagagcaaaggacttgttgatttggatatgctggacaatgggacggatgagcatattatcagaaacttgtgcagtcttaatactgagaggaatatactggaagagtttgatggggggaaaatattaactgtggatgcatctgatgcagagagcaacatgcctagattgtcggatggaagcaagtgctgtgataatgatgatgatgatgatagcgatgaagtcttgatattggatccatctggtgttgacaaagagatatttggtcgtaagaggaagagagagtctaagtcagaaatgctaagtt

SEQ ID NO: 25430 - DNA, 272 bp, Glycine max
ctttctcttgttctttttacctcaggtattttagtctttcatggattataagatcactgagaagtgtatgcatgtaatactaagcaccatagctgttctgcttgaatttatttgtgtgtaaattgtaatgtttcagcgttggctttccctgtagctgctacaatggtactgtatatctattttttgcattgttttcattttttcttttacttggtcttcattgctttgaaattaataaaacaatataatatagtttgaactttgaactattg

SEQ ID NO: 25431 - DNA, 336 bp, Glycine max
ggactctctagctagcacctctctctattctctccctaagtgactcctacttcataatcagagggcatgcctgaatgtccagagaaagggagagatttgatgagatagggaagaagatcaagagggaaggagatgtttcatctcaaatgggaagaagacacatgttaggccctccaggaaccctaaatactatcaccccttgtgcggcatgtaagttgttgagaagaagatgtgcccaagaatgtcccttttctccatatttctctccccatgagccccaaaaatttgcttctgtccacaaagtttttggtgccagcaacgtctcaaagatgctca

SEQ ID NO: 25432 - DNA, 317 bp, Glycine max
acgtttctcacgcatgcactacttctccactgacgacgaccaaaacgaggatgacgacgacaccgacctcgacttcgtcgacgacagcaatgtcagccctgctgaagaggaggaacccataaaatccgacattctcggcggcgagaatttcaatcgccgcagggaatttcgggtggtgctggacccgcgaggcaagtgggttcaggaatggaacagggtgttcctcctcgtgtgcgccaccgggttgttcgtggactcgctgttcttctacgcgctgtcgataagcgacaacgtgtatgtgcctcttcgtggatggg

SEQ ID NO: 25433 - DNA, 277 bp, Glycine max
gtcattctcaggtcagacactgatattatggaacttgtaggtgcacatagagaagatttgtcttcagtcatgtcctcaaagagaatgcccacatttaaaacattgagtatcaccacaaaggacacagattcactgagggatttagaacttgagccaaaagtgagaagtaggatgagcatcgtgatatgtcagatcttcagttgagccaaaaggccaacatagatagatattcctaaccccgattttacagtgctagtgcaattgcaagaatggctga

SEQ ID NO: 25434 - DNA, 374 bp, Glycine max
ctcgagccgtaaaaacaggatggtggtactgaagaatgcacatgcactcctaattttcacaatttccttcctcagccacacttgtagaagcaaaggggaaaaaaactaaggaaaggaacatagcattgctcttaatatcctaactcctagattcccatctctggcttctcaccttgcataatggctacaaaagtgaaacgcaagactttttcaattgctgcagcaacatggatggtcttgtgtatcatcactatgatctgcaatgtcagtttagcagatagaattttgaaagaaaaagaattaggaaatgatgttccgaaagagagacaaggaattctcaaagccattgtgaattgcttatgggaggaaggaaa

SEQ ID NO: 25435 - DNA, 306 bp, Glycine max
cgctcttgcagattatgttcacggcaagggtcttaagcttggaatttattcagatgctgggtattttacttgtagcaaacagatgcctggttctctctggtcatgagtttcaagatgccaagacttttgcatcatggggtattgattatttgaagtatgataactgtaacaatgatggatcaaaaccaactgatagataccctattatgactcgggctttaatgatggctggtcgtccaatcttcttctcactatgtgaatggggagacttacacccagctctatggggtgctaaagtgggaaaca

SEQ ID NO: 25436 - DNA, 266 bp, Glycine max
cgaaaaatgctttggaacctgatgaagaaatgaaggccggttcacctgctgtggactgggagagagaatgcttcaaaaccttgtagagcagaaatgttaaacgaggatagtaaacagataaagaatgatagatgacggtgcaaaggatgcaataggcttgagaaatcaaaatgaagataatgaaaaatacactctttcacgactctttcattttcttagcctggcaaagatattctatagtgcccttttggtgttataatggatcg

SEQ ID NO: 25437 - DNA, 259 bp, Glycine max
gttgaaactttggatccacaagttaggcagtttagtgatttgtcctcttggatagatgacaatggggagcggttgaaaggaaaaaatatactcatgtattgtactggtggaatcaggtgtgaaatggcatcggcatatattaggtcaaaaggtgctggggtttgaggaatgtgtttcagttatttgggggcatacaacggtatttggagcaattcccagatggtgggtttttcaaaggaaaaaattttgtgtttgatca

SEQ ID NO: 25438 - DNA, 406 bp, Glycine max
gacctaactaacccacacttcatatcttctcgtgtggacacaaattggaattggaattgaaattccccactactttttcaatgccatatgctgcaaacccttcacttttcacttcttttctagctctcatttgatattcccaatctctctgtttctatttctttgttcgctgttcgttgcttcacactatggcttcttggtgggatttaagacccttctttcgttttcagtctgttaggacccgatttcaggaattcaggacgagggaagtccaacttggttcacacaactgtgagttctcatggatatgcagttgcaagaacacacaaacatgattggctcattctcttgctcctcgtgttgattgttatcagcctgtacattatccatcctttccatcgctttg

SEQ ID NO: 25439 - DNA, 473 bp, Glycine max
ccaaggttaagatgccacttcccgatatgatggctgcagtactagctttggatgagtcagtattggatgttgatcaagtggaaaatctcattaagttttgtcctaccaaagaggagatggatcttttgaagggatacactggtgacaaggagattttggggaagtgtgaacagttttttctggagttgatgaaggtgccaagggtggagtcaaaattaagagtatttgcattcaagattcagtttggttctcaggtaacagaatttaagaagagtttaaacactgtgaactctgcctgtgaagaggtccggaattctgttaaactaaaggagataatgaagaaaattctttatttgggtaatacattgaatcaaggaacggcaaggggatctgcagttggattcaagttggatagtcttttaaagctcactgacactcgtgcttctaacagtaaaatgacactgatgcattat

SEQ ID NO: 25440 - DNA, 359 bp, Glycine max
taaattcttagttcttgccaaaaccctgaaggaagaagaacccaaaactttgggcaacaagaggcacaaaattttattattatgaagtgagagactcctcagagatgtttgttgcatcccttgcttgctcttgcacttatccctcccttttgttgcgatctttgtgtcccacatttacttcgtggtcttatcagctcaagcaactcaacagaaagaagaatcgcattttggcatccatcaatggtaacagtgcctacgatgtgggcggaggatatccggaattggagcagaatcagaatggaaagttgcattcagacatgtcttctcaacgcgaagcctccttaaaggaggggaccaat

SEQ ID NO: 25441 - DNA, 526 bp, Glycine max
cgcatctcgagtttttatttacgaaacaaaaaacgaaggaaatgccgtgttagtagagagacagagacaccggtcacagtcacaccacaccggcaatttgtttgcattgcttagggttttggaacagattcaattcagcgttacttcaatccaagcacatggcgaaaggaaagcattcgcatacccgcgcacaagggaagaagtggtcaacgttctcgctggttctgtgggcgcttttcttcctcacactcatcctcgtcgtgctccttgctctcggcattgtttatcttccaaccaccgacgacgattttccaaccacggagctcagcgccttcaggcgcaagacctctcaaagtggcgagagtttggtggaaaactcggagcagtggaccgagattctctcctgggagccaagagcgttcatctatcacaattttctgtctaaagaagaatgtgagtacttgattgaacttgccaaacctcatatggtaaaatcaagtgttgttgatagcaagactgggaagag

SEQ ID NO: 25442 - DNA, 383 bp, Glycine max
acatgatgcagatacacgaggcaatagctgggattcaagccccatgttaggtgcatcccaaaacgtaagagcacactgacgacagaggaaagatcaccaacatgtccataatctgtaaaaattataggagggattcgttgctgataaaccactttagcatcgttggcggtttaaaaatgcggatatcaatcaattcctttgcttgttggattggaaatttgggatgccatgttagttgtctttaattttccggccagcttatatttgttagttgtcaaagcactgtttctatacagagaatgatttaatcggctcaacaggattcaagcatacaatattttgcaactcgaggaaaaggggggaataaatgaatttcttgaact

SEQ ID NO: 25443 - DNA, 381 bp, Glycine max
gtgcgagatgacgacagatgggggatatgtataggtctagttttctagggaatcctgggctgtgtggggatttgaaggggttgtgtgatgggaggggtgaggagaagagtgtgggttatgtttggctgcttcgaacgatttttgttgttgccactttggttttccttgttggtgtggtttggttttactttaggtacaagaatttccaggactcgaagagggctatcgataagtcgaaatggacgttgatgtcgtttcataagctgggttttagtgaagatgagattttgaactgtcttgatgaggataatgtgattggaagcggatcgtccgggaaggtctacaaggttgtgcttagcgtggggaggttgtggctgtgaa

SEQ ID NO: 25444 - DNA, 582 bp, Glycine max
ctcagaaacgtgctgttgacagtggtatgcaggcttcatcagcagtggcaaaagtttgcagaagatctagagctgctttgcctggtaagcctggctcaggcaatattaaacgtggatctgaaaagaaaaagtatgttcagaaggacaatgccaagagtgctactcgcaaagagtcaaaaaacatgtcagcctttattgtggtcccccggcgagacgatcaatttgctgaatcaagtataaaaggaatttctgacattaaaactttgcatggcgttgaaggttccatttctggaattcctctgacttctgagtcaggaaagaaaaaattccttcttcttaaagggaaacagcaggacattcccagtgccactgaggccacagtaaaacagcaaaacgtacaatctggaaattctcctatttcaactcctgcaaaacagaaccagagacgtgaagctagtggaagattgattaggagcatacttctaaataatgaagctcgtcaaagtcagtctacaactggtacacaacataaaattcaaattttaagttctgagaatgggcagcgaccctctcgtcgttttg

SEQ ID NO: 25445 - DNA, 265 bp, Glycine max
cggctcgaggaataaaagaaaagaaaagaattactaaaatagttggtactgtgcggggtttgacattaaggtggagcaatgaatgaaagaaactttagtagtcctagtcctccattgacattgtaatctgagtttgaaggaaatcaagaatcatcatccatcgaaatggcagcagcgtcgtcttcttctcctccaaaggacgaggatcgggaacaagaggaacaaagccaacagcctcagcctcagcatcatccagtcgaagagt

SEQ ID NO: 25446 - DNA, 468 bp, Glycine max
gaaagcattctcagaatgcaacatgctgtgactcatagtaatgacccatatgtagatgactattaccaccaagcttgtctggcaaaaaaaacttctgtggctaagttaaaacatccattttgacccaagccaaataagggaatatcctccacgatcccgtgctaatactgagccacattcatttgttcagattgatgccctagggagagtttcattttcttctattcgtcgtcctcgccctcttcttgaggttgaccctccaaacacttctgctagctctgatcaaaagatttcagagaagccccttgagcaggaacctaggtttgctgcaagagtcacaattgaggatggtctttgtcttcttcttgatgtggatgatattgatcgttacctacagttgaatcagccacaagatagtggaacacatttaagacgaagaaggcaagtcctgttggaaggactagcaac

SEQ ID NO: 25447 - DNA, 979 bp, Glycine max
gttggacttctaattttcctttttgcaccaccccccagatcctgcctcactcttcttccttcctaggatgctgctcatggcctctaccctccctttcccaacactttccattcttcctcacaaggcacactgcaaatcaacaccaaaacttcagccacttcctcacatctctccaagattgattgttgttccataagatcctcccatattattagatcaatcttgcaatgttctaaaaaatgcctctctttccctcacatcaatcacactcccctttttattggaacaaaaggatgtggcacttgctgttgaaggggaatttgggatattggaaggaagaacatttgctctcatacaccccattgtgatggcttctttgttcttgtacaccttgtgggcaggatatttggggtggcagtggaggagagtgaggactattcagaatgagattaatgagttaaagaaacaagtgaagcctaccccagtcaccccagaagaagtgccaccaccatcagaaattgagctcaaaattcagcaacttactgaggagaggaaagagctgctaaaagggtcttacaaggataggcattataatgcaggatccatacttctaggatttggggtgcttgaggctgttggtggaggattgaacacttggattaggacagggaagctattcccaggcccacatttgtttggaggagcagctattgcagtgttgtgggcactttcagcagcattggtaccatcaatgcagagagggagtgaaacagcaagaagtcttcacattgctttgaatacattaaacgtgctgctatttgtgtcacagcttcccactggatttgacattttattgaaagtgtttgagttcacaaactggccttgaatgatgtttcccttagatgtactccaatttgcaacaccaaaatcaccccaatttcatagtttaagatcacactttttctttttcttgaataag

SEQ ID NO: 25448 - DNA, 708 bp, Glycine max
atttaattcagcacttgcttattttgtcaacctgaccaattttttggtcaccaaacataccagtgctcttacccttcaggtacttgggaacgctaaaggggctgtagcagtagtagtttcgattctgatatttagaaacccagtgtcagtcacaggaatgatgggttattcactcacagtcctcggagttgtactttatagtgaagccaaaaagcgaagcaagtgatactgatggtgtcattcatgattctgtggaaatcagcagtgaaatccctatatttgttttcatctctgtgcggacaacctccagataccatgaggcaaatttgttatcatgattatgaccagaatgtttcagactctatataaatttttggccctacatggaaaaacgggttccccattgtattagtacctgtgcagaaatagcccacagtacaaagtttcaataagtgactgatctctctactatatacccatgttggcatataatcgaggaatgtctttttgtcatttattctttgaagaaagagttgtagaaggacctctactcatttgttgtttacattgcttacatttgtttattgatgataaaatttgtatctgggatgcgccaacaacatcatacacacgaattaatagattgatcttctccccctaaaaagaaaaaaactgatggtcaatgctaaaggccaatcttgtggagag

SEQ ID NO: 25449 - DNA, 355 bp, Glycine max
  unsure (1)..(355): unsure at all n locations
ggaatacttctctttctcactaacatcatatcactatacttttcccttaacatgactaggtaccacgatccctactactactacttgtgggaatacttctctttcccacttcacctcatcttcttcgtgttaatacttttctttgtgctagcattctcgtggtacataaactacgagtccttgttggaggacttgctcgtgcaggtgaagatcttcctcgccctcgtgccgctgctgatgttgctcctcgttcactgcctctcgagcggagcgncgttccccataccattgccggaggagagggagtcgctgcacagagctggaggctctccatggggtgtggcactcttgcttc

SEQ ID NO: 25450 - DNA, 490 bp, Glycine max
gcgagtgttgttgggggagaaatatatgatcctgaaacaaattcatggatggaaatgccaaatggaatgggtgaagggtggccagttaagcaggcaggaaccaaattgagtgttgtagtgaatggtgaattatatgcttttgatccttcaaattctgtggatagtggaaggatcaaggtatatgatcaaggagaggatgaatggaaagttgttattggaaaagtccctgtatatgactttaccgaatcggagtctccatatctattagctggtttccatggaaagcttcatttcatcacaaaagatgccaatcatgatatttctgttctgaaggctgatcactgcagtaatgtggattcttcaccatcaacctcagcacctcaatcacccaaatacatggaagatgaattgttgcgagaatcagctgaaacacatgaagctgtttggaaactagttgcaagtaagggttttgagcaggctgaactgatca

SEQ ID NO: 25451 - DNA, 633 bp, Glycine max
acttgaagtgctttctctcagcagatccacaagctttgtcaacagtttgtgctgaattgagtgaggcatgcaagaagcatggcttcttccttgttgtcaaccatggagttgatagcaagctcatagctcaagctcataagctcatagatgatttcttctgcatgcaactctcacagaagcagaaggctcagagaaagattggagaacattgtggctatgctaatagcttcattggaagattctcctccaaacttccttggaaggaaacactttctttccattattctgcagataaatccagaaaaactgtggaggattatttccttaatgtcatgggggaagatttcaaggcaatttgggggtgtgttccaagaatactgtgaagccatgagcaaactctctcttgggataatggagcttctggggatgagcctaggagttggcagggaatgtttcagagatttcttcgaaggaaatgagtcggttatgaggttgaattactacccaccatgccaaaaacctgagttagctttaggaactggacctcattgtgaccctacatccctaaccattctccaccaagatcaagtcggggcctccaagtctttgttgatggaagatggtactctgtcg

SEQ ID NO: 25452 - DNA, 418 bp, Glycine max
gatcaggatttggtcctcgcacaattataatttgtgatcagtgtgaaaaggaatatcatgtgggctgcttgagggatcataagatggcatatttaaaggagttgccagaaggggattggttttgttgcaatattgcacaagaatacattctactttggagaatctcctgattagggtggctgagagacttcctgaatctcttttggatgttataaagaagaagcaagtgggaagatgtttagaaccccttaatgaaattgatgtacgatggaaacttcttaatggaaaaattgcatctcctgaaactaggccattgcttttggaggcagtgtccatgtttcatgaatgctttgatcctatagttgatccagctgccggacgtgacttattcctgccatggtttatggaaggaatttgc

SEQ ID NO: 25453 - DNA, 232 bp, Glycine max
gagatgtcggatgcgccaccgagcccgactcatgagagtgggggcgagcagagcccgcgcggttcgtcgtccggcgcgagggagcaggaccggtacctcccgattgccaacatcagccgcattatgaagaaggctctgcctcccaacggcaagattgcaaaggatgacaaagagcacatgcaggaatgcgtttctgagttcatcagcttcattacaagcgaggcaattgaga

SEQ ID NO: 25454 - DNA, 464 bp, Glycine max
gtaaaagaccaatgaataagaaggaattagcaaaaaatgaggaggacatcatagaaacatattccaattctttaacagtgcacgagactaaactgaaggttgacctaactcagtatgtagaaaagcatgaatttgtctttgatgctgttttgaatgaagaggttacaaatgatgaggtgtatcgtgaaacagtagagcccatagttccaataatatttgaacgcactaaggcaacttgctttgcatacgggcaaacaggaagtggaaaaacttacacaatgaagccactgccacttaaagcatcaagggacatccttagattgatgcatcatacctacaggcaccagggatttcagttgtttgtgagtttctttgaaatatatggtggcaagctctttgatcttcttaatgatcgaaaaaaactttgcatgagggaggatggtaagcagcaagtttgcattgtg

SEQ ID NO: 25455 - DNA, 392 bp, Glycine max
atcttattgctgggtaacttttaacggttactgtattactggtttctaaatttacttcaatagtgagtgctagtattacatgttctcagaaaagatttgatgtaatctttttgacaagtgttcattttatggtatggtgtgtagatcaaactttttatatctgacaatgagttcaacctgactatcattgctaggcgctcacggcattatgctgggaccagatatttgaaacgaggagtgaatgaaaagggtagagtagccaatgatgttgagacagagcagatcatctttacagatgctcgtgatggacgcccaatgcaaatcagttctgtggtgcagatccggggttcaatccctctgttctggtctcaggaaacctctagattgaatat

SEQ ID NO: 25456 - DNA, 344 bp, Glycine max
tcaaaattccataaaatggagcctcgcaaagcttcaccattatcgtgggtcttgatcttcttccttaccatttccttgtggggagttaaggtatcaagtgaagagcaccaccaccatggcaaatctaaagagggacctgtggtggaaagggatcaaaggaggacattacttgtcactgaatttggagagatcactgccattgacatcaaggaaggacaaaaggaactaccctaccatcttcagttcatcacattggagccaaactcgctatttctccctgtgcttctccaagcagacatggtcttttatgttcatacagggagtcgaaagctgacttaggcaaa

SEQ ID NO: 25457 - DNA, 421 bp, Glycine max
  unsure (1)..(421): unsure at all n locations
tctgctctcaatatcacttttctacttctcctcgttgctgctgctgttgttgcttgtttaactctcccagttgacaaggattgctgcttacattcctttgactgtcttggctgttccagcctctgtacttactcttggtggtggttatctatatggccttccaattggcttcattgctgactctatcggtgcaactgttggtgctgtagcatcatttcttcttggtagaacaattgggaaatcacttgtcgtttctaggttgaaggattatccacagtttagattagtaacaattgcaattcagagatctggctntaagatttcaatactccttcggcttgctccatttgtaccatttaacattttgaattacctcctatctgtgactnctgttccatagggggaatatacactggcttct

SEQ ID NO: 25458 - DNA, 255 bp, Glycine max
attcgagccgattcggctcgagtttttgcttacccaaatgcctctccaaccaaaaccaaccacccctttttctctctcctataaacaaccttcctctggagcacacaaagcgtgtgcacacaaaaaaggtcccatttttatgcagggtttgccttgttgagttcagttttcaaaagggttgttttgtttgttgaagaatggctcagtggcagggtaatgcggatgagggaattgactatatgttcaagattgtga

SEQ ID NO: 25459 - DNA, 297 bp, Glycine max
ctgctacaaccttttttctccctcctccatcaaccatgggtgtgaagcacaccaccaccaccaccaccacaattcttttcacttcaatgctacttcacctctccatcatagccattgccaacgatccatgcgcttctcaacacgacgacgacgactccgacatcaccatgattcccatctacggcaattgctcgcctttcaagaactactcaacctcgtgggagaacatcatcatcgacatggcctccaaggacccagaaagagtcgtgtacttgtctagcctcgacgcctcattga

SEQ ID NO: 25460 - DNA, 257 bp, Glycine max
atcacaaaattctgagatatatttatagatatagaacatagctatgacaaagaatgagatgcacataattggaattgtgattataatcatgattgtgatggatttctcacaagctaattacaatccttcatttgggcaaattgagcgaaatcatgtgtctaatctagcttgtgaggataaatgtagactaaaatgtgcatttgtactaatacctccatttactcctgggtatctaatatgtctttacaagtgcatgg

SEQ ID NO: 25461 - DNA, 261 bp, Glycine max
tattgccaaggcaagctcaaaaaacgtggatgcttatacatgtgcttgagaatctgatatgctaaataatacccaattatgagacgattcagcattatagaaactcaaaagtcaaaagcaagtggaatccccgtctttagtatttgttccatggagaagctcatgctcgatcattttttgcatcatcaatgcctttgtcatagttccataatgtcacaattaatatgcacctaagagttgtttgcttttgttttggggggc

SEQ ID NO: 25462 - DNA, 614 bp, Glycine max
tgcgttacatagtcgcattgactaagtactcactgtatctctctattctcccaaaaaataacaaaaaaatcacataaattattctcttggagagacttgaatccctctccgatgtttatatatattttctgtggataaactcttctccatcacactgaattgacacccttatccattgaatgcaccatcaatgcgccatgagaaacagcttcaagaagaccatgttcggggctcgttcttctctgagggtttttatatcaagtaccatctactcacatcattcacgtaaaatttgtagcttttcgcaggaccatgatccgggttcgtgggaatcaatggagggtcttcttcgttgccctgcgaatttcgttcctctgtctcccatcagcttcctagagagagcagcgaaggtttgcagagacagaacctcgcttgtgtatggttctttggagtataactggggtgagacccatcaacggtgcttgaaactcgcttctgctattacccacttggggatttcacgtggggatgtggttgccaccctatcacctaatgtccctgccatgtatgagctacattttgctggcccaatggctggagccattctttgcacc

SEQ ID NO: 25463 - DNA, 250 bp, Glycine max
ataaaatcaatctcaagaggtaaaacaccaccaccaggcatgcaatcaatatcactctcagatgtcactctcagcatcatattcagacatatgatcaagtacgatctcagactcaatgcatgaagagtgagaggcatgctgattagagtaaagatcagtcatgtatgcatcagcaacatggtcaattatttcagcacgacatacagaaagatcttcagatgggtatttcatagcatccagaatattgaaa

SEQ ID NO: 25464 - DNA, 526 bp, Glycine max
gcagactgcgcaatcgggttcggcaagaacgccattggcggccagagacggcaagatctatgtggtggaggacgacggcgacgacgacgccgtgaacccgaagccgggaaccctccggcacgccgtgatccaagacgagcccttatggataatcttcgccagagacatggtgatccaacttaaagaagagcttctcatgaactccttcaagaccatcgacggaagaggtgccagcgtgcacgttgctgggggtccatgcataacgatacagtacgtgaccaacgtcatcatccatgggattcacatacacgattgcaagcagggagggaacgctatggtgcgggactccccacggcactacggctggagaaccgtatcggacggtgacggcgtgtccatcttcggagggagccacgtgtgggttgaccattgctcgctgtctaactgcaacgacgggttgatcgacgccatccatggctccaccgctattaccatttctaataactacatgacgcatcatgataag

SEQ ID NO: 25465 - DNA, 294 bp, Glycine max
cagctcgagcgtgaaatttgaacaattctgaggcatcacaataaataaacactgagaaaggagagaaggctgtgcttgaggcatatccttgatgggtaataacaggttcagattgtcagatatgatgccaaatgcatggttctataagctcaaagatatgagcaaatcaaggaagagaaatggccctcatgttatgaagaacaaagtagcctcaccaacaacatcacaaaggtcacagccaagatactctcattatttctccattgaaccacacatagctggtaagttatacaa

SEQ ID NO: 25466 - DNA, 364 bp, Glycine max
ttactttcttcctccgtcttcttccctttcaaaccctagaaacagcaaaatcccccttttgatgcaaatgggatcactccaccaactctagagccacacccttcaagatttagctcatgcccacttcaattatggctccattttccacttccccccacttctcagccctcaccttcctcatcttgttcctcaaaacacaagcttctgatccactctctttcttttccttcacggattttgagaaagatccaaattttaagtcaagtgtggggctttatggcaatgcaaaagttgtcaataatggttctgaggttcttctttctgggaatggtgggagagtcatatacaagaagcccgtcaagct

SEQ ID NO: 25467 - DNA, 261 bp, Glycine max
gctgttaccaaaagggtcactccaagcaaacaaggatggttgcatggcttggacttaaaccaaaacaatctcaacttgttctattggttcttagcaatccttagctgccttaattttttcaacttcctttatcgggcctcttggtacaagtacaaagctgaagacaacaattcaaaggtgaatttgaaggctctcagaacgactggtgaaaggaaacaagatgaggaagagaagaaggacatgagagttaaggctaaagaa

SEQ ID NO: 25468 - DNA, 595 bp, Glycine max
  unsure (1)..(595): unsure at all n locations
ctcgagccggccattactaccactgttcgctatgaaagatgacaaacaggctccagttcctgcttctacaaccgaaggacaacctatacgatgtaaagcggcggtttctagaagagctggtgagccgttggttattgaggacatcattgtggcgccgccaaagcctcgtgaggctcggattcgtattatttgttcctctctctgccacagcgacatcacacttcggaaccttcaggaccctcctgccattttcccaaggattctaggtcatgaggcaactgnggttgtggaaagtgttgggaaggatgtaactgaagttacaaaaggtgatgtggtaattccagttatcctaccagaatgtggggagtgcatagattgcaaatcaaccaagagcaaccggtgcactaattttcctttcaaggtgtctccttggatgcctcgagatggcaccacaagattcactggccaaaatggagagatcatataccatttcttgtttatttcaagtttcagtgagtacactgtggtggacattgctaatctgataaagattgatccagaaattcctcctgacagagcatgccttctncgatgt

SEQ ID NO: 25469 - DNA, 527 bp, Glycine max
aaccctaaacggtctactgagcattggtccactactcccaagtcctaaccccctctgccaatttcaacggcgaactccctcattcctccgctgccatctccgttcgacgctctatctgattagcggatagcgaaaatcctaagcaaaatattataccgtgttctttagcgtgacccaccttcgtaaataaaaaccctatgcaactgcactattctcgtgttcgctttaaatcaaaccgctcattctcctcaatcatacctccatctctctctctttctctttctgatcacaatgtcgacctttggcgccgcggcgaatacgaatcccaacaaatcctacgaggtagcccaaccaccctctgattctatttcgagtctttgtttcagtcccaaggccaatttcctcgtcgctacttcatgggacaaccaggtgcggtgttgggagataacaaggaatgggactgttgtcaacagcactcccaaggcttcgatttctcatgaacaaccggttttgtgctccgcttggaa

SEQ ID NO: 25470 - DNA, 390 bp, Glycine max
gaagaaaacaaggatttaaagaccatgactattaagcaactcatgggctccttacaagcatacgaagaaaaacaaaagagaaaaattaaacaaaaggaggctacggagcaactactacaactcaacgtaaaggaagcaaactatgcaaattacaagagccaaagaggacgaggtcgcggccaagatcgtggacgtggacgaggacatggaggagaaggaagaggtggttatcaacaaccactccaacaaattcaacaatggagaaagaagttggaatccataagtaacaagaggtcatggaagaggaaattcatggtcgaggtatgacaaatcacaaatcaagtgcttcaattgcaacaagcttggtcactacgcatccgagtgtagatt

SEQ ID NO: 25471 - DNA, 543 bp, Glycine max
aataaagggtcaacaactttggcgaaaataagaacccaagtggtttcagagtgacacgcacaagagaagagataatggcaacaaaatctttgggcttcgctgtgtctgtgactcacctcttcggttccaagtcgccacccaagctttgcgtctttactctcagatgctctgctggcaatggagaaaggccttggaaaacttcaggcgctagacttatgttagaagatggatcaatctggaaagcaaagtcatttggtgcttcaggaacccaagttggagaagttgtttttaatacatcattgactgggtatcaagaaattctaacagatcctagttatgctggtcagtttgtactgatgacaaatccacatattggtaacactggtgtaaattttgatgatgaggaatcaagacagtgcttccttgccggtctagtaattagaagtgtgagtatcagtacctcaagctggagatgtgcagaaactctaggtgattacttagcagaaaggaacatcatgggaatttatgacgttgacacacggg

SEQ ID NO: 25472 - DNA, 264 bp, Glycine max
caatgaaaagggatgataaaggacttgaagaatgggaactctcagaaagtcctcaacatttttgtgtcaaagagaagccttatgctatccaacattcagatattgacgccatgaaggataaatttctcaaagcttttgctaggtgaagatgttacaggaggaactaagggcctcagtacagctttggcactgtctaatgccatcacaaacctagcagtgtccgtttttggtgagctgtggaaattggaaccactatctgaagaa

SEQ ID NO: 25473 - DNA, 616 bp, Glycine max
gtcaccttcctataatccaccaggttacaaagcaccatcttataatccaccagcttacaagtcaccttcctataacccaccaggttacaaagcaccatcttataatccaccaggttaccagccaccttcatacaatccaccaggttacaaagcaccaacttataatccaccagcttacaagtccccttcctataatccaccaatttacaagccaccttcctacaatccaccaggttacaaagcaccatcttataatccaccatcttacaagtcaccttcctataatccaccagtttataaagcaccagtttacaagtcaccttcctacaatccaccaggttacaaagcaccatcttataatccaccagtttataagccaccttcctataattcacctgattacaagccaccttcctacaatccaccagtttacaagtcaccttcttataattcaccagattacaaaacacctgattacaagccaccttcctacaatccaccatatgggaagtcaccttacccaaagtaccctccaggatccaattgaagacacctagtaagttaaggggtgtaccgcgcatatgctaaatccgcggtgtatcaacaacgatcgcca

SEQ ID NO: 25474 - DNA, 372 bp, Glycine max
gaacctttcatcagctgctccagcgtgtacacctgcgcctcacccccactcttcgccacctccgctctctttactttctcctccatctccatccgcataaccgccgcgccctcctccctcgccgccgcatcagccgccatcatccccgtcctctcgtccttcttgctccgactcctctgcttcctcaccgccgccgccaagcacgccagcgagcaaaccagaacgaatatcccggccgagaacccaataatcagcgccctccggtcgtggcgcttcttctcgtacggctgccggataattccgttgacgccgtgaacctgcgcgttctggccgagcgcaccgtagggtcgccacgggtccgaagaaaggctg

SEQ ID NO: 25475 - DNA, 321 bp, Glycine max
cttcgggaatttattctggagaaggtgaatattttggtggacatgaaggcgaaagtctctttagctggtatagagaaaataatgaaggaaccattgaactgattattgggggaaattctaaaatctatgaagttactgattcagattacaattgtcatttgttgtttggatatacacctgttcgttcagattcagttgtgggagaacttgtcttatctgatccaactaacattgttctcccagagcttccatatgtggagatgcttgctctgactggaaacacagttgaaggtgacatacttacagctgttgaagtgattc

SEQ ID NO: 25476 - DNA, 279 bp, Glycine max
caagattctaaatacagacaaaattctgtttttgggccaggtttgagcacaaagacaggttttccccctaacaaagagcttcctctttcataacacagggaataacaatctgacaccttaatttccttttacaagtctacaacacaacttatgtatcactaaactgtcgcatcatcacttataaatataacttcctaatccgaaattgctataaagatacatgtccactgactttataatacaaatttataactgcctaaatcaaatgctgggctatca

SEQ ID NO: 25477 - DNA, 258 bp, Glycine max
catccatctgattttgatgagcaggaacgaaggcagttccttgcagcaggcaattggagcatcggctgtggcggagaccatggacacagacgctgctgctgcgatatggaaagaaattgaggcttcagagagttaccttgttctgttctatgtgcgaagaagcggcacaattagcttcctctgttttggaacgcttgcgtcattcccatcatgatatcgatagagatgatatgttggaatcaagtgctatggtgctgc

SEQ ID NO: 25478 - DNA, 436 bp, Glycine max
aatgcatccatccagagcactaaaaacaaatcccaacatctgaaaggggtagagtaggtatttcaatctattatccatattgtgatgaagaaggaacaagaagagggtctcaagattgaggttgctacactcacagttacagtagttgttgtgatgctgtcattgctatgcacatgtggggcaagcaacctcgaccctttgattctaataccaggtaacggagggaaccaactagaagcaaggttgaccaatcagtacaagccctctactttcatctgcgaatcatggtaccctctcatcaagaaaaagaatggatggttcagactttggtttgattccagtgtcatacttgctcctttcactcaatgctttgccgaacgcatgacccttcattaccaccaagaactcgatgattacttcaacactcctggggttg

SEQ ID NO: 25479 - DNA, 271 bp, Glycine max
gagattcaaagagatcaaagacaattaccagatcagctaaccgattcctggaccaacgatgaagtgcttgcacttttcagaatcagatctagcatggaaaattggctcccagagctcacatgggaccatgtctcaaggaggctagcagaggttgggtttaagaagagtgctgagaagtgcaaggagaagtttgaagatgagagtagatatttcgacaacatcaataactaacggcaagaacaatttccggttccttattagcgagctggag

SEQ ID NO: 25480 - DNA, 277 bp, Glycine max
agacattggatggcaaccctcgaagtccaaaagcagcccaaacgacccaagtatcgggaaagcagcgtctctccctctgtaaacccgcagcggcgcactcccgaggccgaatctccctccagctacagccacaggacccgcttctctccaataatggacttttttcattcttcttctcccacatccaaccatgactctttcccttctagcttctccaagttcaactccgccctcaccgctggcctcttaaacccattgtgcccccctcccgacaaga

SEQ ID NO: 25481 - DNA, 567 bp, Glycine max
aatgtcgaataaattttttaaattttaggaatttatttgatatttttctaattcagggactgctataaatacgcccagcatattcagggagtattgattaaaatggggtatactcatttctcaggtgacgctggggatttttatcttgtacagaatattgattttgaaatgtaattgtattgggcttcatgttctcacttattttctgcactttatgcaatgccttctatttctacattttactgtgatagattctcttgcatccttctctttcacatttatttgaatccttcatcctatctttttgatggcagagtttgaaaggaagggatgaaccggttgacatggcgggaggaaattcaccacatgttccgtatgcctcagagtcatatgtagatgcccctgaaagatacccaattcctcaagctgaactacatgatattgatgatccagcagctttctcttctaattaccaacacatatcagttgaagagaggaaagagcatcttgtggttgctcgaaacagtctcgaattgctctctagcatattgaattctgatgcagagc

SEQ ID NO: 25482 - DNA, 270 bp, Glycine max
cgtaacgttaccttacctgctccgagcctcttccatgacacgctctggccagagctgcagctagcttcgacactgaggttcgttctccgaccctgctcccgaaccactgccatggggtgcttcttcgcttgcttcagagcccgcgatacctccgccgccgctaccactgctacggtgccttcttctcgttccagcaaacgcaaaccacacgatgttgcggtctctcgaaatcggttatccactttgtttctatccgaagagagagaagat

SEQ ID NO: 25483 - DNA, 267 bp, Glycine max
cttcaaagttcaaatctgtttggggagttttgaaaatggaaatggggactgtagcatggattttcttggtgattatggtcacatttttctgcccttcctctcttgctctcactcaggatggtatggcgttgttggaaatcaaaagcactttgaatgatactaagaatgttctgagcaacggcaagagtttgatgaatctccttgtgcatggactggtatctcttgtcacccgtgtgatgaacaaagagttcgctcaataaatctgcc

SEQ ID NO: 25484 - DNA, 514 bp, Glycine max
cacacacaagacagccaaattgaactgagagagatagataacatagagagagataacagagagagagaaaaaagaaaacattgaccgccattaaaacccacttcccttttttatatcactcccaaacacattcctctcatttcctttccattttcctttctctttgtctttctctcacaattcatcactttagcattgcaacactgaaaggaaaagaatactctttaagaacttagaaaacaaccaattctagtgtgtgtttcgttttctctacagttcctacagtccggttcggtttggttcaattggatcatggagcaaaccactctcgaagccattcagttcaacgaggaaatccaaggcctcatggctgctccggcgccggaaaccgtcaattccttcaaggcgttgctcgagcttccgtcgacgcaggccgtcgagctcctccactcgcctgagcgcgccagaaaaccgctgcgccacagtccgaaacctccaacgccaccgccaccgc

SEQ ID NO: 25485 - DNA, 196 bp, Glycine max
catgatcagtggaggtgccctttgggagcttgtccggatttcaagggattgtatgcgagaggacataaggaatcttggtcgtcgaactctcacttctatcccgccattcaaatctgaattccggcgattacatatagacgtatagtatatatagactgttgatgacaggtctttcctgggattgttcatattttgt

SEQ ID NO: 25486 - DNA, 787 bp, Glycine max
gacgaggttaatgcttcctggtttacgattttgtttctaatggaaatctgtcatgctaccttgacgtgaaggaaggtgatggagaagtccttgaatggtcaacaagagtttctattgtgaaagggattgctaaaggtatagcatatttacatgcatacaaagcaaacaaaccagctcttgttcaccaaagcatctcagctgagaaagtgctcattgatcagcggtacaacccattgctttcagattccggcctgtacaagcttcttaccaatgatgttgtcttctccgcgctaaagggtagcgcagcaaagggctacctagctccagaatacaccactaccggccggttcactgagaaaagtgatgtttatgcatttggggtccttcttttccagatcctcacggggaagcagaagatcacaagcgcaatgcgccttgctgctgagtccttcaagttcccagaatttattgatccgaacttgcatggcaagttctttgaatacgaggcggccaaactagcgagaatggccttactttgctcccatgagtctccatttgagaggccaagcatggaagccattgttcaagaactgggaaattgtagtagctgtctttgatttgaattttactttaattactttaaccatcaacaccacaccagttttctagaatttggccactggctcatatggtcatggtggtggtgaccttttaaggtgtgacattttcctgtgtccttaactaaggaccagcttttatgtgaatgaatgtgaatgttttggacatt

SEQ ID NO: 25487 - DNA, 758 bp, Glycine max
cccaatttaggtcgtagatgagctgctgaaaaggcgggaggaaacagaatggtttatagaaggggatttcgatacatatctgcagagaattcaacagccttatgtatggggtggagaaccagagctattgatggcttctcatgttttgaagacaccaatttctgttttcatgagagacacaggctcggttgaattggtaaacatagcaaaatatggtgaagaatacaggaacgataaggagatttccatcaatgtgctatttcatgggtatggtcactacgacatactagagaccttatgatatgaccataattacacctgaaaattgaaaataagcacttagtacagcacaaaacttacttgccttgatggtgcagtttaagacttctcaagtaaagagcttttttgaggggtcattttaggagtgtttcagtgaatttagtaactttttgcaactgtagttcagctgcagggaacttccattcgattcaacatgctgctggtggaatttttgtagtttgtttgttgtcatctgatgttaagaagtcaatataccacaattatcataggaagaaaatgatgataatttgctacaatagtaatttgggatttgtgattggcattagcaagtgaaacgtggattttacagggcattgattttacttgactatatattttgatgaaagatgaaaagagaaggaaaggttctgtaatcattttaatatttgtatagtttcttaacattaggaattaaaaaa

SEQ ID NO: 25488 - DNA, 270 bp, Glycine max
ctgccaataagcaagttggaaactcaacttactgcttacatcacaaatatgtaagatttggtggatttagtgtgttgaaaggccagaaactaaccacggcgaatgcaaaacaagattgttttgcttgactgacttggcagtacaggacatcagaacagactggggactatcagttgataatggtgaatatgtgcttcctttcaagatgtataatcagagccacatcaatgagctgggtgtcaccttaccacctccttggcgtgcgggctt

SEQ ID NO: 25489 - DNA, 505 bp, Glycine max
actcgagccgctcgagccgattcggctcgagggtgtgcctcctggtacaagacctgaaacctgtaggcgactgtaaagggtcaggagtgacatttgtacaaactggcatatttaggatggagagtacttgtggtacatgtaagggaactggcaaaattgtatcgaatttctgcaagtcatgcaaaggtacaaaggttatcaaaggaacgaaatctgtcaaattggatattatggctgggattgacaacaatgaaactataaaggtttatagaagtggtggtgcagatcctgatggagataatcctggtgatctttatgttaccatcaaggtcagggaagatcctgtcttccgtagagaaggatctaatattcatgtagatgctatcttaagtatcactcaggcaattttgggtggaaccattcaggtcccaactcctactggagatgttgttctaaagattcgtcctggcacccaacctggtcagaaggtggttctgaaaaagaa

SEQ ID NO: 25490 - DNA, 549 bp, Glycine max
accttggagatcaacttgaggtcatcaccaatggcaaatacaagagtgtgatgcaccgtgtaattactcatacggatggtaatagaatgtccatagcctcgttttacaatccaggcaatgatgcattgatcgctccagcaccggccttggtgaaggaagatgagactagccaagtttatcctaagtttgtttttgatgattacatgaagctctatgctggccttaaattccaggacaaagagccaagatttgaagctatgaaggccacggagtcatccaacattaatttagggcccatagcaacggtctaagcctcagattgaagcattatattaattataatataatatatgtttactaagattactgctatctttatttgctatggatgctccgttatgcagcatctgtagcataatatatagttcaaaaataaagcattagcttgatatgatagtttatttgtgtaatgtatgtgatggttaagttggtggcatgtattgatgcacttcttttattagaaagtaacccgatcatagctattttatt

SEQ ID NO: 25491 - DNA, 261 bp, Glycine max
caaagaaaatactattactagctaatgagtatgtatctgaagcagaagcagatgatagtgggtgtggcattggtggtgttcttgttgttgatttcggtgaagggacaaagcatatgcaacgtatccttaccagatttaatgacatgcaaaccagcggtgacgcctccaaatccaacgccaccctcccaacagtgctgttctgtactctcacatgcagacttgccctgcctttgctcttacaagaactccccactattgcct

SEQ ID NO: 25492 - DNA, 288 bp, Glycine max
gtttttggcagcataacaaacaaaatggctttcatgatttccagagctgaatcagaggcagagaagtctagccttaaacacatggaagacaaggactcgaccaacacacttgatggcgtctcaagccagctccagttgaagtcctcattgtcatccaaagcctcggcgcaaaccctgaacaaacaacaagttctcaatcgcattcgacaccgtaaatccttaaacagaatcaaaggcgcttttcagggtcttttgggctactccaaaggtaatacaacttcagcacaa

SEQ ID NO: 25493 - DNA, 1330 bp, Glycine max
acagctggggatttgatacgtaagtggattgtccatccattatcatttatcaatctgcactctgcactcagcactgagaagagaagcagtgatggaaagggcggcactggttcgttgtctgccgtgctcttctgtgttgtgcagaagatatttacactctcactcacacttgtgtcgtccctcttcctctattagtattattccctctctctcccttccaaccataaggcctctctgtctgccccgccgccgctcctcctcctcctccagattgcttcccctttacttccgtaccaccatcaacaggaaacacttctcttctctcgccccgagagctgttctctccccttctccttcttcaggttttgctgaggttaatgatgaagttgcccttaaattggggtttgagaaagtttccgaggaattcattccagaatgcaaatcaaaagctgttcttttcaggcacatcaagaccggggctcaagtcatgtctgtttccaacgacgacgacaataaagtctttggaattgttttccgcactcctccgaaagactccactggtatccctcacattctggagcatagcgtattatgcggctcacgaaaataccctctcaaagagccttttgttgaattgttgaaaggaagcttgcacactttccttaatgcgttcacctatcccgataggacatgttacccagttgcttccacaaatgccaaggatttctataatttggttgatgtctacctggatgcggttttctttcccagatgtgtcgaggactttcagatttttcaacaggaaggctggcactttgagctcaacgatccttccgaagacatcacttataaaggtgtcgtgttcaatgagatgaagggtgtctactctcaaccggataatatacttgggcgagctgctcaacaggctcttttcccagacaccacctatggtgttgacagtggaggtgatcctcgagttattcccaagttgacttttgaggaatttaaggaatttcaccgcaagtattaccatcctagcaattcccgcatatggttttatggagatgatgatccaaatgagcgcctccgcatcctaagtgaatatttagacttgtttgattctagtttggcctctcatgaatcaagggttgaaccacagacactattttcaaagccagtccggattgttgagacatatcctgctggtgaagggggtgatttgaagaagaagcacatggtctgtcttaactggttgctctctgataagcccttagacctggaaactgagctaacactaggatttttgaatcaccttctgttgggcacccct

SEQ ID NO: 25494 - DNA, 427 bp, Glycine max
gactaaggtatgttctcggactctgagtgcttgccctaagaggagaaggtgctgccaccgccgagacgagagttccgtcgccggcagcgccgcaactcacgcttcaaccctcaaactcacaccgcaggataattcttgtttgttgcaaacaagggaacctatgctactgtacttgtcctaattaggtgcctcatggatccttttgatgatattctaccaacggctcctgctgcacgtactcggctgggtgccaagtttattccaaaggccaaatcgaaacagtttcctcgaaagggaataccagcatcagaacattccacctcatctaaagatggaattttgggaaatgaatgtcaaaatgcagttgcttcagctttaagtatgccagcggaagaaccttaggggtccgttcatcatacacaggtag

SEQ ID NO: 25495 - DNA, 787 bp, Glycine max
cacaagtcggagtggtctagctatctccctagttttctgaggctctagtggaaccgaacagagacaagaacaaccgcccaggaatattccatttcctttatcctcggtgcttctgtcccctttctcggatctcagattcattcattcacacattccacctcaatggccgctcccgcctccaacgctgtgctcctcggagacgttcacttcgacgacgtcgccgcaaagccttgcggcgttcacttccgcggcgaaacgcggcgaggcgcgctccgagccaccgtgaatctccgaaagccgaaaacgttgagcggtattctgaatttcgggtgttccacatcggatgcaagttggaggagctggaatccgagttcgctccacaggaactcgtccttcgcttgctgctccgccgagacaacgccgcatgttcagcacctcgcaacctccaccttctcgattgaccagactaattttggtggcgagaggttgaagctgttttcggggtcatgttacctaccacatccggataaggaggacacaggtggagaggatgcacattttatttgcacagatgaacaagcaattggtgttgcagatggtgtaggtggctgggcagatgttggtgttaatgctggactctttgctcgagaactcatgtctcattctgctagagcaattgaagaggaacccaaaaattctattaatccggctagggttttagagaaggctcactcatgtacaaaggccaagggttcatcaacagcttgtatcattacccttactgaca

SEQ ID NO: 25496 - DNA, 740 bp, Glycine max
tatgtaggggtttctttgtttgcagcccttggctttcttctctacggtggaagactattcttgatgctgcaacgctttcctgtggaatccaaaggtcgacgcaagaagctacaagaggttggctatgtgactaccatatgcttttcatgcttccttatcagatgtgttatgatgtgctttaatgcatttgataaagccgccgaccttgatgtcttggaccatcccattctgaattttatatattacctgtttgtggaaatattgccttctactttggtccttttcattttgaggaagcttcctcccaagcgtggtatcacacaatatcacccaatacgctgaaaagattagcatatggagaaaatttagtcaggatttcgttggtggttctctgctttctttgatgtttctcacaccaccctaaaaggataatttctagaggacagagaagtcggtctttcttctgttgagtgacaaagctaatatcattgtcttaaagttctcataaggtttgtgtaggttttgaaacgtgacattttatggattgtcaaacacgttggcttgtgttatataagtgatatttgcgttgtctctaggaaaatgtggttgctgtttgaggttctgcaattcaacacgatgagcaaccttttttgggagaaaaggacactgatatattgtaaaatagtttttcaagtcttgtaactgttactagttggtgaaatgtattgttccttttcagt

SEQ ID NO: 25497 - DNA, 496 bp, Glycine max
  unsure (1)..(496): unsure at all n locations
gtttctttgtttgcagcccttggctttcttctctacggtggaagactattcttgatgctgcaacgctttcctgtggaatccaaaggtcgacgcaagaagctacaagaggtctgtattctgttttactaagaaatttttctgtatttatctgctcttcacctcactcctccccttgctttacccagagttaatctacctgatctttctactgcaggttggctatgtgactaccatatgcttttcatgcttccttatcagatgtgttatggtcagtccctttttctttaaaaacctcagcaattccctgtgcatggttcttaaattgagtctgattatagtgtgtcagatgtgctttaatgcatntgatanagctgccgaccttgatgtcttgtaccatcccatctgaatttatgtattacctgtagtggannatatgcttctacttagtcctttcatttgaggagctcctccaagcgtgtatcatcatatcaccatc

SEQ ID NO: 25498 - DNA, 250 bp, Glycine max
cgtggccactgcatccttcactcccacaacaccattttctgtcttaaaggcggcgacactttcattccatgtctccactctcttcatctatgaattttgaacacttgttgtcactcttgttcttcttctcgttcctattccatttagtttgatgttctccctcgccaagggactcgattctcttcccaaccctctcattccgccatttcctcgaacatgtggcggcacgcgccaaacacgctgccgcggt

SEQ ID NO: 25499 - DNA, 583 bp, Glycine max
tcatacatatcaaggacaagtttattagcttatagtttaatgaccattttttttcaaagcttcttcttgggttctcttaattaatttcatccatctttgaagtgacacaccaaattaaatatcaactttggtgttttacttttttgctaattataatttttaactagctagctttgggtgggtcgttgcagccatagatggagtttcccaccgaagcaatattatcagaagggtctatttctcagaagaaaccgggagagggaaattagaaatcaaccggatcgagaccacaccgaataggcaggttaccttctgcaaacgccgtaacggattgctcaagaaggcttatgaattgtctgttctgtgtgatgctgaggttgctcttgttgtcttctcaagccgtggacgcctctatgagtatgccaacaacagtgttagagggacgatcgataggtacaagaaagcatgtgctgcctccacaaatccagaatctgtctctgaagctaatacacagttctatcagcaggaagcgtccagattaaaacgacaaatcagagacattcagaatctaaacaggcacatc

SEQ ID NO: 25500 - DNA, 272 bp, Glycine max
gatattttgcaacattttctcctcacttgtatgataacaccaaagaactacaaatagttctcattgcatagccatagatggaatttcccaacgaagcaataccagaagggtgttcacagaagaaaacgggaagggggaaaatagaaatcaagcggatcgagaacacaacgaataggcaagttaccttctgcaaacgccgtaacgggttgctcaagaaggcttatgaattgtctgttctgtgtgatgctgaggttgctcttgttgtcttctca

SEQ ID NO: 25501 - DNA, 455 bp, Glycine max
cccaaaacacacataactaggaacccgctccttccttaacctctgcaactttctccaattcaaaagaacaaaaacaacaaaagcacccccatcattgagaatcgtctcaagcttcgttttttacgtgctggggttgcttagatttcaattgggtatcgagaatgttcaacggtatgatggatcccgatttgatgagtttcgctcaggagcagatgagtcgcatgtcacccgctgagttggctcggatccaacaacagatgatgtctaatccagagctgatgaggatggcctccgagagcatgaagaacatgagttctgaagactttaaacttgctgctgagcagttaaagcatactcgtccggaagaaatggctgagattggtgagaagatggctaatgcgagtcctgaggaagtggcagcgatgcgatcccgggttgatgcccagatcaaatat

SEQ ID NO: 25502 - DNA, 246 bp, Glycine max
caattggaaaatttacagcagggagttgatgtcttaatagctacacctggccgtttcttgttcctcatccatgaaggcttcttgcagttaacaaatctaagatgtgctatcttggatgaggtagatatactctttggtgatgaggacttcgaagtggctcttcaatccttgatcaattcttcacctgtagacacacagtatttatttgtgactgcaactttaccaaaaaatgtttacaccaaattg

SEQ ID NO: 25503 - DNA, 278 bp, Glycine max
atgttcctaattcctattccacccttttgacagggctcatgttattctcacaccatcatcttcgccactaccaacccaaccacctccacaatgccataacattctaacttttagacttaatacaataatatccacaaaaaaccgttatttttttttgttctgtgtagctttttggagttgtatcctccttgaattcttcacttgataagtttttgtttctgggtttgcttgatcttcccaaagggtccaggccctgcattctgctaaggattgttgat

SEQ ID NO: 25504 - DNA, 460 bp, Glycine max
aattcaacattttattaaaagatcaaagacagcacgtttgaactctattcatgttacattaggtgaagtttacgaatcgtttatagtctttttattacagctctaacaaaaaaactaattcaaattcaggttataatatgtaattttttttgcaggatgattgacttttggatgtgtaggtctttacacctttatcttattctgcaatgactctgtgagagaggaagaataaaagggaatgaaagtttggaaaattttagactagaagaaagccaacttagagttgagctttttaagaacaaattctatctcaaaatcaattataagatgaacatgatttttaaaatttaaattccccaaatggtctagatctaaaagtaagctccatttcacctagatatctagcgttgatggttgccgaacagcttagattttgggaaatttaattcatgtaccatag

SEQ ID NO: 25505 - DNA, 265 bp, Glycine max
cgttgctatcaaaaccttcaatagctcccccacctgccaaaaaacctgttgtcttgaaggacaggggagcagccgagacaacatctgttaaatctaaagaaaagaagtcgcccatcttgattgataagtttgcttccaagaaaccggtagtagatcctctaattgcacaagcagttctagcccatccaaaaccagggaaggcacctcccccgggaaagtttaaagatgatttccggaagaaaggtgctatggctgggggaccaag

SEQ ID NO: 25506 - DNA, 249 bp, Glycine max
gtccatcaatagcactgatcaataccttactaatgtacttcttaaattcaattctaagcttggaggaataaattctctgtagacaatagagcattctgggcatcttctcctgattaaggataccccaacaatgattttgggatggatgtctctcacaattcgcctggtcaattagatagtccatcaatagcactgatcaataccttactaatgtacttcttaaaatcaattctaagcttggaggaataa

SEQ ID NO: 25507 - DNA, 710 bp, Glycine max
ctagttctagatcgcgagcggccgccctttttttttttttttgtgaaatgcagcaagctggatatatacatttaatgatgatgaaatatttgtgcgaacagtggtatattcggcgcaacacaaatttaaaaaaaacttgcacttctatgattacataagatgcactacctgcatgacaactctacaaagcacctaggcgtctagcaagctagttggttacaacggtgggaaacaatacgtcgacttggaaacttaacaagaaacttctccatctccagcgtcttaaaagcaacaaacctataagtgcactcaatatcaattatgcaccagcacttaaaagaggctttagcagttgtcatcaatcaaatatgagaagaacaaaatacttcattaatcatcccaggcactatctgctgctccctctcttttagtgtttgtggcagtaatcatgaatttatatttatcttcaatgttcattgaagcagctcccaatcctaactgtttggataaagcaatgtttgcctctttttgtgcagctgctgcttctttctccttccttctagcaacctttccagttgcaatgtcagtgtgttcccagattcagcatcagctattgctttccttatatttgccatgaggaacatgtcacgatcggtgtaaaatgaagtagctaagccagttgatcccgcacgccctgtccttccaatccg

SEQ ID NO: 25508 - DNA, 726 bp, Glycine max
cggagacagaagacactaatttgctacagcagttgtctgatgcctgcctggttgttgatgcattagagccttctgtaagggaagatttggtaaatactttctgcaatagggagcttacatcgtatgagcaaatttttgaaggagtgaacttgcaaagttggttaaaactgaacgaagatatgcatggattaagcgccgaatgagatcaaatgaagaaatttggaaaatctttccttcttcatggcatgtttcttatcgtctctgtatcctattttgcaagaagacaaggaaacaactagaggacattcttgctaatctaaaggaaaagccagatgttgggaccttattattggctttacaaagaactttagagtttgaggatgaattagctgagaaatttgggggaggcactcaaaacagagagattggaaatgagattgaagaaataggtaaagggactaattctagtagtagtgccatggatatccggaagaagtatgaaaaaaagcttgctgcacatcaaggaggtgacagtgaagaaaaaagatggaagtaaagatttggcagtgcctggagctgggttcaacttccgtggaattgtttcatcttgctttgaacctcacttaacagtatatgtagaattggaagagaagacactgatggaaagtctggagaaacttgttcaggaagagacatgggatattgaggagggaagtcagagctggt

SEQ ID NO: 25509 - DNA, 285 bp, Glycine max
tgctgtcttttctattgatgatgatgttatatttccttgctctacggtggaatttgcatttgatgtttggcaaagtgcacctgatacaatggttggatttgtacctcgtgtccattgggtggattcattggaaggtaatgacagcaaatttatatatggcggatggtggtctgtgtggtggacgggtacatatagcatggtgctttaccaaggcagcgttcgttcacaaaaagtatttcaatatctacacaaatgagatgccatcatcaattagagaatatgtaa

SEQ ID NO: 25510 - DNA, 744 bp, Glycine max
ctcgagccgggaaagttaggaacccaattacctgaacaacaaaaacaaaggattcattttatctggccattttcatttcccttggaaactcaaaatatttcaaatttcactctttctttctgcacaatattttccccactatttttttcttcttctcaaaactcacatattagtattttctcccacaaaatttcagctcataatttttatttttcgatttcatccaatcctgctaatttatttttaatgacgaaatttacgcaaatggtgcaaaggtgaagattttccacatcttgtttcatgcccagctcctcaagctagcttttaattttgatttttctcatttcctggcttaaatttttcatcttttctataagaaaaataatcaattcccagcagcatagcatagtagtagaagttttgggtgattgagtctgaagaagaagaagaagcaaaaaaaaaaaaaaagagagatattgatgtgtggttttactttatgttacgtgtgagtggtactacttcacaagtgtttgaacatggaggccagtggcggtgttagcagcggcgttacggtggtgggatcggatgctccgtcggactaccatgtagctccgaggaccgacaacccggctcccgcaagcggatccacgacgcagattcctgcgacggcggggagtgctctgtcgccgtcacatccgcctcacacggcggcgatggaggcgtatccggcgacgatgccagcga

SEQ ID NO: 25511 - DNA, 437 bp, Glycine max
agaaggtgatgtgactgttgttattcgcgcaactcttgctcagtacaccaaaattatacagaacccttcttatggagatcttcagaaggcaaccaaccaagggagaagatgtacctgggagaaactttcagccataaaagcaaattgtggcattgagcttgctcttgatgagtgtgtggtgattctcaatcatatgagaagactaaagaggattgctgagagagctgcttctgcctctcatggtttgtccagcactgtcaggttcagtgcttcaaaaagaattccttcgtggaattgcattcacgagagaattcgaccggctcccttgaggaccttactgatgttgcctcctcattgcatcaaggcatcggcagttccagcagagccaatggcaaaacttggaagacccaccgtggcatacatgatggaagtgacag

SEQ ID NO: 25512 - DNA, 290 bp, Glycine max
aatagattgttatctgagaggaagcataggagtaatgaaacacatggtggtttggataatggagaatatgcttctgatagagaaatcaggaggcgtttatcaaagttgaataagaaatctttcgactcggagagtgagacatctgatgactttgatagatcttctgaagatggcaagagtgatagtgatactaccaccactgacactgaaagcgaccaagatgtccattcagaaagtcgaattggggactcgaggggagatgtgtatttcacacctgatgatgggttgga

SEQ ID NO: 25513 - DNA, 606 bp, Glycine max
  unsure (1)..(606): unsure at all n locations
tgaagagagagatgacatccacggaggagtgagaacgccttataaatcgtgttcacgccgtgccggtcgaactttgtcccggccaatcatctcgtctctctctctctctctctctctctcaatccaacaacaccaaaacccttcttcctcttctcaatccccttctctccctctcccaattcccctaatcgcgcctcgaaacatcttcaattttagggttagggatttcttcctctttacatttcacctctttttttcttcttctacaccgagactccctctcctcactgggtgctgacgtgggcgcaccctcgccgcttctctttccatggaggccacggccgccgttgccgctgccgccactgccgccgccgtgcgcggcgcctctctccagatgccgcctccgtcccgcaaagagtggcgtgctgtcgctgagcatcatcattctgcgcgaaaccccgacgacgaggagttagacaatgccaaactagggcaatcagacgagagaacaatatatgaggtgcagcaaggaagagagcctcttgatgttgattnttgttcaataacagtggatggagcagtcgacaatgatattttgcagcaaca

SEQ ID NO: 25514 - DNA, 466 bp, Glycine max
attttgcagtttgcatacctatattattagagttcccttttagtatcattgttattattcatttcccttattcaactgctttttaaactgttaatggaaatggcttcctcatccttcatcttaggctcagatttcaaatgcatgttctcttcgaggaacactaaaaccatgtctggatttggtgcactgagacatccacacccaaatggtttgttcagtaaatgcttccactttcatactctatctactagaacggtgtcagggactacaaagatggtttctgatgtttatgttggtggagtcacaagtttcagagtcaatagcaagatgtacaccaagttggattcttgtttggtgataccacctaccccaaatcgtgccaagcctcgagctatagtcaaattcctgggtggtgccttcattggtgctgttcctgaagttacttatggctacctgacagaacttt

SEQ ID NO: 25515 - DNA, 284 bp, Glycine max
caccgacaacctcgccggaaaattcctcgccgtttccggttaccggcgatggcctcggcgacgtcgtttttcggcctcggtcttcgcccctccgtcccaatttgcgccaacagaaacaacggcattcgattctctcagtttcaagtctcctttggctttcgtgagaactccacttccctcaagactttgaattcaacaccgttgaagaaaagagaagctttctcaaatgggtcttcgagaacgcgaagaaacccgttgttctctgttcgctgcacagtttcatc

SEQ ID NO: 25516 - DNA, 307 bp, Glycine max
tctcgagccgattcggctcgagcctagaccacctccttctaagatactagatttcaaagattacccttctccaaacgccacgacctcgagtaagaaaaccggctcacatggtagatgaggagtacatagcaaaacttgaaaagggcattgcactcatgaaagcactccctgatgatgacccacgtaattccatacaacatgcgaaggtccattgtgcttatggtaacggggcctatcacctaccccatccctttcagagcacaagactgcaacgttcacaggtcttggtttttctgtcctttccacc

SEQ ID NO: 25517 - DNA, 407 bp, Glycine max
gcgcgacagcgaacgcgctttcaagtctctttgggtccattcaccaatctctcttgcattgtagttgtcacaactcacaacaatcttagaacttagaaccagtccatgttttattgcttcaccttagatatcacacttaagctcctccactctacatgttctacaacttgtcttctttttaatatgtttacaacttcaaactttgcttccttgggctattaagctccatccaaggtttgtttttttgcagtaagaatggacaagaacaggaaactcagtcggttcaagatctttctatagctttttgctttgtggcagtttttttcttgtttcaccacttgggtttgtgctgttctttgaatgaagaaggtaatgctcttttgaagttgaggcagagaatagtgagt

SEQ ID NO: 25518 - DNA, 281 bp, Glycine max
agtaaatacaagtagtaatctaaatctctatccttatagttttctgtgagacacttttggaacaaatttctcaatatcatttgtttctcatcaagagcagtttttcaattgagcaatatttctttgatcttccaatttttcacttcaattgccatggcaaattatggaaccacacagagaattcccacctcctcaacaccacaatccaccgctgacacttatgaaccagaaccaaaagcaccccatgaaaagttctacagtgatttcagaatctactgccc

SEQ ID NO: 25519 - DNA, 515 bp, Glycine max
aaatgatagactaaaaaagtaatgtaaaaaagttaaaaaaatttaatattttttataagaatatttaaaaaaaaagtaacatattgtataaaaaataaataatttttatcataataacgaatttcgaacattttcatatttataaaaataaaaaatatatttgagctatttttaaacaaaattgtcaatgtacataatttgtcacggttaaatgtttaaataacatttagaggctttatatagattttaaaaataaaatatgtgcacttttcttaaaactcatgagatacatatataaattttataaaaaaaaaacatgtgtaatttcgttaaactcaaagaaaatatgtgtaatttacgttaaaatttattaaaaataatctatcatcatgaatttcacctctaaatcaccaagaaaaacattaaataaaaagtgagacatacaaaaatgagtaatttttaacaattttcacaattatgaaataatgtttgatttgcattaaaaaaaaattaag

SEQ ID NO: 25520 - DNA, 264 bp, Glycine max
cttttgaatcatgacgctcttatcctctcacctacttgtcttctccgccgtccaccaccgtgcgccgccgaccaccaccacccggaacagcccaacaacaaaccacactgtgcggtttctgtgttctcccggcgtgccgccagctgtccgcttggatcaaaggttgccgcgctttgttgtccccggcgccggagcagaagatctgctctacaatgccggagccaccgtcggcgttcttggcggcggttacgcctcgtccgtgcc

SEQ ID NO: 25521 - DNA, 495 bp, Glycine max
aatctctccaaccttattgcttcttcaatcaacaaactattcacagtttcactctctcctttgttgttgtttgatggaaaactgcatcttccactaccatcaccacacactcctcactctcccttcaattttctcacaaaccccacttcagattcttcacaagacctgatcttggtggtggtggtggtggtgttcgtgttgcttcttcttcttcttcttgtttgttattccataggcgaagaccctttatcagagcaagtgctggagcaagcccatgtgagtttagtagcctaaactctcctttggagccacgttccatggtggggaagttcctcattggtgttcttcagaaccaccctcagatgttccatcttgctgttggggaggagctgaagctcttggctgaggatcgtgatgcggcacatgcccgcatggtgcttggttctgcttctgatgaggccttgcttcacaggaggattgcactagtaaaagaga

SEQ ID NO: 25522 - DNA, 257 bp, Glycine max
gggcatcaagccgaaggaacaactcaccctggagccgtacgagcgagctcacgccatcgtcgttggaaggtacgagcgacacaccgcctacgtccgcaccggaaagggcgtcacagaggaggacgcctcgttcgcattcacatacactcttgatcatttgttctggcttcggtttcggtttgctctctttcaatataccacgatgtgtaccagcatcaatgtacctatgactcgaaaaaaaaaaaaaaaggggggcc

SEQ ID NO: 25523 - DNA, 269 bp, Glycine max
cggctcgagatcgacgtcgcgcaatcgctccatctcggcgcgttttgctgagtgcgactgcaagacatgtacaagcaagcgacgcagaagacgggcgaggtgctgtccatgccgtcgcagtggctgggcatgtactcggacttcatcaccaagaacagcagcgccgtgacgcagatagagtctgcgctgcggtcactgacatacatcatccccggccgcttccgagagtctgaagtcgcatccgaatctatacacagcggcgttcaagt

SEQ ID NO: 25524 - DNA, 282 bp, Glycine max
tggctcaagcttacctcggatgttggcttctgtgttctgctttgccagtgtaattgcgctttgcatgccaaaggagcgcagctaggcaatatcacttgacatgtaattttttctgatactataccagatgtacgatatccctgacttattatcactatttttaaaagtggtataaaatggttttgccgaaaagtagatttctaaaaaaaaaaagaaaaaaaaaaaaaaaaaaaagggggccccccaattagaaacctcgtccccccgggatttatttccggg

SEQ ID NO: 25525 - DNA, 1294 bp, Glycine max
tacgtctcgtcattcggctcgagtgaaacagaaatatctccatctacaaacctgttagttgcagagaaagacaccccatctccaacctcggtgctatctacggttggttcggaagcatttgggtctcaattttcagagcagactaacagatgcctttcaccaaactcttgcaccactgatattcactcagtcagcttatcacctgttgaaaaggaaaatgattgcatgacatccaaagaatctgaggaggaagagaaagcatcaccagcttcacgtcctttatccactgtttctaacccaaaaatgtgcatgaagcctgagtttagttccaaggagatagaagatgctactgatatgccacaaaccactagtattaagctttttggaagaacggtctctatggtaggtaatcagaagtcactgaacatagatgatgatgatggtaagccgataactgtgaagtccgatgaagtagatgatgttgagaatgagaagcttggccaatcaggagaatccaagcaagtagatacacaattatcactcggcgtggttagtggtaactggcctataacacccgatgctgatggagctaatgtgaccagcatagagcccccaaaggagaaccaatgcttcagtgaatctgcacctgatgcattttttccgcagtggagtttgtcccaaggccttccacctttctacctgaggccatgcaatcaggtcctaaatcccttgcctcttaggccctcctctttgaaagtaagaacaagagaggaggaaagttgttgcactggttccaacactgaatcagtctgtgacatggaaaaccaaggcaagaactcagatgctgttgattctaagtttcaaaaatatcacgaggaaggagctgcaccccagaagaagcctgcaagggggtttgtaccatataaaagatgtttatctgaaagagatggaaattctttaattgttgatatggaagagagggaggggcaacgagctcgtgtgtgctcatagccttacattccatttttacatgattcataatcatggtgttaatcagagcaaaaaaaaaaactgagagaaataaggacatgatttaggtagctgtgatctaattgtctaattgacaagcatctgatttccaattcttttttccaatatcttctttctttcacatgaaatgcacttcatttccaataattcaagtggggggctggtggcattgtttgttctggtttttatcatgttacagttactttaaccaaatagagacatatagcagcaaattctgtcgtta

SEQ ID NO: 25526 - DNA, 285 bp, Glycine max
gtggcatgagtcaaaataatgcatttgaagagttgaggaaggctgagaccatgactactagcagaacaaccaagccctgtgtctgttcttgatgctgcattctataaggatgacccaccatctccagtgaaaaataaatcagacatctcaaaaaatttaggtgaagctctaagcactgatgaggatagtgaagagagctcagtggatcttcttcaagaaattgactggattgatgagaaactcttcaatttcaataccaatagggatcctgaccatacatatata

SEQ ID NO: 25527 - DNA, 420 bp, Glycine max
gttttaaagttgaggctaattcagcgccacaaacatttgaataatagaaatatcttatcatcatttcttctgatttgcttccaagttccaatccatggagtccatgacggtgattaaatcaaccttcccaattttcatgaccaataacgccccattttccctctccacaagacctcttagacccatcctgaaggtttccgtgaaacccccacctccagatttcgattacaggcgagagatatcggaggagtcaagagccgccatagccgaatctcacccggagttgcttgacctggctgacaatgggagcttggttttggttcagaagaagaggttcggtcctgtcccttcttggaggaccgaattcgtcgaacctgaatccatttggtagaacggaaccacccatgttcctgaggtttc

SEQ ID NO: 25528 - DNA, 270 bp, Glycine max
gaagacactgatacggccaaccccaatgatattgcttatgtcttctctggatatgcaccactcagcattcgactggtccagcatgccattcgatctggatggcgtcctgttgaagaaattttgaagctactgcctggacctcatttggaaatgaagaggggtggattctcaaatagcccatcatttgacactttatcagggattcaatccagcatagccaaagtacctgatggacggcgtgctgtggtgcttgttgtctttgttgggggc

SEQ ID NO: 25529 - DNA, 584 bp, Glycine max
tttatggtatcatcccctcatcttataccttgggggagtcttctggaaaggataaatcatcagcttttcatcaaggaagtggtgctggagctcaagggtcaaatgttactggaagttatgtgatggacattgcttgtgggggtcggcatagtgttgtgataacagatgctggggcgcttcttacattcggctggggactgtatggccagtgcggacaagggaataatgctgatcagctaagaccaactctagttccttctttattgggaactagagtggaaaaaattgctgctggactttggcatacattgtgtgtttctgtaaatggtcaaatttatgcatttggtgggaatcagtttggacaattgggtaccggtagtgaccagcctgagacttcacctagacagttggatgcttcccgttttgaaaataagcattctagtatagtttcttgtggggcccgtcacagtgctttgctaactggtacgcctccattaccatgtgcttttcaggggaacttttaaaaccaatcttagtatttgcatgctttgataatgtcatatggcttattcatattagagaat

SEQ ID NO: 25530 - DNA, 627 bp, Glycine max
tgtaggtactcaaagacattgcttctgagaatggtattgttctgcagctcgaagaaacttctgtttcggttgaggaacaatccagtgtagaaaagcaaaaccagcatgaatctgagaagaaagaagagaatgtaagcatgttgcctaatagagggaaagatgagaagttaactgattcctacaagggaaggaaaaagtacaaggacgtagctgatgcagcacaagcagcttttgagtcagcagaatatgctgcagctgctgcaagagcagcattggaactctcccgatctgaatcacatgatcctgatgatcattatagcacaagactccaaccaagaaaagtggaggaaggacatgatgtgagacctcaaatggaagaaaaggaaatcctcagtgaaactcaaagagaagatgagttaaaaaagtcgaaagacattataagttgcaattcaactgatgaggttttgaagggggctactgccttggtggatggtgaaattgaggctgatcctttggaaaaggaagtgattttcgatgatagtgatgatgagaatgataataaacagaatataaatcaatcttctaagcagacatcttcagggtatggtgctggtatagtagtaaata

SEQ ID NO: 25531 - DNA, 279 bp, Glycine max
attcgatcagcatgaggccctcatatacctgcacgcggtgcttatccgctgttaagagctcacgtactcagctgcggcccacccaaacattccgtcctttcgcccagaatgtcttgtcgcaacgaaatcattccaccaaaagtccgacacagccgaagtttgcgtcccctcgaagagcgctctcgaccacgcccaatcgcagttttgagaaggcgttcgaaccgttcgaatacattgatcctgagggcaataagcggactcttgtcctaacgggagaca

SEQ ID NO: 25532 - DNA, 388 bp, Glycine max
gggtacttcaacaggatttaaaattatgcttgctaagctcttccccaagcttgtagaggcattttctgataagggaattgattgcagtcagtttgttgatctccaaaaagaacctttacttactaagttgtaagtatctgccaaaaatcccgaccgagatatcccaatcttatgtgtaatatcaatatatttacattctcagtataatatcaattttaatctctgggttttgtacttttgtggtttgttactgtggtgtagttgatagataaatcaacataacatgtgcttgtagtatgtgtatgtatcacagcatggtttgtggatgtaaaatatggaataagaaatgcagccattggagtgattaaaaaaaaaaaaaaaagggggc

SEQ ID NO: 25533 - DNA, 261 bp, Glycine max
tttggtgattgcgtgattagagagttgctgcaatacacacgcttaatgcaccttacaacaatacccttctctttctctaattcggatcaccttgtaaggccattttgtgtttgcatacgaataataaccattgcatacgaaggggcgtcagtgtcttgcagtgtttgggagacgaaagcggcggttggcggcccaggaggacgccggccaagtggacaaggggcaaggtgtggcctttggccatgaatggaagtatgacag

SEQ ID NO: 25534 - DNA, 718 bp, Glycine max
  unsure (1)..(718): unsure at all n locations
ctcgagccttaaaaaataatcagcaatgagtagcacaacttcgatgtattacgcaaagtggatttgacgcaacagcgtttattttctcttttgtgttggcaaagggtgatgacgcagtgaagtgaaagcagcaacagcaatgggcgatcacatagcgaagggacaagaactggccaagagagcggagaacaagctccatgcttgttgccccttgttcgggtccaacttggaagacgctgccgaattgttccacaaatccgccacttccttcaaactcgccaaatcatgggacaaggcggcctcactcttcgtcaaatccgctaaatgtcacttgaagttggatagcaagtatgatgctgcaaatgcttatgtggatgctgcacattgctacaagaaaacttccacatcaggagctatttcctgcttaaataaagctgtgactatcttcactgagattggtaggcacatcatggctgctaagtattcaaaggaaattggcgagttatatgagcttgatcaagacatagaacatgctagatcttattatgagagggctgctgaactttttgaaattggggatgcagcaacttctgtgatccagtgcanagttaaagttgcacaattttgtgcccagctttcacaatatcagaaggcanttaagatntatgaagatattgccnncgcatcactggatagtnactttgtgaaatatggagta

SEQ ID NO: 25535 - DNA, 563 bp, Glycine max
tgaactttgtccctactcttcggtctggagagtgttctgatattggagatcgcccttccatggaggatacccacatatgcattggagacttggcagaaaaatttagcaataacgaactttgcaaggaagctatttccttttatggtgtatttgatggacacggagggaagagcgctgcacaatttgttcgtgatcatctgccacgggtgattgttgaggatgctgacttccctttggaattagagaaggtagtcacaaggtcatttttggagattgatgcagagtttgcaagatcatgttctaccgagtcttccctgtcttctggtacaactgcactgactgcaattatatttggaaggtctttactggttgccaatgctggagactgccgcgctgtattgtcccgtggtggaggggctatagaaatgtccaaagatcacaggccattgtgtattaaagaaaggaagaggattgagtctctaggtggatacatagatgacggttacctgaacggccagttaggagtgactcgtgcactaggtgactggcatcttgaaggaatg

SEQ ID NO: 25536 - DNA, 303 bp, Glycine max
tttctttcttatgattggtttttctagtttactaaagaaagtatatgaaattgaagaacatatgataattgagtccgtttgagggcttttatcatacaacatacaaatggactcaattatcatatgttgtatgataaaagccttcaaagttgaaagggctttctttttgttttactttattcaaatgtacatatgcttatttgttgaagataagtttgtagtgccaattttgtaaagttgagacaaaatgaaaacctttacctggttttcagtgaaattagtgattaaatgatcttacttgcc

SEQ ID NO: 25537 - DNA, 288 bp, Glycine max
  unsure (1)..(288): unsure at all n locations
ctttatttgatttcttaatttctttgtcctagtaagattctganattcaacatgaaatgtcatctttgcgagtttggctaggtcaactcttcttttcaaacctttgcctcctttcttcatcctttcctttcattcttcattcattcattttctatgtggcttctttttagtccttgataataccctcatcttaatcaccctagttcactagattggtttgccttcacccttaatctctcagacccaacttctgctagagaatctttcaataggacttctacacatctt

SEQ ID NO: 25538 - DNA, 259 bp, Glycine max
cttgagattgtattaataattctttgaaatcagcatatatagcattcttggcagatgctatgcattgattataatgcaagaagctagagacttgatcttcattgcatgaaacaaccgtatcacagatcttatttctcttgtaaatactattcgttcaagatagcttctgatacagtcggccaaaacctattgtagggaccttgttatcaggttttaaacctggctgcctttcttagtttatattttcggaggcagtgta

SEQ ID NO: 25539 - DNA, 546 bp, Glycine max
agttattctccttctccttattattattattattcgtcgtcttcaacctggcgcagcttcactcacttttttccactatgaaactctgaactgagaaataaataacattacaaaacgctaaaccctaatcttctgcaattcgtgtgcgtggaaaggttcgagaatggtttcgctggaggaatctcgctctaattcgagccgtttccccttggcgaggagttaccagtaccactcctcggtttcgtccaaaacgcagcgtcacatcggaaggtccatgcgcacgatacgctccagtttcttccaggacgacaacagcagcagctgctgctccttcaccgagaaatccacgtgtctctcggaaaacctcaccgactccgtcgtcgacctccgtctcggcgagctggcgctgcggaacagcaaatcggtgaaatactcgccgacggcggaggagctcctcgatttgtcgcaggccttcagcgacttctccgcctgcagcagcgacatctccggcgagctgcagcgtctggtacagctgccgtcgccgaa

SEQ ID NO: 25540 - DNA, 367 bp, Glycine max
aggtgatctagcaaacagcatgacagagaattcccagggaacaaccctttcaagaggagggatgattgctgggttagagccaatcaattttataactttagcaacaccacatcttggcgtgagaggaaagaagcagcttccatttctgttgggtgtcccaatcctagaaaagcttgctgcacctatagctcccttttttgttggtcagacaggtagtcagttgttccttactgatggtaaacctgacaaaccacctctcctattgagaatggcttctgattctgatgatggaagtttttatctgcacttggagcatttacatgtcgcatcatttatgcaaatgtttcatatgatcatatggttgggt

SEQ ID NO: 25541 - DNA, 260 bp, Glycine max
cacaaattgttaactcgagaccgtcatcgaactatgacgcaccccattgatccgccattagaggagcacgtgccaaagcagctgaggatgatcccgcaccagatgtgcaagacttcgccgcacgagatattagaggacctcaggacgccaccgcttacgcccgtgcccattgagccaatgcgcttgtcagcggcgtctttctcgctgtcatttctggacaatattgactgcttgaagatcaacgagactgtcgtgcgcaa

SEQ ID NO: 25542 - DNA, 351 bp, Glycine max
ttctaatatggcctggacacaagtgaagtatataagggcaccttgggctgggcaatttctggcacaacacccaaattgcaattccatatattggtctcttggcacaatgttgtcgattttccggcaatacacgttcgacgactcgttctcgcaagtgtttgtgtcggcgaaattcctgaaggagtaccagatcgctctgaccttcgccagcgactacgacgacgagggtgcccccaccaacggcgttttccgaccgacctgggacctgagcaaggtcacccccgaatccatcgcgcgcttcaaggacaagaaccccaacgttgacatcaaagtcttcatcagcatcggcaa

SEQ ID NO: 25543 - DNA, 439 bp, Glycine max
gactacgggaacttggccagctggagcaagatcttgttttcggagatgcaacaacaaaagatgtgatcaaattttttaccatgaaagaagatataacccatgaaaataagttgcgcctgctaatgattcttgcatctgtttatcctgagaaatttgagggagaaaagggtcagaatttgatgaggctagcaaaattgacagaagaggatatgaacattgtgcccaatttcagaatgcttggaggacaaccagtaaccaaaaaaagtttgaccgctgcttttggtcttaagtttgatatccataagttgtcagaagaagcatgctgcaaggaaagagcgtcctggtgaagaagagaaatggcagctatcacgcttttatcccataatagaggaatctctttatgatgtcctcgtgtgtgatgagtggatgtttattcagg

SEQ ID NO: 25544 - DNA, 434 bp, Glycine max
ttgtcgcgtgggcgttactcatatggctttgccacagcaacatacggttgactatcccagtttcaagcttgtcatcgtaggcgacggaggaactgggaaaaccacttttgtcaagagacacataacgggagagtttgagaagaaatatgaaccaaccattggtgtggaggttcatccactagacttccataccaattgtggaagaattcgcttttactgctgggacactgctggccaagaaaaattcggtggtcttagagatggttattatattcatggacactgtgctatcattatgtttgatgtaacagctcgcatgacatacaggaacgttgctacatggcacagagatctctgtcgggtgtgtgagaacattcccattgttctctgcggaaacaaggttgatgtgaagaatagacaggttaaagcaaagc

SEQ ID NO: 25545 - DNA, 671 bp, Glycine max
ctcaccgtctggttaatttattccttctcacaatgcttgccctgctcatcaaagctgaaattagaagcagcagccttgatgagcagtgagtctcattgtgagaaggaatcaattaaccattccttgttaaacctacttacttacccctggatagaagaaaaggtggcaaatggagaactctctaactctggtggttactacgactttaccgactgttcatttgagaagtggacattggattaccggggaacccaattggaggaaaatggcagcattgctgccaaaaacaaaatattttggtgttgaagtttgtacttatattttcctgtgttcatcgtgttgtttttttcaaaaattcgtaggactttaaaagcataggctgagttatgtatttttgtagaatctataagatgtttaaatcgatcgagttgaataaccccctatcatttcaggtgtatgttgtattattgctttgtgaaaaaacgttaaggtcataatgtactccgggctttgatggtttttttttttttttttcatttatacactgctgatgcagcaggtaggattttcccccctcctttttgttggaaatggagctatctatgtcttttttatgatttccactcaaatgttgtccatactttttcaccccataatcaacacgacttttt

SEQ ID NO: 25546 - DNA, 443 bp, Glycine max
tattaagcaccaaagatattagagaagttcgtcacagatcgatggtgaaggccgtgaagctgagtatgttgtctatgatattgtatgcacactggtgtcctctacgactcttactataaaccttcgagattcaggcttacttgtactttctctaattctataatttgaaagtgaaacaaggatattggtgatgaaggaaatggagttacaagagaatggttcaattgatagagacaatatcaataaagatttgataattcacatggaagacatgttagaaagtgtggagcttcccttagtgtcacgttgttgtatctacaaagtacctcagaaaattcgcaaggtgaatgaagcagcttatactcctaccattgtttccattggcccattttactatggagacaagagattgcaatcaatggaagagctcaaattgagatacc

SEQ ID NO: 25547 - DNA, 422 bp, Glycine max
gagaagcacgtgaaagagcagctgctgaagcacggcaaagagctgagagggctgctgttgagaaagctaatgctgaagctcgaggacgtgctgaaagggctgcagtgcaaagggcacaagctgaagcccgagaaagggctgctgcagaggcgaaggaaagagctgaaaaagctgctgctgaggtgaaggatagggaaacacgggaaagagctacagctgcaggggctgaagcagaagcacgagttaaagcggaacgtgccgccgtagaaagggctgctgccgaggcccgagaaagggcagcagctgctgcaaggatgaaccaacaaaagaatgaaaatgatcttgaatccttctttggcatgggtgcacgagctagcagtgttccaaggcctcctagggcttactcttcagacaatgttttt

SEQ ID NO: 25548 - DNA, 768 bp, Glycine max
  unsure (1)..(768): unsure at all n locations
gaggagccacacttgaccattgcatttcttggactcgcctatacaataatttatagaaacctgctgtcatatatgtttcccatgatgctgatgattttggcagttggcatgctgacaatcagggcccttaaagagcaaggccgccttggacgatcttttggtgaagtcacaatacgtgaccagccaccatccaatactatacaaaagattattgctgtaaaagatgccatgcgtgatgttgagaattttatgcagcaagtgaatgtcttcctcctcaaaatgcgttccattttactttctggccatccacagataactactgaggttgcactggtgctgatatcttctgcaaccattctcctcattatcccgttcaagtacattttttcctttcttctctttgatatgttcacaagggagcttgagtttcggagagaaatggttaaaaagttcagaagttttctaagggagaggtggcatacggttcctgctgtccccgtgtcaattttaccatttgaaaatgaagaatccagatcagaaatttacttaaaggaaatggaggatcaatcaaaatcacaaggaaatcagagcagtggaaagtccacatagttagtgataccattttcagtgttacttacagatattgtaaatatgtaaattttgtttcaattttttgtaaagaaaaataggaagctttggatttgttatacggnnnnnnnnnnnnnnnnnnnnnnnnnnnnnnnnnnnnnnnnnnnnnnnnnnnnnnnn

SEQ ID NO: 25549 - DNA, 329 bp, Glycine max
ctcgagccgctcaacagtatggccgcggccgagactggcatctcggcaggtcttctacccgcattgactaagcgaatctctgaaagtgtcgtcgaagtcacgggtgaagtggaaaatgcgttgcatcagagattggagtcaacgggcagcaagaagaagcaggcgaacagctgaatgccgttgcaaagagctctggaaagtacatgtccaaagtgcatcgtgcattcgaaaagaactttgaaaagtttgaactgtacgttcgccgcaacattgtgttggtgcctgacgcgctggcagatgaagtggcgcagattcgagcggagaagcaa

SEQ ID NO: 25550 - DNA, 324 bp, Glycine max
aggataggatggtgggtggtgtatctgtggcggtggagtcgcagagttgcccacgtttgtatgtggatgctctgcccaccacccctagtatgagtgttttgtgtctcaagaggaagcacttgctgagcctcaccacttccttcgttcagagtcacagtgttaatacaattttcaacaagcattgcagacccaaggagaagactaagagactcactattgtcaatgagctcggtggtcaatatgaggacacttttcatgatgtcaaaaagcaaatactcaattatttcacatcaaggctgtgaggactgttcttcaacagttgta

SEQ ID NO: 25551 - DNA, 325 bp, Glycine max
catttcactgtatatcattgcacgacagatccatttagtacctttttctgagttaaactacttcaaacattgctgaagactacaaccagttgaggactaattgaagcgggtcaagacatagcatttgcaaagatttagttcattctcatcactctgcattattcgggttctctactatgtgtaatctcatatcaagattaatgagtatcgtgatcgtattcttttgaatcctatcaacccatatggcaaggcaaagaatttgacagtggacatcattctagattttacaaatcaaaggagcaaccagacatggctgtcatgatct

SEQ ID NO: 25552 - DNA, 151 bp, Glycine max
gataaattgttccgccattgtatttgatggagacacatgacctagtcatcttaattctgtccccaccatgttctcatgatgatgacacaacccattgttttagatcattaattggaactagattaataattcttcctgttactaatcatct

SEQ ID NO: 25553 - DNA, 491 bp, Glycine max
  unsure (1)..(491): unsure at all n locations
ggaaaccatgccgcagcattggctttggctgcaaaactacgggggatcccttcgtatattagtattccaaaaaatgccccaacttgcaaaattgaaaatgtaaagcggtatggtggtcaggttgtctggattgnagcctatgntcaatcaagggaagaaattgccaacaaagtgtggcaagaaagtggtgctatctttatacatccatataatgatggacgcatattaagtggccagggtaccatatcccttggagattctggaacaagcaccacaaatagatacgctagtagtacccataagtggtttgttcacttttttttctgacaaattgtgaaccaaaatgttgtaaaaatcgcataaattccaaaatctgcttcttgattttccaacaaatgaaactgcaggtggtggtttgatatcaggaatagcattggctgccaagtccattaacccagctattcgtatttttgctgctgaacctaaaggtg

SEQ ID NO: 25554 - DNA, 398 bp, Glycine max
aatccatattgctgttttgcatcgtcatgctagcatcttcaatttaatacatgaaataggcccaatgaaagaggtcatattaacttttaatgatgatcaagagaacaatttactacattatgctgcaagacaagcaccaccagatcgacttaatgcagtttctggagcagctcttcaaatgatgctcgggttgtcatggtttgaggaggtgaaaaagataatgctaccatcatccatagagaaacgaaattctaatggcattatacctcgtcaactattcaccatggagcatgaagaattactcgagaaaggagagtcgtggatgaagagaactgctaagtcttgcatggttgtttcaactcttatacaacaggagtgttcactgctgcattcagtgt

SEQ ID NO: 25555 - DNA, 120 bp, Glycine max
aatttatcttaagctatttgttatattacctgtgcatttctgacatacagtgctttgacaatgccaagggtacatgcgctgataattctcactgaatgaagtaactgttggtacttggtc

SEQ ID NO: 25556 - DNA, 677 bp, Glycine max
ggctttttaactagtccaatacttcagttgaatgattcatcatcaggaactggtcaggaagaaggactcaaacttgttagaaaatatggtgattcttgcaaatcactattgatattcacaatgttcatcattgttttaagctccttccttttcttcatggagcccccacctaatgcactggcatctgtcaatgcagcagctgttgatgccttggaatatatgttgatatttggctgatgcaacatgtcataaggtttctgccctaagaaggacttataccttggaaggaaggcagtcgctactgccctacaaagacatgtattgtaaaaaaggaagtaaaaagtgagaaatgcattagaggcactaattactgagattaggctctactgtttcttctagtatataaatattatagggttacaaaagtataattgtgtaagctcagtccccagcccaataaactaagttttgcacaagcactaatattttcaagattagattacaattctcatacttgatagatgcttaaaatagaaagttattttcctccattttaacacactccacaattgagagattaatatgtgctatagtttagtccattttattgtaaatgagctgtatagacataatttttatgtgtgtgtgatgctgtcagcacatgcctcagagttttc

SEQ ID NO: 25557 - DNA, 306 bp, Glycine max
aattttcatgaacacaaccaaaaataataaacctcaagtttaaggttgatggaatttagcagaagcttcaggttgtcaaggtcccaccacatactgctttcatctgaatctgtgagttcggaatgtgccaaaattgctggctatgagagactctcacaatcgttgaggctaagtggggaatatgatttcattgataagcagaagaagcataaaaggggtgtggggcttcttggtaaggttttctctttcagaagagtttcctctccccacggagtcggagagcctaataaggtgcggagacggtgg

SEQ ID NO: 25558 - DNA, 333 bp, Glycine max
atttgccatcaacgacaaatggataacagatcctcaacgggagtcagtaacaaggggtcacatatgtaacaacattctaagagtagatagatgatgcattctggttcaggtcactattgctagatgtatataaaatgcaatatggaaaggaggggagacgcaagcaagcatgcaagaatgagcagaatctaaatgagattcttttgctaccgtcctgtttgtacatttgggtctttttttttggtccaagtacatttgggtctgaaattagagaccatgacattatctaggactgtgcaagagttaattagcaactaggaatttagggtggga

SEQ ID NO: 25559 - DNA, 351 bp, Glycine max
aaagattcatgcactccaactcgcccacactcttttctcaactcgtcactctcacaacataatcctcactttttgaaatttcaaatcggttcggttcggtttctaacataccttcacaatcccctactttgctccgctccttcttttctcactcagtaaatgggttggaatctcctcttctggctcgtcatttgtttccctgccaacattgcccttctcgcctccactttctaccaggctttgatcctgtcggatttggaatctgattacatcaacccgttcgacgcggcgtcgcggattaactacttcgtcctcccggagtacgtgggagatagacgctgtgtgcctctg

SEQ ID NO: 25560 - DNA, 276 bp, Glycine max
gaatgctcttcgtagtttagcagagaacgatgtggcacatgtggagcctcagcgtagagctgtcgataaagattttgacaagctttctcttggatgtgacaatggtttcttgtgggatgtgatcaatccagaatccagtgaaccgcaaccagaagatggatgtctagagaaaatgcttctgagcatcaatgtgaaggctaaatcactgaatggggagtgaactggcttcacgactgctactgctgtcttagacaggcttcttaaattcctgcttat

SEQ ID NO: 25561 - DNA, 385 bp, Glycine max
tagcatctgatgttgttcctcagattcgttctgctgcaaaaaaagatcgcgatgtcatggaaaagggaattaaggcctttgtctcttacatccgtgcttataaagagcatcactgttcctatatttttaggtggaaagaacttgaaattggtaaattggccacgggatttggcttattacaacttccttcaatgccggaggtaaagcaccactcactttccacggatggatttgagccagttgtagatatcaatttgggggacattaagtacagggataattcacgggagaaacaaaggaagaagaacctgcaagcaaagaaagaagccaaagagaaagagccaaaacctcaaaaaccgaagaaaaccccaaatgcacccactga

SEQ ID NO: 25562 - DNA, 283 bp, Glycine max
gcagtattgatttatattttgaaaattaaggggccagtgaaagtactgcacaaaatagttcatttcatttgtatttctgcattttctacatattcaggtgcggggtcccttgcttttatacatttgaattgacaggatcttttgagatattagtgtcaaatggcctatgctattaggattacatacttgcaattcaacagctgtatgacaatctttgtcgttgtttgtgcagctttgaatgagactctggatgctgaagtccggcgtttgagggcgtgctgtt

SEQ ID NO: 25563 - DNA, 269 bp, Glycine max
  unsure (1)..(269): unsure at all n locations
cgcacccaatgtctggtcccgaaagtggcaagtactcgtggaaaggtctgcgtatgatgtacgaaaaagtgcggatcatctcaggcggtcacaaccacgtgatggaggacttcctccacatttgtgagacagaaatgtgccgcatgttggagatgacgtgcgagtcccatgatgagtatgggctcagcagccaattcctgactcacttgactggccgaattctcagtgtacagggagtncaaaacacgctcatcgacactcgcgggttc

SEQ ID NO: 25564 - DNA, 974 bp, Glycine max
gtggattggtttagacttataaagtcgtcttttgctggccagcacttcgtaaatccacttatctgaaattgtgaacagtattgttcttgcgttgtttcggagggtcaattgtttggttgagcaaaaatctgaaattcaatttcagttgaaagcaaatggggaatcttttttgttgtgtgaaagttgatcaatctacggtggctatgagagaaggatttggacgatttgagaaggtacttcagccgggatgccattgcatgccatggttccttggaaaacaacttgctggtcatctctctcttcggctacagcaactggatcttcgttgtgagaccaagacaaaggataatgtctttgtcaacgttgttgcttctattcaatatcgtgccctggcagagaaggccaatgatgctttttacaaactgagcaatacaaagacccatattcaagcctatgtttttgatggtattaggccttgtgtccgagtgataatacgaaacctacaataagtggtttaagcatattttatcagctaagaaattcaagcctatgtttttgatgtaattagggcaagtgttccaaaactaaacttggatgatgcttttgagcagaaaagtgaaattgccagagctgtggaagaagaacttgagaaggctatgtcagcttatgggtatgaaattgttcaaacactgattgttgatatagatccagatgtgcatgtgaagcgggctatgaatgaaatcaatgctgctgcaagattgaggttggcagctaatgagaaggcagaggcagagaagatcttgctaatcaaacgagctgagggcgaggcagagtctaagtatctttctggtctgggtattgctcgccaacgtcaagcaattgtggatggcttgagagatagtgtgcttggattctcagttaatgtacctgggacaagtgcaagagatgtcatggacatggtccttgtcactcag

SEQ ID NO: 25565 - DNA, 349 bp, Glycine max
  unsure (1)..(349): unsure at all n locations
tgaaggtcctgccattggagttgctttctctcatcctttggttgatggtgctgccgctactttcttcaccaaccgatgggcaaagctggttcgaggcgaagaactggagcccgatgaagttcctgttcttgatcgaacactactcaaatttccagagccatcagaaccacgtgttgatctcccagagtggaagcctgtatggttcatgccagacaacattgctgagcaaaacaagataagtgctatattgttgaaactctcatcaagccaagtggagaagctgaagaagaaggctaatgaacaaccttcanaagaaggggtaagccttatagcagtttgaagctatttc

SEQ ID NO: 25566 - DNA, 381 bp, Glycine max
cttcgattatgttgtcccatgtgaagcaacctggtattacctttgtttaccaccctggcttgtctggtattgataaggtcaatgctaagcttggtagtgatgatgatgatgacatggatcctttacttggggaggaggagaagtttgatttccttgcctggttcaaagaaactgtgcaatatgctgattttgtggtcctcaagatgaatgcaggcagtgttgaactcaagttcctctctgatatatttgagaatggagctatatgctatgttgatgagttgtttctcaagtgtcccgagaggggaggtgatgccagcaagggaagttgcatggatatttacaaggatctccgaagcaatggtgtctatgtgcatcaatggt

SEQ ID NO: 25567 - DNA, 364 bp, Glycine max
taataataacaccctcttgtaagtcttggccattctattctattaaaagcaaccaccaaaaaaaataaaccttagctactacgaccacagcctttagtcatggccacaagttgctcctacatggtttccaccaaattatccatgctaggctggagtggaggaagaagaagagaagcgagaaaccggagagcattcttggtctcagctcaacaacaaagtgatgttcaggaagcagagagcgtgaaggtagtagaagaggagaaggagcaagaacaagtgcaaacccaaacaccaaagccaaaaggaacaacaccaaggccagtggaacctcagttgacatgtgagagcaagacatgttgaggga

SEQ ID NO: 25568 - DNA, 503 bp, Glycine max
ctcgagccggcattgctgagctcggggtgatgatgatgaccactattttagtaacccttgatatgattcttatatggcagatacacatcatcatagtgctgagtttcgtggtactcttcttgggattggaattaacttttttttcgtctgtcctgtggagtgtgacagatggaagttggattatactggtctttgcacataataatgtttctaataatgtacgtatggacttatggaagcaatactcaagtatgaaactgaagtcaagcaaaagctgtcaacggatttgatgcgagaactacgttgtaatcttgggacaatacgagctcctgggcttggtttgctttatagtgagttggtataaggaataccggcaatttttggtcattttctgaccacacttcctgcaatacactccatgattatatgtgtgcgtatcaagtatgttccagttcctatggtgctgcaaagtgaaaggtttctttttcggcgagtctgcccca

SEQ ID NO: 25569 - DNA, 436 bp, Glycine max
tcagaattgcatgcttagaggacatctaggcactttttccttctgatagcagtccattctatgctggttttggtaatagggatactgatgaaatcagctaccttaaggttggaattcccctaggaaaaatcttcattattaatcccaggggagaggtggttgtaaaccgtcgtgttgacacaaaatcatatacttctctgcatgctctcgtgaatggaatgttcccccctactagctcttctgagcaggaggaccttaactcatggaatttctggaaactaccccctcctgccatggatatttgaaagggccccatgaatttttgggctcaattatgcggattttaactcaagagtttcctttaatttaatcagaaactttataggttatatgtatctgagcccaatgagaaccacctgattctgttgatgacatg

SEQ ID NO: 25570 - DNA, 699 bp, Glycine max
ggcactggtttcaccgcacaagtttatgaactctctccccacttccttcacaaggaatggattatggaacagtgggagaagaattattacattagtgccatagccggggctaataatggatcctcattggttgtaatgtctaaaggtacccagtacttacagcaatcctataaagtcagtgattcgtttccatttaagtggatcaacaaaaagtggagagaaggattttatgtcactgctatggccactgccggctctagatgggcaattgttatgtcccgtggggctggtttttcagaccaggttgtggaacttgatttcttgtatcccagtgaaggcattcatcgaaggtgggatagtggttatcgcatcacctcaactgctgcaacatgggaccaagctgcttttgtccttagtgtcccaagaagaaaaccagctgatgaaactcaggagacactccgcacatctgcttttcctagtactcatgtcaaggaaaaatgggctaagaacctctatattgcatctatttgttatgggagcacagtgtcttaaactgctgaaattgagatttctggctgacatcattttgaccactggcacaatcctgcttactcttacatcttctagttgggaaccgagatcctctctgacaattttctgaacaatgcagttcagcattaactcattctacatgactgg

SEQ ID NO: 25571 - DNA, 634 bp, Glycine max
cttcatgctattcccttgattgtggttgagtcaaggagagaagtagatgaggtgaaggaattaatcatcatagtcaatgaatatgttttgggtttgcagacggagttgaagagaagagaaatgaaggacaatctaactcggcagcaggagcttgcagcttatttcactcactgcaaccttcaaaccccacatttgaggctagctttgttgaatgcaatgactgtgtgcttcaaggcaaagaaccttgcctcagctgctaactttgccaggaggctgcttgagaccaatcctactgttgaaacccaagccaagacagcaagaaaagtgcttgcagctgcagagacaaatatgactgatgccaaaccattgaactatgatttcagaaacccatttgttacttgtggtgcaacctatgtgcccatctatcgaggacaaaaggatgtctcttgcccttactgcacttcccgttttgtgccaagccaagagggacagctatgtactgtgtgtgatcttgcagtggtcggggcagatgcttctggattgctgtgttcaccttcccagatacgttgattctgctgctagaccagaaacattttttcccccaatttgtttcagaagatccctgaaacagagg

SEQ ID NO: 25572 - DNA, 625 bp, Glycine max
  unsure (1)..(625): unsure at all n locations
actattactactactacatcatcatcatcatcatccatggaacaagaagataacactatcatacccacattcctcagaaaacctgcagcagaccagaacaacaacaacaacaacaacaacaactctcccaccaccccttctcacaagtctttgcatgttttccgccgcagcaggaggcggtggaggaaggaagtggcagtgaaagaagatcaagatgttgatgagggtgatgacagagaagagatagagaggaagattcatgcattgcagaggattgtgcctggcggtgagtctttaggcgtggacaagctctttgatgaaactgctggatatattcttgctttgcagtaccaagtcaaagccttgagggctctcactggattctttgacaagctggagaaggagaagacacagtttggaggttgatgatgaatgaatgaaaatgaataatccatggtgatgatgatgatggattatcgaagcaagcagcctaggttaggttcttttggtttttcccacagaccccattagttagaatttntatttttttattttcttcttttaatttttatgttttcctttgttgtacttttggacgttgggatcaagganaatgtttatcccc

SEQ ID NO: 25573 - DNA, 794 bp, Glycine max
caaaaactccattgattgaagaaaaagagagcatcatatcatcgtattcatggacacagaacaagaagagatgcagttcatggggctctacggcgtctacagagaatcctacaagatcatattcgcatggagcaaggtcttcaacaagatcaccttaaccctaatcctccctctctccttcatctttctcatccacatcgaagtctccaacatcctcttcggaaaaatcctccacaacacccaacaaatgatggaaaccccacaagacacgccccaataccacaacctcaccaacatgctctcttccgaatgggccattttcattctcttcaagctcctctacttcaccttcctcctcgtcttctccctcttatccacctcagcagcggtctacaccgtggcctcaatctacacttcacgagaagtcaccttctccaaagtcatgaacgttgttcccaaagtatggaaaagactcatggtaacttttttatgcacctttgtggcgtttttcgcgtacaacgttatgacactcgttgttttcgttatatgggcacttgcaataggactaaggaatggtggggttgtggttttggttgtgttggggatgttgtatttcgcggggtttgtgtacttaacggtggtttggcaactggcgagtgtggtgaccgtgttggaggaagacacgtgcggggtaagagcaatgatgaagaccaacgagttgataaaagggagaatagggttgaccgtactcatattcttgaagctcgtgatttcttttgggttgatacagtttc

SEQ ID NO: 25574 - DNA, 247 bp, Glycine max
gtagtagtagttgtagcccctgcctgagattaactatatactagttgttagttacttacttacatacatagagatagagtcaatggcaattgcagcggcaaactcatcacccaccatgagcctcagccatagccagagccaagagggtgccaccaccgcctccacgagcaacaagcccgtcgtcgtcgacgataatgatcacgagcacgacatggtcatgcccggctttcgcttccacacaacataa

SEQ ID NO: 25575 - DNA, 312 bp, Glycine max
ttgccaaagaaggaaatctcagtgacctatttgctaaaggagaggctttttcaactctctttaatgttattggaattggagttggaattcaattagcatctaccatctgtgcatcaatgcagggaaagttagttgcgggtcctctcctttcaataatacatttatacagtgtgtctgaagaaatgagagcaactcctatcaatacgttgaatccacgaagaactgcaatggttgtggctgattttctcaaggcaggaattgtatcaagccctgctgatctaagatatagagaacatctgctgttcaatgtgc

SEQ ID NO: 25576 - DNA, 595 bp, Glycine max
ttgattaatgcactactccaaagagacccaacaagtcgtataggttcaaccactggtgccaatgaaatcaagcaacatcctttcttccgtggaatcaattggcctcttatccgcaacatgactccacccccattagatgttcctcttaaattgataggaaacgatcccgtggcaaaggatataaagtgggaagatgatggagtgctagttagctctattgatatggatattttttgacggtttgcactgttcactcaggatctttggtcagcatcttatctgatttcatgctgcaacgatcacggggtctaagtcattcaagtgtaatagtgtctgttgatttggttatggtccaatactaccatcatgtgatctgccaatagacaacttcaaacaaattctaagttatgtaggattagcagaaaagtagaatgtacattgaataaagtcattttccgatagaaacaagcatcctagttatatgctcatcgacgatacatcaataatacacttttgtatatggcttattaaaatatcatacatattactagttattttgattatggtacatgtaatcaaatttatttattgccac

SEQ ID NO: 25577 - DNA, 343 bp, Glycine max
cacagatattactgaaaattattctgaaattgaggtcatcaagtgcattcagattggtttattatgcgttcaacaagaccctgatgctagacctacaatggtgacagttgcttcatatctgactagtcaccctattgaattgccaacaccaccagagcctgcatttttcttgcatggtagaatgcatgaacatccagttgcgaatgaatcaagttccaaccaatcgatcaacacttctacaccattctcgaacaatcaaatgtctataagccaatttcttcctcggtagtaagttgatattttctcctttaatttgattaagcgaacatcgtaagtataggaa

SEQ ID NO: 25578 - DNA, 322 bp, Glycine max
atccaagatttccctcttgtaagagagagagataaaagaaaatcagcgtcctacagcaccccaccatgggaacccaccaagcacttgtttttatcatgtttttccatcctatatatgacccataagcacacacaagtgtcattcacagccattctttatctctcatttttttaggctcataaatcttttttatgggtttcagggtcactactaccctgtctctgatctcctggtatagctcttgtcctagacaagatgactgcaagtgcacaattgatggttgaggggacagtcatttacaatgaggcattcttctgggagt

SEQ ID NO: 25579 - DNA, 266 bp, Glycine max
aatgatctacaattcaatgcctgtctttcatgagttgtgttgattctcaagatcggtgcaggtgaaggtcaagatcatttgggaccaggagacaatgctgctgactgctttcctctgttcttgttggtgaaagtttgttactcaggttccaacatcatgctaagttactttgttatcatagtcatatgtaatgttctgagtagctagctgggcaattcacttaaatgatgcaagcttgtagaatttttgcacctgtgttatttgta

SEQ ID NO: 25580 - DNA, 297 bp, Glycine max
  unsure (1)..(297): unsure at all n locations
cttgttgggtgtcattcgttttcttattttcttcttagcatacatgaatcagaatgcacagaatttttatctggggatggatgtgaagagaatcatggatggtgatagagttgggaacactaattgggtaattaaggaagatggtgtagaagatagcaacgattcatcatccattggattcaactcagaagattctatttgctcttcttcttcatcagagttggccgaggacgcttcatcttcaacatcttctaattaaccancacattcaaatggacctttgtttgaattatcaga

SEQ ID NO: 25581 - DNA, 399 bp, Glycine max
cgcactattagtgatgttttatcaaaaccatggctgccactacctcttggccttaaagctccagcacttgatggtgtaatgggtgaattacaaagacaagggattcccaaaatccctccctcttgtgcttgagtgccaattctaagagagaggtgattttcctcttacgcgaggtgtgatggccataaaaccctaattcgacgacttctcatctctcttcccttgcatgttagaatattatgcgcatgcttgcttcctatttcacatctagcgaaaattaaaaggggagagaagactatatatataacttttggaactttctttgttcatgtgctatgtccagccaagtagtttagcccttttgtgaaatatatgtgagattataaaggctgtgatttt

SEQ ID NO: 25582 - DNA, 368 bp, Glycine max
atttggtaactaacttaacttgtttgttcaggtcgcgtttggatgggggcatgctcttgctcgtactgcggatggcaagttgtttggatggaggctattcagcggacggtaggataggaaaaatggggaataatcacttccagacatctccgttggaatccgagtctccaaatatctcacagctctcgcggaccttgaagctgctgaaaagagagtcttgcaaggaatggagcaggagaataacatgccaatagtatgggagccccgcttggtcgaagaattacacggtgttcatgttctggacattgcgtgtggccttgatcactctctgattctttgccgtgatggtgtgctcttgagctgtggga

SEQ ID NO: 25583 - DNA, 461 bp, Glycine max
actatcaatgggttattttgtcagtagcttattggtggcaattgtggacaaagcaagtaagaaaagatggctaaggagcaatctgaacaagggcaggttagattacttctattggttgctcgcagtgctaggactactgaatttcatactttttcttgtattagcaatgaggcatcagtacaaagttcagcacaacatggtgcctaatgacggtgcagaaaaagagcttgtgagtgcacatgatgtgaaagttggagttggtggaaaggaagaagcataagatatagtctttaaatctcattttgtgtggcccaatatatagtgtgcaagaacgaaacattgtgccccacatttggttaatttttgggtgtttcgtcgacctcatttaacgaggacaattgtgatgtactattaagtattgactggtataaaaaaggcaaacgacagtgtgagttgtttcc

SEQ ID NO: 25584 - DNA, 403 bp, Glycine max
tctcgagccgaatcggctcgagaaccaaagtccaataacacagagtccagcaaccctctcatcatcttctcaacttcaggactacacattcttcaatataaactcacttgtttctcagtttctctccataaagaggctgtttcccttcggttctctcagccaaacctgaaaagacccttttgttaaaatcccattagggtttcaactactgtgctcttgaaggcagctcagggaattgcattgaaggttgcagcgttgaaacgcatacatgtgaaatctgaaactggcttacaaactctccaacggggtcagtttaaaaacccccaatggcccaaatgctgttcttgacactctcaaggactatggattctccaaaactgaggttgcaaaacttgtggagaag

SEQ ID NO: 25585 - DNA, 351 bp, Glycine max
gttcagcttcattcattcacaccaaaaaggtgaatgtgaacaccaaacaacaacaaagtaactacacacacttcgagcttccaaggaaggaagaagatgggtggcgtgacctcttcaatggcggcgaactggcgttcttccctccgtccccggcgtcctacaaggtgctgaaggaggaggcgacggggctgctgctcatggagccgttcccgcaccgcgagaacgtggagattcttcggttcccgaaccgccgcggcacggagatcgtggccatgtacgtgcggcaccccatggccaaatccaccttgctctactcgcacgggaacgccgccgacattggccagatgtacg

SEQ ID NO: 25586 - DNA, 1603 bp, Glycine max
cagagacagggatcagttatggctctgtgttcagtttttttcaattttcttcttctgcttcttctttctttcaccaaagaagctttaggtgtttcagagcaagaagctgacagagtgcatggactacccggacagcctccggtgaagttcaaacaatattctggttatatcactgtcaatgaaacccatggaagagcactcttctattggttctttgaggccactcataaaccagaagaaaaacctcttctcttatggctcaatggaggccctggttgttcctcaattggttatggagaagcagaggagctaggacccttctttcctcaggacagcagccaaccaaagctaaagttaaatccttattcttggaataacgctgccaatcttttgtttttggaatcccctgttggggtggggttctcctacaccaacaccagcagtgatataagtgagcttggtgacaccattaccgctaaagattcacacacctttatcatcaagtggtttagaagatttccacaattcagatcacacgaattctacatttccggtgaaagctatgcagggcactatgttccgcaactttcagagctcattttcgataataatcgcaatcctgtcgagaaagactacattaacttcaaaggattcctgattggaaatgcattactggacgacgaaacagatcaaaagggtatgatagattatgcatgggatcatgctgtgatatctgatggagtataccataacattacaaccatatgcgatttcagccttccaattctaaatcaaacaaatgagtgcaatgtggaactcaataagtacttcgctgtgtataagattattgatatgtatagcttgtacactcccagatgtttcagcaacaccagcagcaccagaaaggaagcccttcaaagtttttcaaaaattgatgggtggcacagaaaatcagctggatatgatccttgtgcatccgattatactgaagcgtacctaaataggccagaagtccaaaaggcattacatgccaatgtcaccaaaattccatatccatggactcattgcagcgataatatcacattttggaatgactcaccacagtccatgcttcctgtcatcaagaagcttattgctggtggtattcgcatttgggtttacagtggagataccgatggaagaattcccgtgacttcaacaagatacactcttagaaagttggggcttgggatcgtcgaagattggactccctggtataccagcaagcaggtgggaggatggaccattgcttacgatggacttacttttgttaccataagaggtgctggtcatcaagttcctactttcacacccaagcaagctctgcagttggttcgacacttcctagcaaataagaaattaccatctcaaccaatttaatcacttttcttttaatttatcattttgaagtttgtttctgattaagaatggatatttcttgtttctgggtttcaaaaagcccacttgtgttctatttttaattttcaattatttcataagactcttctgaagtatgaattgcatcatatccatatataaaatttaatgtctacctattagcagt

SEQ ID NO: 25587 - DNA, 653 bp, Glycine max
ggcagcaagaatcttggtagtgctcttgtgcaaacatgagtttgatgtgagataccagatgcctgaagataaattgtatattgctcagctatatttcccacttgttggacaggaattaagtgaagaagctgccatgtgccttcttgcacaatttgatggatagtcttaaaacggtggaggaatggacaatctgtagagtcgtgggaggctcataaggcaccggtccaaactatcataaagctgccctcaacagagcttgttataggccctagttgttcctcaattggttatggagaagcagaggagttaggacccttgtttcctcaggacaacagccaaccaaagctaaagttaaatccttattcttggaataacgctgccaatcttttgtctttggaatcccctgttggggtgaggttctcctacaccaacaccagcagtgatataagtgagcttggtgacaccattaccggtaatgttaaatgttgttgtcatctaaatatttgtactttttttatcttgcttttactaaatgtgatttattgatggaacgttatacgtcaacatcagctaaagattcacacacctttatcatcaagtggtttagaagatttccacaattcaggtcacacaaattctacatttccggtgaa

SEQ ID NO: 25588 - DNA, 358 bp, Glycine max
aggattgcaggtttgcagctggttctcaccatatgtattcacgccagaattcagcagaccgattcaatgggtagtttgaatgtccatttttttgttctcctcttctacttttgcataaaaatgctgtatgccttaatctgcagaaatcatagggtttttttttttaggtgtatgctgtatgctaaatcttcggtctctatttccttcctaaagaacatttaggtttttttcattttttggtgatctgtatatgcaagaccttggagtgggtagatacgttgtaccacctacaagtatatgataaatcagagttcactatttgaagaatgaggctttcactcctcattattcaattaga

SEQ ID NO: 25589 - DNA, 267 bp, Glycine max
gaatcactttggagtggggggttgcgactgaagcgtgacattactgaatatggagaatttctgcgtagtttcaatgctccgtctgttgatgaaaagtttgaattattgggcataatggccaatgtatttattgttgctcctgagagcctttcaactttgtttgagggcacacccagcatacggaaagatgcacaaagatttattcaacttcgggatgactacaaggctgccaaacttgcgtccaaactaagttccttgtggtcttaa

SEQ ID NO: 25590 - DNA, 632 bp, Glycine max
gaagtgaagacttgtgatgtttctaactctgctggaatccagatacttcaaaaaatgatgtcacttgagcgaaatgaacctggtttgtctctggatggaagccttgtcagtgaaattgaaggtgaaagcgcagtcgacaggctaaaaagacaagttgaccatgacaggaaacttatgaatgctttgtataaagagctggaggaagaaagaaatgcttctgcagttgctgcaaatcaagcattagccatgatcacaaggctgcaggaagaaaaggcaacattacatatggaagccttgcagtacttaagaatgatggatgaggagtctgagtacgaaacagaagctttgcaaaaagctaatgaccttcttgttgagaaggagaaagagatagaagagttggaagctaagcttgagttctataggaagaagttccctgatgaatctgtgctggaaaacatggtggatacaaactctgaaatgaaggtgaaagatattggattggatcattgcattgaaaaggatgaaagtatccttggaaagtcagtttctgaaaatactaatatatctgacaaatctgaatttctacccacatctctggaaaaacagaatgttcaatctgtaaaaaattcacc

SEQ ID NO: 25591 - DNA, 530 bp, Glycine max
tatgctatcgatgggcaattttctataaaatctgacgtcttcagctttggtgttttactgttggagattatatgtgggaagaaaagtagatgttctagtgggaagcaaattgttcaccttgttgatcatgtgtggacattgtggaaaaaagatatggctttacaaatagttgacccaaacatggaggattcatgcattgcgtctgaagtgttacgttgcatccatattgggctcttgtgcgtgcaacaatacccagaggataggcctacaatgacctcagtggttctcttgttggggagtgatgaggtgcaattggatgaacctaaagagccagggcattttgtgaagaaggaatctattgaagcaaattcaagctcatgtagttcaaccaatgcgatgtccataaccttattaactgctcgctgataatcaacgagataggtggatattgttgtaaaggaaattgctgaatggtatgaaggatattttgcacgagaagtaccaaaatgtaaatgcatcagttgttgcat

SEQ ID NO: 25592 - DNA, 288 bp, Glycine max
gccttttgaaaatcaaccaccaccatttcgcattagatggacctttggtttgtcggtaatgaaaagttcaagatggatgatgactatctttgataaggtcattaatcactgccagctttggtttgtttacatgagtatattgtaaacattccaatgtgcttatccgcccaagactttgcgctttcttttagctgggatgggagtggagaatcacccaatggggaagccaaatggcacaatttcattgcatttagaagttgttttctgaactgtacattagagtggtaa

SEQ ID NO: 25593 - DNA, 251 bp, Glycine max
ccattatcaatccttattgttggcgtaggaggagctgatttcgaagaaatggagattttggatgctgacaaaggagagaggcttgaaagttcatctggtcgcgttgcttcacgtgatatagtccagttttgaccattccgtgacgttcgaagtggagaaatttcagtagttcgagcacttttagctgaattacctactcagtttttaagttacgtgcggacagaaatatcctaccgaattcctagtcatgt

SEQ ID NO: 25594 - DNA, 417 bp, Glycine max
cccatgttatcgcccacgcgtccgcggacgcgtgggctttgaagtaagaagagtgtgttgtgttgaagtatcaaagatgttgattggttctctcttaaacaggcgtcctaagatcaaggggactgtggtgttgatgaccaagaatgtgttcgacgtcaacgacttcatggcgactactaggggcggaccagccgctgttgccggcggcatcttcggtgccgcccaggacattgttggtggaatagttgatggtgctacggccatcttcagccgtaacattgccatacagttgatcagtgccaccaagtctgagaatgcacttggacatgggaaagttggaaagcttacctattttggagaaacatcttccttcattaccaaacttgggagataggcaggatgcattcgatgtttatt

SEQ ID NO: 25595 - DNA, 520 bp, Glycine max
ctcaagcctcatgacttcagattctttgttggttatgccggatggcaactggatcagttgagagatgagattgagtcagattattggtatgtagctgcatgtagctcaagtttgctttgtggggctttatcagattcttcagaaagtttgtgggaggagattttgcagctaatgggtggtcattactcagaattgagccggaagccaaagcaagacatgtagctactcatgtatggtttcaaattcagagtcaaatgaatgaagaacctgtaatcagggtgctacaaagtcaactgtactgatgttcactttaatgtcaaataaatagataatttatccccctgtcctactctattgttataagaggaattgtacgttgcttggttttggtaattatgcttgttagtatagtttgatgtaagtatgagaataagttgtgttggctagcatttttacgattaaactttagaatttcatctagagctcaaatagcttcagctccatttgattgggaatgatc

SEQ ID NO: 25596 - DNA, 515 bp, Glycine max
gttagcccaaaaatcaagaaacccttcacacaaaccccaccaccaaccatgtccaccaaactactcctaaccctaatcctcatctcttacaccctctccaatgtcataggagaagaaacgggctttgtgggcacactacaccccaaatccttaggtcttcacaagaaacaaaccctaagccacttcaaattctactggcatgacatagtgagcagtggagccaactccacctcagccacaatcatcccaccactccccaaatacaacacaaccacttccttcggcatggtcaacgtcatggacaaccccttgactctgggccccgagctgggctccaagctcgtgggccgggcccgaggggttctatgccctaacctcacagtcccagatcaacttgcttatggtcatgaactttgccttgtttgaagggaagtacaacgggagcaccataactatcgtggggaggaaacgctgttagtgaaaatgaaaaggatattcctgtggttggtggaagt

SEQ ID NO: 25597 - DNA, 264 bp, Glycine max
gggctatgttggacttaagaaccagggagctacatgttatatgaattctctactccaaactttgtaccatattccttattttcgaaaggctgtataccacatgccaaccccagagaatgacatgccctctggaagcatccctttggctttgcaaagtttattctacaagctcctgtatagtgacaccagtgttgcaacaaaggagctcactaaatcttttggatgggatacatatgattctttcatgcagcatgatgttcaaga

SEQ ID NO: 25598 - DNA, 296 bp, Glycine max
ccctcgagccgattctaaatgcaaccttacccctctctttgaattagcttcacttcacagtcgcaccaacctctctcccttactcgcacgcgaacgatcacatacaacacaaacagtactctccctcttggtgcaaatcgaacctagaaacctcaatcccttacccttccatggcggcaggactctccaccgccgcaaacttaaagccctacaatctcctccaacccccaatccctatatctaaaccaaccccaccactcttcttcaaccccttaagatgtttccgtcgcagtaca

SEQ ID NO: 25599 - DNA, 307 bp, Glycine max
cactgaggcagattctttgtaaatgtttggatgtcaatccaggaaaccggccagatgtggtggatgtaaggaaatgcattcagaatatgttagtcaaaccgcaatttgattttctgggcaacttggaggtcacgataagtagggactacacaggaatctgcttggttctaggggagttgtgtttgttgcctaagcaaagttctaatgaactgattgaacatgagttgtgggagctagaaattggtggtcaaccaaatgttgttcaagatggcaaaggcaaatctgatgaggactttgctctggctta

SEQ ID NO: 25600 - DNA, 258 bp, Glycine max
ggggagccaaaggaaggacgtgattgagtgagcaaaatggaacctgaaagcccagctttgttgcttattttgtttgcaaccctactttggttcttagccacaaccctttccagaggcaaatctccaccaccctctcccaccaccattcccaaagcatatcctgtcatcggttcggtgttctccatcgccgccaacaaccgccgccgcatccactggatctccgacatcctccacgcctccgcctcctgcacattcgtc

SEQ ID NO: 25601 - DNA, 1222 bp, Glycine max
tgctgctgccaagcctgaagaacaagagaagttcaattttgattttgttttgccaaagtctgctgatattgggaatacaaacacacctggtagacaagcttctccactttacatccaacgcatgagttctagtcaggataagagcaggacatcacaatcaggacggatttctttcaagggtttaaaagggagatctctgagttctgcagaggagaagtccatagttgaacctgaggttttgatgaccaaggaaatagagtggtctaacaatttggagcattcactaagagagagggacataaggcagggaattgatctagcaaccacattggagaggatagaaaagaactttgtgatttctgatcctagacttcctgataacccaattatatttgcatctgatagctttcttgaacttacggaatatacacgagaagaaattttgggacgaaattgtcggtttcttcaaggaccagaaacagatcaggcaactgtttccaggataagagatgctatcagagaacaaagggaaatcactgtacagttgataaactatactaagagtggaaaaaagttctggaatttgtttcacttgcaacctatgcgtgaccaaaagggtgaacttcaatacttcattggtgttcaactagatggaagtgatcatgtagaacccttaaaaaaccgcctgtctgagacaactgagcaacaaagtgctaagttggtgaaagccacagcagaaaatgttgatgaagctgtccgagaacttccggatgccaacttggtaagagaccagaagatttgtgggcaattcattcccaacccgtctttccacgacctcacaagaacgacaatccttcttggatagcgatacaaaaggtagctgcaagagatgaaaaaattggcctgcaacattttgtgcccataaggccgttgggttgtggagacactggcagtgttcatttggtggaactcaaaggtactggtgaactatatgcaatgaaggcaatggaaaagtctgtgatgctaaatcgtaataaggttcaccgctcatgcattgagagagagattatatcattattggatcatccttttcttccaacactatacacctcatttcagactcctacacatgtatgtttgattactgacttctttcctggaggagagttgtttgcactgcttgacaagcaaccaatgaagattttcaaagaagaatcagcga

SEQ ID NO: 25602 - DNA, 643 bp, Glycine max
gcttcatatataattcctcagcctctatagtagcatcagaaggctttgcagggttacaaggaagtgaaagtgcaaaaaagatgtttcacagacattagttttgataaaattgctgcagaatccatggaaggtagggaagcactatcagccgcagctgtgaagcatagtgttccatgtgcagaaacacttgcagatattgctgcttattgcaatgagagaaagctagctagtagaaacgttaaggatgcctgtgataaactttacatatggtttctcctgaagaaaaaggaggttttattgtcagaagcaagaatactgggactaggcccaagattcatgtcaatttatattcaaaagctagctattgagcgacgcatatattatgatgaagttgaaggtttgactgtggagtggcttgagacaacatccactttggtgcttagcatgtctactagtaagtgtgcatttaggaggggctgccctaacaagtggagggcatttgaagaagttgcattgcttacttgtccatataacctggattttaccatggataattctaaccagagttttgtaatgaaagtggatgatagtataactgccatggacagggaggagccatttcaagatcagacttatcgaaact

SEQ ID NO: 25603 - DNA, 420 bp, Glycine max
gtccctatgaaaccataccaatagctcaacgccgcatctgttctccctccaaaagaattcaggtcatggatgtgttgttgttgttattattatgtgttctcttggttggtttgccaaacctggctatagtagagagtcgcagggctcccgttctggactactttgagtattgtgctatgagctgcagagcttacagtgcctcgttggaagaatttggaggggttggtgatggaacaactttgaacactaaagcctttcaggctgccatagagaatctgagtcagtatgcatcaagtggtggctctcaactctatgttcccccaggaaaatggctaactggcagcttcaatctcaccagccatttgactttattcctacacacggatgctgtaattcttgcctcttaggatgagaatgact

SEQ ID NO: 25604 - DNA, 282 bp, Glycine max
  unsure (1)..(282): unsure at all n locations
attgaatatgatgaggagaagcaaacttcaaaggatagatggggtggacttgcctatgacacttcagatgaccagcaagatatcactagagggatgggaatggtggacactctcttccaagctcccatggaaagtggcactcactatgctgtcatgagttcctatgatactatcagtgccggacttcgccagtacaatttagacaacaccatggattgatacnatagtgctcctgcatttatggacaagattgttgttcacatcaccaagatatttttgaac

SEQ ID NO: 25605 - DNA, 254 bp, Glycine max
cttctttcttttcttttctcttatttttacaacagctagtagtaataaattaagaatttagaagcagatctagagggtgggtccaccacaaaggctgatattagttgttgcagtgcagtggttgctctcttcgatgagagagcttattggacacagggtgtatgtagtgtagtgtcttgtgaatcgtgaaaaggattttgttcatatttttaggataggataatcttctgccccctctccatatttgtacttca

SEQ ID NO: 25606 - DNA, 730 bp, Glycine max
caaattcttatgcaagtgtattctacaagtctgttccagagagtctcttctggccaatgtttgtgcttgccacacttgctgcaatgattgccagccaagcaatgatatctgctacattttcatgcataaagcaatctatggctttgggatgcttccccaggctcaagataattcacacctcaaaaaggttcattggccaaatttacatccccataattaactggtttctgatgatcatgtgcatagttgtggtttccatcttccaaagtccaactgatattgcaaatgcatatggcattgctgaagttggtctcatgatggttagcaccaccttggtgacccttgtgatggttttaatttggcagaccaacttatttttggcattttcttttgctcttgtatttggtacagtggagttaatttacctgtcttctgtgctatccaaaatcattgagggtggctggcttccacttgcctttgctacctttttcctctctgtgatgtacacatggaactatgggagcgtattgaagtaccgaagtgaagttagagagaaggtttcagtggactcaatgcttgagcttggctccaatcttggaacagtaagggtgccaggaataggattgctatataatgaacttgtccagggcattccctccattttcttgcagttcctgctcaaccttccagctcttcactctactatagtttttgtctgcattaaatatgt

SEQ ID NO: 25607 - DNA, 268 bp, Glycine max
ctcttccaatactgatacggaagggtggtatattagccaggtctgccctagagctaaatcttgttcttcagcagtcctaactgatgctgatgttgtacgaacttaaagccaaattgtgaaggagtagcatggctcaatatgcttttaggcaggattgtgcttaaaacgtgaaggtttcatgttgggttattgtgatcatagcctacaattttgtcttgatgatttgctctattagctgctgtcatcggctttgttgatggaagagctc

SEQ ID NO: 25608 - DNA, 261 bp, Glycine max
ctcgagccgcttatgccatgtagtcttttttcctgttgcatttcaatctataaaatataattacatatatggagaaaattatattattttaataatcggttaatgtaataatcgatcacaatctatatcagtcttcgtttgagtaagtttgcttaaaagaaattttaagatagttggagagaaacaattactgcctatacatttcggaaatgtgcatttggtcacttacaaacataaaagaaggaaagtttagatatttcc

SEQ ID NO: 25609 - DNA, 260 bp, Glycine max
cccgacccgatcacagaccaaactcatctcgttcgcttctcttgcactctcgcgcagatacatatatatcttcccaaatccctcgccgttttttctcttcaaatctccgaatctcccaaagcacgtgattcacttcaagtaattaattcatagattctgatcgtcgctgagctctagttttcaaaacactcgatttttctatagagagaggagtttgctctcttaccatgctttggacgctgctggagcatggttaatga

SEQ ID NO: 25610 - DNA, 473 bp, Glycine max
cagaaacaacattggtcattaataaaatgaagataatatattttaatggaataacttgtcccactctgcccaaaccccaaacgaattagtagttttcttttttcgtgcatcgagtattcggtttgtacgtgtgccataattgaattgttttgtgttgttttcttgaacatgattggctaattaaaccaaagctttgtttctgatgagaaagactttggctgggttgtttataaattgtgaaacaggcagagctagctagtcaattatcttattcagtatttctgcacagccctttttttggtgaattattctgcacctacaccccttggtgaagaattataattaagtttgcaggccttccaattaacatggagcttcagtgtgcaatcaagaaagatgccactgaattgataggtaataccccaatggtatacctgaacaacatagtggaggggtgtatggcccgcattgct

SEQ ID NO: 25611 - DNA, 376 bp, Glycine max
cagaaaacctgagcaaaaaacaaaacaaaacagtaagctaagcttcactgccatgcctgcaacgccattctcgtgttcgttcctcactcttcaaccgctcttcaactcctacgttaaccccatcttccgttcactcaccttccaactctcttcttcgccgctcccattcaatgccaacttctccagcgtcagactccactcttcgctctcgcgagcggcggagaccgattctccgaccggcggaaggtccggcgcgctaactcccggtcccgccgtcgccggtgaagttcaaaagatcgacgtgaatcctcccaaggggacgcgcgacttcccgcccgaggacatgcgcttgcgcaactggctcttcaatcatttc

SEQ ID NO: 25612 - DNA, 272 bp, Glycine max
actagacagcgtaggattaaacatgatttatgactgaacattttaatgtcatttgatccctgtcacaggaaatgtcttggttgttgttcttccaagagtgctagattttattgttattacttgttaagttgaaatatggttaccaaccatttttttctcaagttttcttgttggatttcaaatattttgctattttaagttattaacattttgtgagtgctatgtttcaatgttatcacttattaagtaggaatatgctcaccaagctttga

SEQ ID NO: 25613 - DNA, 377 bp, Glycine max
gaattgtttccttaagtcaataaagtattcaattccggtggcattaatgatcttggtagagctgggatgtgcagccctgatattctttgacaaaaactgcccagaagacattccaacagacaaaactggagattttgatgcgatatatggatttctgattgagaattggaatatcgtgaaatgggttgctcttggaattgttatctttgaggcccttcttttcctgttagcccttattgttagggctgcaaataggccagcagattatgatagcgatgaggagttcattaatccaaggcagcaagtacgacagccattgctcaacagaccagcagcaagcccagcaacagggttaccggttgctggaacaatggacc

SEQ ID NO: 25614 - DNA, 439 bp, Glycine max
  unsure (1)..(439): unsure at all n locations
tgggagtttgacttgttaaggcaaagcctgaggatcatgaatggcaagaagaattcaattcaaacgaaagagaagcgcttgaaaagcaaattgggaaaatgaaatgcacaaaaactagttttcatatccaaaattgaacaatgtggttgaatatgtattattgtatactgggatggtttgtatctttcaacagcacatattttccttttactttttccccctcctttttcttcagaaaaaataagcaagccaatacttccagaggaaaaaaaaactcttcttgaaccttgaaaaaaaaaaaacagaacatggaggaagattagcaatttttccttgtggactagcttagttattgagtatgccaggtcaggtctaaggactggtgaaggaaattaagatagaaaaaaattgttttnnnnnnnnnnnnnnnnnnnnnnnn

SEQ ID NO: 25615 - DNA, 397 bp, Glycine max
ttcggctctcggttctagatcatctctaccctcttggcttttgcaattaaagctcaaaatcatggcatcagtgcgattggaaaatttcaacaaggaataaatcctccatcatggaatatgttgctctttcatggaagtcacctaggcctagttatgaaaacagggcttatcaccgggattctgtccctcactgaaggtattgcagtaggaaggacatttgcagctctcaaaaactacaaagtggatggaaataaggaaatgatggcaattgggtttatgaatgttgttggctccttcacttcctgctatgttacaacaggtgctttctctcggtcagcagttaacaacaatgcaggcgcaaaaacagctgtgtcaaatgtagttttgtctgtgacag

SEQ ID NO: 25616 - DNA, 353 bp, Glycine max
gaaaaggccgtggtttccgacgagaaatgctaaatcctcctacaggtgaagaccttacagcgttcacagtacacacaccttacagatgcctgtggcggtaacaatacccagttatcagcaccgcatctacgcttcactcatctacatcgccaaggctaagaaaaccaccatggccagcaccagcagcagcaatcctggtggggccttcaccaccctccaagagagggtcactttcgagaaggagataaaaaagagcaagttcatcgccattgctggccccatccccgatgaaaaatccgccatgtctttcctttcccaggttcacttcctctcccttctcttgcgcttatttt

SEQ ID NO: 25617 - DNA, 702 bp, Glycine max
gaaaatgtaattgagtcactgtttgcagaaaaaggatggtttatttaacatatgcacattcatagtcatttcattcttgagtgatgacaagataaaaatatagatgacgtccaagggtgccaccggtgcagaaaacagccaaagcattaaatacggtgtaatttacatcacattttgtcaaaatcttttttctacatttgttgagcaaatggttggtaggacttgttgtatatataaatttagagcatttgtatataagaatgatgataaaaacttaaaaacattcattctcctttgaaagttgagaaaggagaattgaggaaatggcaggagggtctttcacaacaggcactgtgagcaaggagagggcagagcagtacaaggggagagtcactgcttatgtcatcatctcttgcattgttgctgccacaggaggggctctctttggctatgatattggaatttcaggtggggttacatccatggatgactttcttatagagttcttcccctcagtatacagacagaaaaagcatgcccatgaaaacaactactgcaagtatgacaatcagggcctagcagcatttacctcttctctgtacattgctgggttagttgcatccctgatggcatcccctgtgacaagaaagtatggacgtcgagtaagtatcataggtggtggtatcagctttcttattggat

SEQ ID NO: 25618 - DNA, 356 bp, Glycine max
cggatgtgatgtctgaactgctccaggaaaatcatcaaagatcccaaaggacttccttgtacagatgcttggggaagaacgtgtcaccaagttttcaatacaagaaatactcaattctaccatggctgattatgtgaaaaaggaaaacttggatgtaaaggaccggaagataagcactacccaaacgcaagaacaactcaaaaaatcattcaagccaggaaatgaatttggctttaatgttataattgagcctgaaaattcataagattctagataacttgttatgggggatctagttgttgagcgtaaccagattggcagttattggggcaacaagatttttctctctcaatgat

SEQ ID NO: 25619 - DNA, 412 bp, Glycine max
cctgtgagtaattcccacatggaatgaaccctatgctgatatgcattgtgcttcaataataggaggaattgtgaacaacactttacgtcctcaaatcccaacttggtgtgatcctgagtggaaatctctaatggaaagttgttgggcttctgatccagtagaaagaccatcattttcagaaatttccaagaagctgaggagtatggctgcttcaatgaatttgaaatagtcaattgatcttgaataagttaattgaccttctcacgttgtatgtagcctagaattggtaaaagggaaataaggtgaagcatggttcttccagttcaaggcaccaacaagcttagctttaaaaagggaaaaaataatttaaaggagtgttcaagcttatccaagcttgtatcgtaatatcatg

SEQ ID NO: 25620 - DNA, 600 bp, Glycine max
aaaatgaataccacacaacacacaggaattcaagaaagaaaaaaaaaaaatatgagttgaagggcaattggaacataaaataaacatattcatttttttgaggctctaataaatttaccatcatcatccaccaattcctgggcatggccgtgctacctttctcatactcaagatctcccactttatctctaccatcatctcaacaaataaggcctaaaacaaaaccaaattccaagacaaacacatgctctctaatccactgctgccacagccaaacagaaccaatcgaactaaatggccaagccagatttcgagagaagaaccctgccactgcagttgcatcccccgtggttgttccaccaaggcctcgaaggataatccttgttaggcatggagagagtgaaggaaacgtggatgagagcgtgtacacaagaatacctgatccaaagatatccctcactgagaaaggaaaggtccaagcagaggaatgtggcaacaggataaagcaaatgatagaaaatgaccatgaccaacattggcaggtttacttctacgtctctccatatagaaggacacttcaaaccttgcagcacctcgctc

SEQ ID NO: 25621 - DNA, 684 bp, Glycine max
ctttctacgacgagaatgaagccttgtcagcactctcaagtagtcctaaaggcttccagtgttgccatagtggaggtgagtacaagctgtagccttggaggtttcaaatttcttgagaatgcaaaggacttgcctaccattatgacttcaaaggaccagtgtctgaacaccatgatgaagtgcattgcgcttggtgcacatgagtttctcagtaaaccactctctgaggacaagctcaagaatatttggcagcatgttgttcacaaggcatttaattctggggaaaatgtcctttctgaatcactaaaacctgtcaaagaatctgtagaatccatgctgcagctccaaacagacattggacaagataaaagtaggatttcaattgatttagagaatgtgtcgaggtttagtgataatgaccatgagcagtctgctgtatgtgataaatatccggctccgtcaacccctcaattaaagcaggggacaaggttactggatgatggagattgccatgagcagactaattgctcaacagaaaaagaaagtggggaacatgatagggaatgtaaatctgtcgaaacttcatgtgggaatttgaatgccgaaagttctcctcagccaagggaacctgataagactctgattaaggaggaagaggattttgccaatggttccaggggtgag

SEQ ID NO: 25622 - DNA, 274 bp, Glycine max
tttgaacatgtgtaaccgacagtctgcctgggccacagccctctcaccctggtactgcatgcacgcaatgctagctgcccctttcccgtcctgggcaccccgagtctcccccgaccccgggtcccaggtatgctcccacctccacctgccccactcaccacctctgctagttccagacacctccacgcccacctggtcctctcccatcgcccacaaaagggggggcacgagggacgagcttagctgagctgggaggagcagggtgagggtgggc

SEQ ID NO: 25623 - DNA, 392 bp, Glycine max
  unsure (1)..(392): unsure at all n locations
gatcnattccttcatccttatcctaaggattcagagaaaattatgctagcaaggcaaactggcttaacaagaaaccaggtggcaaactggttcattaatgcaagggtgcgtctatggaagccactggtcgaggaaatgtacaaagaagaatttggtgattctgagatgagcagcaatctattatcatcagagaaaacactcaaagctccaagagatgatgttcaagcttctgacaataaaagggaagagtcccaggacaacttaataaacgttgatgatagtgttcagcatcatgggttgaagttagatcatgcctcggaattggacagagggatccaaagcagtgatcatggagaaaatgccatggatcctagaattggaaaattgcaagg

SEQ ID NO: 25624 - DNA, 518 bp, Glycine max
cgggcatggtttcttacggaagtagtgatcagaatgggaacaacaaccagagtggggtgtctttgacgctagggttacagcaacatggggtgagcctagcgttcccgccagcaacacagagttcactgtactatccaagggaccaaattgaagattgtcaaccagttcatcagtactctcttttggacggtgaaggacaaaacctgccttacaggaatttgatgggagcacagcttctgcatgacttggcaggatagattatatatattaattcttgatttgaggaattgagattaaaatggtgagtataatcaacaacaaattaagattagtcttttttttttcacttttagctagctacgtacaaaattattatatagtacacaattaatgcttaattccatacataaagctatatatacttggttaattagataaacgtacagtttaatttctaaaaaaaaaaaaaaaaaaaaaaaaaaagggcggccgccgtatctcgtcgacccgggggcccg

SEQ ID NO: 25625 - DNA, 274 bp, Glycine max
atcagaaatgaatcagaatgatcaagcttcatcagttagaaatcaaagagaagtagatccagaagaacaagattatgaactaaatgaagctgtgaatttagaaggaaatggtgttttagttatcaaacaaagtagtgaagaaagctcaatgattgtagaccaatcaaacccttcttcccatactgccactgaggaaccctgaatagggcttcttcccatttattttgctcctctaacccccataacttctgacagattcaggaagttatcattt

SEQ ID NO: 25626 - DNA, 310 bp, Glycine max
cttagatatataccgatctagtttgagaatcacaacaatacaatgcaactaaagctcgtagccttaaccttgtcgatattttggccatggtggagctttgagggtgctgtaggagaccctcaactctttttcctcacatttgaatgcagcacagtctcggcacgcgacttgtccaacttgcatcaaaatcgaaacgcaagtttcgctgccctgagatcgcaggttagcaaccaaagcaagcacttttccgcggctcaatcaaccagtggatcagaccctgtctatgcaacgtttcaatgcaggaactacc

SEQ ID NO: 25627 - DNA, 268 bp, Glycine max
ctttgaatctagttttcagtgatcagaagcagcagttatttgagtgtatgaatggaatgatgatcactgtgctataatgtactgaaaccaccatattacagaaatatttactacatattttccatctgtagtttctcagaagggctatggattagtttgaactgtcaaatccttgcatacttctgtgacacccctgcccattgtctgtctttaattaaccaaggtgttaggcgtgactgtcacaactgttatgtttccagtaactaga

SEQ ID NO: 25628 - DNA, 378 bp, Glycine max
  unsure (1)..(378): unsure at all n locations
gtatgtccgtagtttttaagatatgatatgctacttatataagactcaacaacataaacttcttggtctttattcttctaagcatttttttctcctcttgctttgatcttgttctttgcttaaatttcttatctttgaggagccaaaggaatggaacgtggggttcttgatggtcatcatcagtcggctgcttcaagtcagagggagacctgggaaacaggttcagctttcagaggcagaaatcaggcagctttgtgcggtttccagagatatctttttgaagcagcccaatctgttggaactggaaccaccaattaagatatgtggagacatccatggtcaatattctgactnctgagactttttgagcatggtgga

SEQ ID NO: 25629 - DNA, 453 bp, Glycine max
gaattgtactatataatataaccaaaattaaaaaaaaagaaaagaaaaaagaaacaggagcagaagaggaagatgctggtgagtgaatcgagtggttcgaaggtggatcttccggaggagttgctaaatgttctaccgtccgatccttacgagcagctcgatgtggcccgcaagatcacctccgttgcgctgtcgacacgtgtcgacgcgctccaatcagagtcgtccgctctacgcgccgaactcgccgataggaaccggctcatcgccgagctccagtctcaggtggagtccatcgacgccgctctctccgaagccgccgataagctagcccgagccgaccaagacaaggagaatttgctgaaggagaacgcttcgctttccaacacagtgagaaagctcaccagagatgtctccaagttggagactttcagaaagacgcttatgaaatca

SEQ ID NO: 25630 - DNA, 354 bp, Glycine max
cttcctcaaactcaaaccctagcagcgtcagctcaacacccttgcggatcttcaagcgccccttccctccgccctctccggccaagcacattcgcgcgctgctcgcccgccgccacggttccgtcaagccgaccgaagcctccataccggaggccagcgagtgtgagctcggcctcgacaagagctttggctttgctaagcagttttcggctcattatgagctcagtgacgaagtcggccgggggcattttgggtatacctgctccgctaaaggcaagaaaggggcgttcaagggcttaaatgttgctgtaaagtcattcctaaagccaagatgaccacagcaattgctataga

SEQ ID NO: 25631 - DNA, 313 bp, Glycine max
gccacctcctcctttaaggggaggtgatgcttctgtcaattctgttcacattttccccaagaatactgatcacattgttgtttgtaacaaaacgtcatccatatatatcatgacacttcaaggacaggttgtgaagagcttctcatctggtaaaagagaaggcggagactttgttgcagcctgtgtttcacctaaaggagaatggatttactgtgttggtgaagacaggaatatgtactgcttttcctatcaatctggcaaattggagcatcaatgaaggtccacgagaaggaagttataggtgtcactcatc

SEQ ID NO: 25632 - DNA, 430 bp, Glycine max
caaatatacttctcgatgtgaatttcaatgcaaaaatatcagattttggcttggcaaaattggggccttctggaggacaatcacatgtaactaccagggtcatgggcacgtatggttatgctgctccagaatacatagcaacaggtcacttgtatgtgaagagtgatgtctacggatttggcgtagtgcttcttgaaatactgacaggcatgcgggcacttgacacaaaacggccaacagggcagcagaacctagttgaatggaccaagcctcttctctcttccaagaaaaagttgaaaacaataatggatgctaagatagtgggtcaatattcaccaaaggcagcgtttcaagcagcacaacttactgtaaaatgtctagaacatgcccaaacaagtccttccatgaaagaagtgcttgagggattgga

SEQ ID NO: 25633 - DNA, 507 bp, Glycine max
cagaggtgtactctaaggaattaaaaggtgctatatctgccttggcctcacttcaaggccatctattaatagcatctggtccaaaaattactctgcacaagtggaatggcactgagttgaatggtattgcattttttgacgcaccgccattacatgttgtgagcttaaacattgtaaagaacttcatccttattggcgatatccataaaagcatatactttcttagttggaaagagcagggtgctcaattgagcttattagccaaggattttggctctctcggttgttttgcgacggacttcttgattgatggaagtactctcagtctcatggtttcagatgataatagaaacatccagattttttactatgccccaaagatgtctgagagttggaaaggacagaagcttctttcaagagctgaatttcatgttggtgcccatgtgactaaattcttaaggttgcaaatgttatccacttcggatcgagctggtgctgtaccaggct

SEQ ID NO: 25634 - DNA, 554 bp, Glycine max
ttttgtgcaaatcctagaaatagcctctttgtttgcaagagtaaggctgtgttcgtctaccctccccaaactccatttggtgggagctttttgcattgggttgccttttgatgtctcttggtccactactcttaacaaatacaatctaaaaatctgcattacgtgaattttcagatttgtgttatttgcaagcaaattcatggttcgtgtacacaatgttgcaagtgttctacttatttccatgccatgtgtgcttcaagggctggttatcgaatggagttgcattgtttggagaaaaatggcaagcagacaacaaaaatggtctcttattgtgcttaccacagggctcccaatccagatacagttttgattatgcaaacccctcttggggtcatttcaactaaaagccttctccaaactaagaaaaaaactggttcgaggttaatctcatctagcagaaaaaagcaagatgactctcctgttgataacactgagcatgagccattttctgctctaggtgccgtatctttcaaagaacaaaccataccaaaaag

SEQ ID NO: 25635 - DNA, 291 bp, Glycine max
tttctttagccgagacaaatcaatccaaagggagagagatgcccattacccaccctctctaaagataagagcttttttccttttttttttctttctcttcatatctctattttccatatattatgaggcggctttaagggttggttattgtgagtgtgaggatcactttttgagcgtgttttctgtggattcggtcttgtgtattttgctatacagaataagagaggaagaacaaacatgactgaaagtaataatgaagtcaacctcagtgaatctaagagtgttgttcca

SEQ ID NO: 25636 - DNA, 418 bp, Glycine max
tgggggtttgacggatagcgagtgggaggaggtcgagaagcggaggccgcagacggcgaggccggttgaaacgacgacgtcgtggagagaagacgaagaagtagacgccaaagctgacgatttcatcaacaggttcaagaaacagttgaggttgcagaggattgattcccttctccgttacagaggaggtaactcatcatgagtaaagaaaaacccgccctaatcttccttgcgcctgcgtcgttgcctcaagttgttctgacgttaaagtttgttggttttcaaatgtttgtatagtactgcgtgctactaggttggtgtggcaaagttcttgtcttagtaatcatgtcatgtttgtctaatattaataatagacttgtgtaggcatacacaaattgataataaatttgatattatt

SEQ ID NO: 25637 - DNA, 546 bp, Glycine max
gggttatggtgttgggtaagcgaattagcgaagaagcataagatcgtcgatggatagtctcaagttcgcatctttgacgctgcctccttgttctcgacgctctgggatgctaggaaagaggttgaattcccctttacttattattgattcttcagcacagttttgctattgcaagactgatcttgctgccgcatcatcaagtattccactgccaaatatgagattttcttgtagattttcaccaagtgtagcagcagaaacatggacctcgaatctttcttccaaacaatggatattgcactcaactgcacagatagaaaatataatcacaagtaatgaggatcaaagcatgtgggaagcatgtaaacaagctctttctgcatttaactttagcgatgaagaaaaggacaagatacttggaaaagcatttggtcttattcattccccttactggggagaagaacgtagtaaggaagttccaaaattaaagacagtaaatggagtattagactatctgaggagtttaaatctttctgacgatgatct

SEQ ID NO: 25638 - DNA, 1282 bp, Glycine max
taggtgggcagagaactgaagggtttagaatcacaaactagtttatttaccctacgacaaatcaaggcagcaacaaataactttgacaaatccttgaagattggagaaggagggtttggtcctgtttacaagggtgtactatcggatggcactgtagtagcagttaagcagctttctgctaggtcaaggcaagggagtcgggaatttgtaaatgagataggcctgatttctgctttgcaacacccttgtttagttaagctctacggctgttgtatggaagaggatcaattgttactgatttatgaatacatggaaaacaatagtcttgctcatgctttatttgccaaaaatgatgactctgagaaatgtcaattgagattggattggcaaacaaggcataggatttgtgttggtatcgctaaaggtttggcttaccttcatgaagagtccaaactgaagattgttcatagggacatcaaggccaataatgtgttgctggataaagatctcaaccccaagatatctgattttggattggcaaggcttaatgatgaggacaaaacccatttgagcaccagaatagctggcacttatgggtacattgctcctgagtatgcaatgcatggttatttgacggacaaagcagatgtttatagttttggaattgttgcattggaaattgttagtgggatgagcaacaccattagccagcctacggaagaatgtttctctctcattgatagggtacatctcttgaaagaaaacggtaatctaatggagattgtggataagaggttgggtgaacacttcaacaaaacggaggcaatgatgatgatcaatgtagcccttttatgcaccaaagtctctctagcactcaggcccaccatgtctttagtggtaagcatgcttgaagggagaacacgtattcaagaggtggtgttagacaaaagagaggtattggatgatgtgaaattttagatgatgcaacagtattataaacacagaggagaaaataacataattgagtctcagaacctaagtgaccctacgggggaatcttctaaacttttcgctgatacaagttctgctggtgagcaaattgaaagttagagaacttatagaaatgaacatcttgtcgttgctctatatatatttagtgtttggcacaacttattttgcaaaaatgaagatacggttcttgtatctaaataagtacgggtttgaacaagtttgcataaccaattgtaatagaatttaatgagtggaagaatacttcgttttc

SEQ ID NO: 25639 - DNA, 529 bp, Glycine max
cccaaattttaaaaaattatacagaagataaagcaataaatatacaatgctattttgtttttgtgtgcaataatcataccaaggttaaaacctactcaaacctctttcatactctcaaaccttccattacgagaccgacctagtgcatttatataattctaatctaacatatgtcatcttactcctttaatttattgtccaatcccatagttccctacttgtaccaccacattaattaacatcacaatatatttaacttattcactcaaactgactgattcttctgctttattggtatatcattagaggcaggactggtctgccaaaacttgaagttcaaagatcttctttccagcatgttttccacttcctcaatcggaagtcctttggtttctggcacaaaaataatgacaaacacaatggctgcaacagtgatgaatatgaatatcatgaatgtagatgaggtcccaatggcttgtgtcaaggacagaaaggactgggccacaatgagattagagacccaatttga

SEQ ID NO: 25640 - DNA, 484 bp, Glycine max
gtgtctgctgaagttcttgaaggagtgaacctttcacttctatcaaaaatgatgtcatcaaggctttcacgtggaaccttcaatgggggattgctgtcaacagaagctggaactctagcccgagtaattgcagatggaacaataacaatctctgggtatttcagtgaaagtaaactcctgaataccaccttactccctgcactcctcatctgcatctcatccattattgctacctgctacagctacaactctctttattagagtaaaagtaattagcctttcaataaaaatctgaagtgtatatagtggattttgtgaactactcacttatcggtgagtagtggttaaaaaatgctgtattagccagtgtcggaagatacctgattcaggttgacagcataacgtttttgaaatctagtactattatgtttctatgaataatgcaggagcaaatctcccttgtggaagattgttcttttccaag

SEQ ID NO: 25641 - DNA, 486 bp, Glycine max
ctgagttggagtttactcaggaggaattggatgctgttcctaaaccagatgatacttctgattcttcaaaaacgattgatttcttggttagccatagccagcctcaacaagaactctgcgacaccatttgtaatttaaacgctatcagtacctctacaggacttgggggaatgcatttggtgttattcaaggttgaagggaaccaccggttaccaccaaccactctttcacctggagacatggtttgtgtgagaacatatgacagcatgggtgcaattacaacttcttgcatacaaggatttgtgaacagttttggggatgatggctatagtattacagttgctttagagtcacgccatggtgatcctacattctctaaactatttgggaagagtgtgcgcattgaccgtattcaaggactggctgatacacttacttatgagcgcaactgtgaagctttaatgctgcttcagaagaatggtttac

SEQ ID NO: 25642 - DNA, 285 bp, Glycine max
ccatttttgaatgtcaatgagatggagaaactgcaattaagtgatgatcttcctaggactggaatgaaagtgatagggaagctgaaccctgaagatggcactatctttctcaaagtgcaaatttctgataaggatggttctgctagaaatgtattttttccctttgacatattatctgacacacctattgatgttgcaaccgagatggtgaaagagttggagattgcagattgggagccttttgagattgcgaatatgattgacagagagatatctgctctgcta

SEQ ID NO: 25643 - DNA, 269 bp, Glycine max
ctgattcggtacgacaccacccttctgttttgaagacaaccttagtgtctcagcttttggtgcacatgaacgttcagtttgacatctaactttgaattacgaccatgaacttgtatatctttgcagaatttgattttagcagaactgaccccaccatggtcacgctaacatgggcactatctctgctacttaaccatcaaatggaacttaaaagagcccgacatgaactggacactcttattgggaaggacaggaaggtggaagaatct

SEQ ID NO: 25644 - DNA, 470 bp, Glycine max
gttttgtattcagaggctaaggggtaaagagcaacactatgttatatacctttaatatagtattattctactcttaatttaaagcagtttctaaaatcttttaacacgaaagggagcaggaaggaaaaggactagagcatctgcatggagccatggacaacaacaacagcattcgtagttacatatgttccaacagatgatgatagtgaattacataaacctatggctccaaatgtactagggccttgaaaggtcaaacatatggctcttttgtcagctatgtatgtatttatgggttcttgtctttttcacctgtcagactcagtgataaggtggtatttgtgttttgagagttcgtctttttcaaagttcttgtcattgtatgggaaatagtgtcgctatagtttagcagcaacttgtttaatttcagtgtatcaacggtagcgactaaggcattatttgagaatact

SEQ ID NO: 25645 - DNA, 491 bp, Glycine max
ctctcaacaatattggaacccgcttccctcattttctcaattcctgcaatctttgcgacaaacatcttcatggggttgacatcttcatttacagaggcgagaaagcgttttgtagtgcagaatgccgtgagacacacattagcattagcaacgatgatcaccaagacgtagtcaagtgcagatctcgtgttgtagagcacaatcctgtcacactcacatcttctattcttgctgcagcatgaacctacacaatcctgtcattttattattaaaggatgaaagaattagctagcgccatcaatctcaataaagatgtttatccccatgacttaatttggtactacctagctcgccacaggggagagttgcgacgacaatcgaagcaagtgtagtgaagtagattggttgatctctaatgaatggaactataaaacatacatagatttccattcttcacgcaatatatataaattgcaaccaagctcaaaagc

SEQ ID NO: 25646 - DNA, 249 bp, Glycine max
tgaaaattacaagataacttgcagtcattgcaaatgagacttacttcaagagaactcatgtgccgaaatcttcaagaaaaggttcgggatcttgagaaccaggtgacaggggagacaaaaatgagactgaaacacgaaaatatattgcttgcagcagtttcagctcaaccttcaacaatgtgggagtcaatagcttctgatcagaaaatcatgaagaagccaccgctcgatccaagactgccacttaga

SEQ ID NO: 25647 - DNA, 784 bp, Glycine max
catggatcctccctgatctcacaattcaaggctctataagactcaactaccatatacgtacatttccaaacacatactactttagctacgccaccaagcgcacaacaaagatcatgggtgttaaagttccttcaagcatacttggaattcacccattgcttttcattagagttttgcagatgtgccagtggcgttttcctccagatgttcctcccccttataagggatacagggatgaggactggcaagacaatgatggagcactaaatacaatatccatgactcatcctcgcctcccaattgaacaccccaactgcttggttgaaaaggaatcagactgccaaccattacaacctggcatctggtactacaaatatgtggagggtgatcacatactattcattattaatcgtgagagagcaggagtgcagtttgacgtaatctatgacagtattttccaacgctgtaggaagcacgtttttaggaagaagcttccaacaatgcctaatgaaatcaatcactagcacaccattctttactctcccatgttcaattaaaagagatgtatgaaaagaaacaggctattcatttcagttaatgccccttcaccttcttaaatgtaaatatttttcccacgttctctcatttttataccaccattttctgtattttgtaggattggagagatatcagagaccataatcaataggatgttacaatcaccataagtgtacacaattattgtctcaatattaaacatcatgaaatgaattgttgaattttg

SEQ ID NO: 25648 - DNA, 285 bp, Glycine max
acacgtacgtattctcgctcgacggcacagtcaaggagcagacagtgagcaatcttttacaatcactcctagttggagcatcagtgtttgctatgcctgccataaaaaagataccaacttcagttctctggggatattttgcttacatggccattgatagtcttccaggaaatcaattctgggaaaggatcctacttctttttgtaacacctagtaggtggtacaagttgctagaaggggatcatgcttcctttgttgagtcggtaccttacaaatacatagtct

SEQ ID NO: 25649 - DNA, 809 bp, Glycine max
  unsure (1)..(809): unsure at all n locations
atcctatatagttctcagttgtatgatagtttatgcattctacctttaataggatacgatatatctgtttctcaattcaactttccatcaaggcaacggcaatggcagagctgcaatcgaagtctgaaactgcccctgctccggctccggttgtggctgaggtgccatcgaacgacgccgttgcaaagaaagcttctgaaacaggggaatccaaagctattgtttctgtatccgagaagacaccagttcctgcaaacaagcaaagctcaagaggatccattgatagagatatcgctctggctgaagtagagaaagagaaaaagttgtcctatgtgaaggcatgggaagaaagtgagaaggccaaagcagagaacagagctcaaaaacatctctcagctatcgctgcttgggaaaacagcaaaaaggcagctcttgaagctgagcttaaaaaattggaggaacaactggagaaaaagaaagcagaatatggtgaaaaaatgaagaacaaggtggccttagttcacaaggaagcagaggagaagagggcaatgattgaagccaagcgtggtgaagagattctgcagacagaggaaatggctgcaaaataccgagcaacaggaaccactccaaagaagactataggatgcttttgattttttttgcattttgggtctgatgtccaaaataatttctaattgccaattttgtatgtggtttctcctgttttgttctcaatgtttgttgtctatgtgcaaaaattagtccaaataaaacataattttttnnnnnnnnnnnnnnnnnnnnnnnnn

SEQ ID NO: 25650 - DNA, 263 bp, Glycine max
tgataacaactgctccaagtgtcgtgtacagggtacactgtgtaaatggtgatactgttgaatgctcaaatccatctggacttcctgagcctggaaaaaggaaatcaattgaggagccatttgttaagattgagatgcttacaccaaaggactacattggttcacttatggaactggcacaagaaagaagagggcagttcagagaaatgaaatttattgctgaaaatagggcatcaatcacgtatgaattaccattagcagag

SEQ ID NO: 25651 - DNA, 323 bp, Glycine max
gtcggctggttctgccactccgcccttctcgtcccatacttctcgtggaagatctcccacggcaagcaccacaaggccaccggccacatggagcgcgacatggtcttcgttcccaagacacgcgaggtatacgctacccgtgtcggcaaggcggtccacgagatctccgagctggctgaagagacccccatctacaccctgctccactccatcgtccagcagctcggtggatggcccatgtacctcgtcgcgaacgtcaccggccacaacaaccacgaccgccagatcgagggtaagggcaagggcaagaagaatggcgtctt

SEQ ID NO: 25652 - DNA, 865 bp, Glycine max
cttcccttccctatcactcacactctcctctcactctttcccatccaacaagatgccccaaaatagtaacactgaggcccaaagcccaccaacccccgaggcccggcccgtcggcggcaccgagttcagctggtgcaaggccgttcccgccggcaccggcgtgacggtgctgagcctcctcctctcaaaaccgccgcaaatcgctgttgtccaaaatgccctccacaaactccaaaattcccaccctattctccgctccaagatccatctcgatccctccaacaacactttccacttcctcacccctcccactcccaccgtccaaatccaccccttcgatctcgcttcaacggctcacatcatccaatgccaatccgacggccacgatcccttccacgtgctcctcgagcccgagatgaaccaggaggacacgtggcgcaattacgccgccgacgtcgacgtactccacgccgccgtgtatagcatcagccacgaccgcttcgccgtgttcctccgcctccacaccgcttcgtgcgtccgcgcctccgccgtggcgctgctcaacgagctcctccgcttcgtcgccggcggcgacgaggcgagcggggagaaggtaaattctccgatcgaggttctgactcctgaggggaagacgaacaagccgttctgggcgcgtggactggacgtgctcgggtacacgctcaacgcgttcaggttcgcgaatttgagtttcgtcgacgctggctcgccccggagttcgaggataataaggttgcaactgaacgtagctgaaaccgagaacttattagctggatgcaaatcaagagggatcaaactttgtggggcacttgctgcagctggaatg

SEQ ID NO: 25653 - DNA, 256 bp, Glycine max
atacaagtgatagatcctatcaatgctaaagaatttgagagaccattcaactcccacaccagattaaatgatcaagccgacaagagctctgcacacaatcaggcgagtgattctgactccccaagaatagtagtggcccaaatcactttgaaagtacatcatccgaagatccaactctttaggttctttgcacacagcttttacctgtattggtcctgttaaaagtgctatgaggcgggctataaatctcctgtaa

SEQ ID NO: 25654 - DNA, 320 bp, Glycine max
accagatcgagttatcaaggagattgaagagattgtaggtctagattgtagcaatgcgattctctgctcggcataggtataattgaaattctcagtgcaattgttgcaagaattcccccacctgaagatacatctaaaagaccattgagggctttaatatttgacagctactacgatccatatagaggtgttattgtatactttcgagttgtagatgggactataaagaaaggtgacagagtttattttatggctagtgggaaggattattttgctgatgaaattggagttttgtctcctagtcaactacaagttgaaga

SEQ ID NO: 25655 - DNA, 271 bp, Glycine max
caaaagttcagacaatttaaacactaatagatatttactttacaattgatcttgtcacacacaaacacatacctatgcacagttaggatatgatttaaaggatgcagcttctgttgcagcttacaatgtcagaacccctttcgctgttgtattctcttgaaaatgatctattggtcaatatagtttatttcactgaacgtttatcatgtctggttaaaagtggttctacttaaattctttatttcccgtttttatttcatggattgcgttt

SEQ ID NO: 25656 - DNA, 727 bp, Glycine max
tcgcctacgcgtccgcccacgcgtccgttttttcttttttgtagcccatccatctaataggagagaagtatcttcttaatggacaaataaatgtgcagtctggctcacttgatgcattgcctgataatatagttgttgatattaaacatgatggagctggtgttattgattatgctacagccacatttaagtcccattcaaaagatcaaatggaggctgctatatttgagtattccgtttggaccaatctaggagaaaagcttaccttcattcctcgcgactcaaggaacgatgggcagaagaaacttttattttatcctagagaacatcaagtatcagtgactgatgataattgtcaagtttatattcctacattttcttgtcaactgggtgtatatattgaaggatcagtttcacctcctctttctggcgtccatatcagagtttttgctgctggagatagcagctttactacacttaaaagtggtgaattggttcttgaaacgaccactggtattgatggttcctttgtggcaggtcctctgtacgatgatattggttacaatgttgaggcttcaaagcctggatatcatttaaaacaagttgcgcctcattcttttacttgtcagaagcttagtcaaatttcagtacacatacatcacaaagatgattctaaagagcccattccttctgttctgttgtctttgagtggtgacaatggttatag

SEQ ID NO: 25657 - DNA, 476 bp, Glycine max
tggaggttcaatgtgttggaatacccgccttttctctgcaactgcaggtggtggggcattctgcaatggccaaaggatccaagtgagtgcaactaatcaggtggaacgatctcttctagtgacaggctttgggtatgatcatgatgatgcatgggctacgaacatagacttattcaaagaatttacggatgtcagcaggggtgtaagacgacttggcgcactgccgtggacatgtgtcatgttgcattgggaattgtagaagcttattgggaatatcgtctaaagccatgggatatggctgctggtgttttgatggttgaggaagctggtggcacagtttctcggatggatggaggaaagttttgtgtttttgatagatctgttttggtttcaaatggtcagctccatgcaaagcttctggagagaattggacctgcaacagagaaactaaaaaacaagggaattgatttctcatt

SEQ ID NO: 25658 - DNA, 1214 bp, Glycine max
agatggatggttcccctgaaaataactctgatgtgacaagcatgagacgaattgattttgaagtgcgatatgcttctgaacttgcaagcattcatgaagactgtagtaccagtggatcacagcaacatgaagatgcaagtgttttgcaacgatgcagattgtctgggaatggagaaaggagcaagcgcaagcggtggagaggacgatatgatggcaatagttacatgtccgatgcttctttggaagagaacagcaaacaagagcatagcattggtactgttgtttcaactatattgaaggagaaacagggctctgaaaagctttctgtacatgatattaataatgtggaagatagatatgagattctgttgggaatgaaggaattagctagcaaaggaatggctgctgaagcggttgaggaggtcaatgctatcgatcccaatttctttgcccagaactcagttttgctcttccaactcaagcaggttgaattcctcaagttggtcagctctggcgattataatgctgctttaaaggttgcttgcacccatttgggtcctttagctgcctgtgatcctgctttattaaagccgttgaaggaaactcttttggctttactacgacctaatgaagatgctcttggaaatgcattacctctacatgctctagctgcttctctccaggttgcagttggtcgtaggcttggtgttgaagaacctcaactcatgaaaataatgcgagctactctttatactcataatgagtggtttaaacttcaaatgtggaaagatcgttttgaaggtcttttgaggcttgattccttgaaggaagccaacactcccttccttgcaccagtctctacatccaagtcgtatgctgatagctgcacaaatggatcttctcaggccacagtatcttcaggcaccaggatgtcagcagatcgtcgcagtccaactcaagcatcttcaagggatgtcatctgtgacgaaggtgcaatacttaaagtaatggagtttttggctttgcctagggctgatgccatacatctgcttgcacagtacaacggaaatgcggagacagtcattcagcagatatttgcgtaggcgttgtgcacgaaatcgggtttgttatttagaagaaaggtcaaattatttttttcaatattatttgattcaaatttgagaattttttctataccccttgtacatatagct

SEQ ID NO: 25659 - DNA, 270 bp, Glycine max
tccttttctggacgattctagtccaaaagatcatgtttttgttgatgaattcagctgcataggctgcaaaaactgtgccaatgtagcctgtgatgtgtttggaatagaggaagagtttggaagagccagagtgtacagccaatgcgggaagcctgaattggttcaacaggctattgatagttgccctgtggactgcattcattggacatcagctgcacagctatcattgcttgaagacgaaatgcgccgcgtagaaagagtcaatgttgc

SEQ ID NO: 25660 - DNA, 299 bp, Glycine max
ctcttctcattctctttttgagccagttttccagtttttggttctggaagcactgtctgcacctaagttggattaggatgtagtggataagggagtgtgatacacacattttcatcatcgtctcgtctggccttcttcgctcggaatggctaccttcgcggttgcaacaacactttcgacatcttctatcgctccccttaatgcacgacgtggttttggttttggttttggctccttcctttctccaaccacaaaaccaaaacgcccctcaatcaccactaccctcgctgtcgccaccg

SEQ ID NO: 25661 - DNA, 264 bp, Glycine max
cggctcgagggcgatcatggttatctatatatttcaaagggtgagaatcaaccaaattctgttgtggagatattagatgttcagaaatcttttggctacatatttgttcacaagggtacagtccaaaagggtgttgtagaggttggcaaagaagttgaagcagcagttgatgtgaagctgaggcagcgagctaaggttcatcatactgctactcatttactacaagctgcacttaaaaaagttattggtcaggagacctcacaa

SEQ ID NO: 25662 - DNA, 925 bp, Glycine max
aacacagtgagaaagctcaccagagatgtctccaagttggagactttcagaaagacgcttatgaaatcacttcgcgaggatgaagatacttctgaaggatcgccggacactgcagctaagttacacaggcaggcgagtttcacttccacatcgcaatttggagtatgatgatgcatcttcaacgctttcttctagaacatcttcgatgcgaataaacacttctgatatgggaaattatttagcagaggatcgtgagtctgatggctcaaaatctcgagcatcacataatctcctcttagcatctcaaactagcacccctcgaattactccccctggttcccctcctagtatgtctgcattggtatccccaacaagaacatcatctaagcctgtgtctccaaggcgccatgcaatttccttttcaacctcaagaggaatgtttgatgataggtcttcagtagggtcacaaactggacgaacacgcgtggatggaaaagagtttcttcgccaagttaggagtcgtttatcttatgagcagtttggtgcatttttggcaaatgttaaggaactgaattctcataaacaaactaaagaggaaaccctacagaaagctaatgagttatttgggcctgaaaacaaggacctctatactatatttgagggactgataacgcgcactgtccattagcactatcatgcggaaattaatttcatgactgaagttttgttccaacttcctagttaatttgtaacaactgatattccccctactttagcaaccttttcccattgtaaattacatattacttattattgcgtgataaagttttatttgaatttccaagcctgtaaatttgaattggggaatgacttttcttgacaagagcaagtctgttaacaggtcgaccattggtgtccttttagg

SEQ ID NO: 25663 - DNA, 391 bp, Glycine max
agttaaaatcactgcctctcgttcccactcaaacttagctagcgcatcacaagcaacaaaacacaaacaagcgaacaatagttcacaactaaaggaagaggttgttgaagagatagagatacatagtgtttgtgttagtgttatttatggtgtccctcaacctcaacccaaacccacctcaaacttttcacttcttcgaccccttcaacatggaggatcagaataagaaggtccgaaaaccttacaccattaccaagtccagagagaactggaccgaccaggagcatgacaagtttctcgaagctcttcacttattcgaccgtgactggaagaagattgaagcatttgtaggttcaaaaacagttatccagataagggagtcatgcacaga

SEQ ID NO: 25664 - DNA, 1065 bp, Glycine max
agctagttgaattttatcaaacattgatgaaaagggaggctaagaaggatacttcatcatcactattagttacttcagcaagtaatgcatctgatgctaggagcaacatgattggtgaaattgagaatagatcatcattcctcttagctgtgaaagcctgatgtagaaacacaaggtgattttgtcatgtccttggcagctgaagttcgagcagcctccttctcagatattaatgacttggtggcctttgtgaactggctagatgaggaactttccttcttggttgacgaacgagccgtcctcaagcactttgactggcctgaaggaaaagcagatgcactaagggaggcagcttttgaatatcaggatttgatgaaattggagaaccgagtctccaccttcgttgatgatcccaatctcccatgtgaagctgctctgaagaaaatgtattcattgcttgaaaaagtggagcaaagcgtatatgctctcctgcggacaagagatatggccatttcacggtacaaggaatttggaatcccagtgaactggctaatggattcaggggttgtaggcaagatcaagctttcgtctgtacaactggcaaagaagtatatgaaacgtgttgcatctgaacttgatgaactatctggtcctgataaagaaccagctagagagtttttggttctgcaaggtgtgcgtttcgctttccgtgtccatcagtttgcaggaggctttgatgcagagagcatgaaggcttttgaagacctaaggagccgcatccaagcctctcaggctggtgaagatagcaaatcagaaacttaggctatcccatcagaagtttttctcttctttttttccctttgaagctgtgtctctcaaaaatatgttgccgtctcagctgtatatttcattttgcttcaatttgaatagcctatacatattgcatgctacccgatgatacgagaatcatattgtaattgtaactttgtactccaacatgatccctacctctgccttgtttttccctataataagaaattcaactgaacagtattcaatactctc

SEQ ID NO: 25665 - DNA, 416 bp, Glycine max
gattgctcagtggcgatcttccttgtttgtgaattctattctattctattctatcagcactttcaagtttcaagacagcaagcatatcatacaaaccttgtcccttgtcattatactttcactgaaatccaagtcagagtcaattctcagtgtctcacttcccaaaattcttcacccttttggccttttttcccattcagaaaatatgattcagttcaatacaaccaagatgaaaaagtggatgttttcacactgatcttctccttaaaccccgccaagttagtttttctttttcttttcccttgcctaatggaagttatgtcaaacaccatcatcaagcaaagcaacaacatagcaatttcacaaggcaccatccattttcaaaaactttctttctggttcgcccctcgaactcg

SEQ ID NO: 25666 - DNA, 334 bp, Glycine max
cattctttagttacatttctgaggaacctatggctgctgcatcatttggtcaggtttactttgcccgtactactgatggtaataatgttgctgttcaagttgcagctgtcctaatttgcatcatgtggtggtgcgggatatctacatccttcgtcttgggttggggctgctgcaaaagattgccaagagaaagagtgaccctcgcctgtatgctgatgaactagggaaaggttttgttggtgaattggattacactttagaggctgcaaatgcttcaaagtttctggaagttcactcttcctttactttcatgaatgtgccaaaagtatttcca

SEQ ID NO: 25667 - DNA, 272 bp, Glycine max
cggaatgggctcagccgagcgtttttttgtgtgaaccaaaccgaaagcagatgaagcagagtagcagaagcagggttcagtcgaattttccaaatcttaatccacttcttatcctagtaacaaacaactacacgtttttgtttatcattccgaaaattttaatttgttaatatattcttataaatagaggaatcgtttgccattgccctttccaaaccgtttcatcttgttgcacttgcaaccgttgccatattaattatcttccaaaattg

SEQ ID NO: 25668 - DNA, 535 bp, Glycine max
ggaaaacagcccacttgattggagtgctcggttaaagatagctctcggttctgctcgtgcgatggcttatctacatgaagattcacgtccccatgtcatacatggggacttcaagtcgagcaatatcttgctggaaaatgattttacaccaaaagtatcggattttggattggcccgaacagcagctgatgaggggaacagacacatatcaacacgagtgatgggaactttcggttatgtggccccagagtatgcaatgactggacatcttcttgtgaagagcgatgtttacagttatggtgttgtcctccttgagctttcgaccggaagaaaaccggtggacatgtcacgacctcccggtcaagaaaatctcgttgcatgggctcgtccattactctcaagcgaagaaggattggaagcaatgatagatccatctctaggacatgatgtgccttctgatagtgtggctaaggttgcagccattgcttcaatgtgtgtacagccagaggtgtcggaccgtcccttcatgggcgag

SEQ ID NO: 25669 - DNA, 428 bp, Glycine max
gtccccagcaaacgggatttgtattgcagcaacaaaggttaggttggcatttgagtgaaaagcttaatcatcccatggagaccaacaacaaacagcagaagaagaagtggtttattccactggttctgtctctactactgtccaccctgctcatacttttttccatcttcgtctcctccgattcctcctccctgctctacctctaccgtacacgtggcagggtggaggagcctcgtttcgtggagtcaaagctgaggttgtccgccacgtcatccagtgactctgttcccaggatcgcgtacctgatctcggggtcaatgggcgatggcggcactctgaagagaaccctcaaggccctttaccatcccaggaaccaatacgttgtgcacttggacctcgaagcttcttctcaagaaagattggagctt

SEQ ID NO: 25670 - DNA, 490 bp, Glycine max
acaaaatcccaaaaacaccaacgccactaacaccactctgctcagctcaagtggtttactaccgatcgggaatgcgaagctatcttaacaacgacaccaccatcacaaaaacactattctactccgttgaaacgatgtcgcttcacccaaaccctagcctcactcctccaccagccacaccagcgttaaagccctggctcaacaccaccgccaccacggagcccctcaaccctatggtcctcgccatgcacctctccgaccccaaatctaaaaccctaatccccaattccacactaatcataatggacagaacccttcttttatcggacgagcttctcctccgaatcctctccaagctccccaattcgcagcagcagcggaactccaactccttagtctgcaaacgctggctgaacctccagggtcggctcgtccgaaccttgcgtgtcctcgattggaacttcgtcctctcgggtcggttaattattcg

SEQ ID NO: 25671 - DNA, 334 bp, Glycine max
ctcaactcaagttgttcactaccgattcctaatgccaagcttcttaacaccttcacaacattcacatcacaaaaacactcaaaacgatgtcgtttcaccccaaccctaacctcaacaccgccgcgaccacggagcccctcaaccatatggtcctcgccatgcacctctccgaccccaaatccaaaaccctaaccctaatccccaattcaaccctaatcatactggaccgaacccttcttctctccgacgagcttctcctccgaatcctctccaagctccccgattcttcgcagcagcgaaactccaattccttagtctgcaaacgctggctgaa

SEQ ID NO: 25672 - DNA, 406 bp, Glycine max
cgacacaaaatgataaagaggaggttcttcaagctcgatcacggtgatcgagatggcctccgatccgtcttcttcttcttcggactccgagcttgaagccgtagctgaaacctctgaagaagaatcagaggaagatgcaatgacagaagtgaaaccgaatgatgatgaagctggctcaaattcttctgggtatgcaagtgaggatagttctgcgaatgatgttgatgtcaactcagcaggtctgctatttagtgaagatgatgctggagctataaacgaaagacaaatgcttattaacagagagttgctgagtaaaggtgataccgaaaagtctaatgtcttggctgaaaagaaatccttaccgacagatttgccatcccatgtcttaaaatgcaaatcagtattt

SEQ ID NO: 25673 - DNA, 274 bp, Glycine max
tcttatcctaattctttatagtgtacattttacatacctgtttcaatttctatttttcagaatttgtcggaatcatttatattgagaccacaatatcaggaagctatgcataactaactctgacacaattcagtatttcattaactgtacatcaaccacaagaaatttgtatggaagtttattccctgaaatgattttgcattccattaaactgattcaaccttatttgagtttttttctctgaactacatatattcaatgtgcagatctgaga

SEQ ID NO: 25674 - DNA, 462 bp, Glycine max
agtctttctagtacttttcttgtttcatgttggggataggcacttttatactgtcttcccgggaatattcctttttagccttgataaactgatccgaatcatacaatcaagtccaaaaacttgcatggtttcagctagaatttttccaggcagagctctggtgctaattctgcccaaagatccagggatgaaatataaccctactagtgttatatttttgaagattccaaccatatctcatcttcaatggcactctttcagtatcatatctagttccagggctgatgaccacattttgtctgtgataattaaatgtgaagggtggtgggctaattctctttatgacctgatccatgctgaactagacaaaactgcggatacaaggaagggaataccggttgccatcgaaggaccttatggacctgcttcattagactttttgagatatgattcccttctttt

SEQ ID NO: 25675 - DNA, 588 bp, Glycine max
gcagttcattcttttgtgcatttctgaaatatcacctgcatcatgattttccttcaggtcaggttgatgaaaggccggttagtaatttattacttcaagcagatgaacctaaatgcaacatggaagaaaatccttcaccaagtaaacattgcaatggagacatagatactggtattgtcaaccaggtggttgaaatagaagatggattatatactagggttgagcatacaatcgaatgtaaaggttctggtgctctaggaataaatttaatatcttctggcatcagtccttcacaaaaactggaatcaactgcagagaatgatttacaaactttcaactatgaggctacttgtgcagcaacaagcgcagttcttgtttcaaaattcagtgagaataataaaaaaaatccaggtcaatgaaaagatgctactatgcagtaagaaccatccagtcatgccttctccatctaatagcaggattcaaatgacaagaaatgaaggtaaggcaaagtccttatcagatgaggattcacatgacaataaatgaaggtaaggcaaagtccttatcagatgaggattcaaatgtcag

SEQ ID NO: 25676 - DNA, 382 bp, Glycine max
tctctctctctctccctccctcttctcttacaattcaattcaatccattttgaagaaatgatgattagttgagagtgtacaaatctctactgatagtgcatgaaaattgatctctctctctctcttgctgatttctttacagaacttggaaaataatttctttaaaactgaactttttcaaatttgtatttaattttgatttgattattcatgcgactgattagtttagattaactcctttttgccttttatttcttaattgatgtacatgtgaaaatgtctatgcaatgatcataacttgtctagtgaaaatcattaatgggtcatggatgttgcattaaaagacgagggcttgagggaagaaacatggaaattggggtag

SEQ ID NO: 25677 - DNA, 254 bp, Glycine max
gacaccgcctcactgtgctcactgaagcaaagagaagctgtttcatgccaattctacgcatggtagctcacattgctaagcattatcagggacgtggtctcagccttcaggacttatctcaggagggaagtactggtcttatgaagagcatcccgaagtttaaccctgaagcgggttgccggttcggtacttctgcatactggtcgcatgaggcatgctatatgggaggctatatttctacattccaggacaat

SEQ ID NO: 25678 - DNA, 386 bp, Glycine max
atttattttagtgccgcgacagagacaacaaagagagtgagaaactaaaaagagaagaggaaaaaaaaatggaggaatcatcaacaacatgcgtgttgtgcgagaagagggcaatgatgctctgcgactcggaccaggctaagctatgctgggaatgcgacgagaaagtccacagcgccaatttcttggtcgcgaaacattctagggttcttttatgtcgtttgtgtcactccccgactccgtggaaggcttcggggatgaaactcacgcccactgtgtcgttttgtaaccgctgcgttgcggaacggaacgcgaggtggaaccgattggcgaataatgaaaatgaacatcaacaaccagcaacaacaacaacaacagagtgattt

SEQ ID NO: 25679 - DNA, 1076 bp, Glycine max
gctcggagcttgaaagtgtaaaccgctttatcctccagtgtgtgtgtctgcatttgagctactttttttggcagaaaatcatgttaagaatgggtttgaggaagctacaagacaaggttgcgctgatcacaggcgcagctagtggaataggaaaagccacagctacaaaattcatcaataatggagccaaggttattattgctgatattgatcaagagcttggccaagagactgcaaaagaactaggacctaatgctactttcatagcatgtgatgttactcaagagtcagacatttccaatgctgttgatttggccgtttctaaacacaaacaacttgatatcatgtacaacaatgcaggaatagcctgcagaagtcctctaagcattgttgacttggacctggaactgtttgacaaagtcatggacataaatgttcgtggcgttgtggcaggcatcaagcatgcagcacgtgtaatgatcccacgtggaagtgggtccattctctgcacagcaagtgtcacaggtgtgataggaggggtgtcacaacacacttactcaatatccaagtttgcagttgtgggcattgttaaatctctggcttctgagctatgcaggcatggaatccgggtcaattgcatatcaccttttgccatccccactcctcttgtcatgggagaaatgagtcagatatatcctcatgttgatgctcagagacatgaggacattgttcacaatgctggtgtcttaaagggagcaaattgtgaacccaatgatattgctaatgctgcacttttccttgtgtctgatgatgccaaatatgttagtggacacaacttggttgtggatggaggtttcacatcttttaagaatttggacttgcctgcaccaaatcaagtgcagtaggagtttgtacaaattatattttagataaaggtaacaatgttaaaattaagtaattcaataagagtgagtcaattgaattaatttactcttcttgttagagaacaataaagtcctacatggggcaaataaaggcaaacaaagaagtatatataaacatggaggagttcatat

SEQ ID NO: 25680 - DNA, 271 bp, Glycine max
cgtaactctcacacacaacgcaacccttttagtttttctcgccatcttccgaaactgaccaaccattttcttgggatgtacaatatttccccttttctctgctcttttttcatcattattcacttcttcttcttcttcttctttctctaaccagaacgaacaaatggggttggtgagcagtttcttggggattcttggtttcgccgttcgaatacctcttggcctctctgtggggttctttctctttgtgctactcagaaccaaacatgtc

SEQ ID NO: 25681 - DNA, 265 bp, Glycine max
ctctgaagctcactctgtgacatctgaagtgtcccaccttgcctacacagacccactactgggtgaaatgtcgataatagaaaacatgaatgaagaagctttcatagatctactaccaatagaaatggagagaattgaaaaggagaaagaagaagccttcaagatacatgagcaaaagatattgcagctccaatctgactatgagaaggaggttgaaaagttaagtgtagagtacaagatgttgcttcagaatgttaatactgaa

SEQ ID NO: 25682 - DNA, 219 bp, Glycine max
gcacagcagagtagattgcaatttgttccggctgctgaaagaaattgaagcaatatgttgaaaattcctgtcccatttaagctgcttaaagcataaaaaattagtttctaatacactagtctttgcgattttgcagtgtatcgtgaatattgtatcattcacttctcttcaatgactaagtatgagtgtattagatctgtttttagaggtgaaatatcc

SEQ ID NO: 25683 - DNA, 463 bp, Glycine max
agatttcatcccaatcaagcaactaagggagaagtacaataaaccaaggcatgaaatacccattgacccaccaaatgatgaatgaagatggaggcaaagcttaaattacccatgtgagactatatgcactgttcaattgggttgcggattgagaggttgaaattaaaagtcttctgacaatatattcgatgaatcagttgattggctttgcaggaaacttaaaaagacagaaaacattccttgtgtcgcatgcacaatgatgatcgattgccttcctgtgtgatcactcacattgtcgaatgttatattctgttgtatgagttttcatttttcatgcacatatcattgtcgtgaagatactgattacctacctaacctaccttgtatacatgtaattatatatttatgcgatttttagttggatgaatagtaatgagttcacgtttgtgaactatttggaggc

SEQ ID NO: 25684 - DNA, 291 bp, Glycine max
agaatgcatctgttagcatcatcctcttctctttctccttctctcccttcttcattccctcgcccttctctccatctccaccttcactttccttcccaaactacccagcttcgcctccataccccaccacccctttcttgctcccttaattcttcttcttcttcttcttacgtggaacaatctgcttcatcttctcagatgcagaatggcttgctgtactccagagcttattgggttgctgaatctctcatagcttgggacgtggatgttggaaacgggttttcttgctac

SEQ ID NO: 25685 - DNA, 485 bp, Glycine max
cttgctagaatgtgctaccaaggcaatcaaagttgctacagactcggagacagatactgcaaataagtgccatgtcagtgataactttggaaggtctggggttattgtttttatgtgtgactaggctcaaaatatttgttactaccaatgatatttattgatctcatttcaggcttattctcaccactaacttatttcttctcaagaaatggatctcacatgttggattaccagcttgctcttcagcgatgcgttagaaacgatactgatgaacgctttcgggaagaaagaaatagggcattcatttcaaagtggctaagaagaccgttgagagtatatgaaaactttgatttgtcattggagggactaaaatctttctttgagaatgccaaggaacattatggcataaatacagtacgtgccacacagagtttgggtttaaatggggatgtcctccaaaacaaggatcagaatgcatggttcac

SEQ ID NO: 25686 - DNA, 365 bp, Glycine max
tttcggttgaacggacacgtcaaagtcattttcgaggtgcttccaaacgacgacgtttctccctcattcgaaacaagggtttttaggaccccttcgcccttcggattccgccaccgccataacgccatagctgccggcgaacgatttctgggtttgttactttcacctcaaagttcctatctttaccctcgacatggcgaaggtaacaagctcaaaactgaacattgcaataattcacccagatcttggcataggtggagctgaaagattgattgtggatgctgctgttgagcttgcatcccaaggccataaagttcatgtttttactgcacatcatgataaaaacagctgctttgaggaaactg

SEQ ID NO: 25687 - DNA, 404 bp, Glycine max
attatgagatgccacttactggagtatgtattctccatctcatttgccagacgcatgaggaaattggaaattatagaaatcagagaggctcctgagttgagacatgtatttggtcagaacattcattcttcccagcaataccaaagcaagtttcaaattgagtttcctgttttggaaagagtgacactccatagtacaccagatatgattggcattttcccagaaaattattctgcaacatgctcagctttgcaattgcttgtcatgaacaatattgggctgtccactctatctatcaaggatttgaaggttgatttagaagctacacattcagatcatagttctaaaacggattcaagggtagtgagtatgacaactaagcaaaagttagcatctgttattat

SEQ ID NO: 25688 - DNA, 568 bp, Glycine max
gcccagccaaaaaaggaaaatgcagtagatgcaggaaagggacctacagttcctgtatcgaaaaaccttgttcaaagtgctgcgcctgaagcctctcctgctacttcccacgagatcacttctgcaacttcttcgcagtcaaagcaagatgaagagaaatcttctgtccctctgtcatcagttaggccatccttggaagagaacattctactcggggttgccatagaaggctcaaaacgtactcttccaattgaggaagaaatgactccatctcctatgcctgcagagtcacaagaatttgctgttcaacggaatgggggtggacctcctgctagtaaggataagaaggatggccagtcttcatttccaactagtaaacagaatgactaagattagtagctaaattaggcagattagaacttgatatttcagtacataccttcgatagaaactaaacaaaaatgatccagctgtcttttttataagttggaattatgcattgtattctccctaatttgcccatgtatgtacataattatcaattcatggttcacactcgggtaaatgc

SEQ ID NO: 25689 - DNA, 304 bp, Glycine max
atttttcatttgaactttctccagcatatgctcatgctccaactgcgttgattactattcacccccagtatggggctcatatcattttacgtaaagtcccaatatgaaataaaatagtagcctcttattgtgtgattatagcacccaactccggtaaagcttatactttattaccaaaatgatcccttcttagatcctgtcatatgtttaattactttcatttacaggtttgggggtttatatcttttgttgaattgtaactttgtaattgaatagccaaagaaataaatgtgatttcatacta

SEQ ID NO: 25690 - DNA, 264 bp, Glycine max
caaggagggttatactcctgcaaatccagaagatgaggaagagagtgtgtatattgatgacgaagacttttcaatccatgatgtgtcacatgaagcagatcaagggtgtccaagatcaccaacacttatcaatgcattccagttgatatcaatgtcttcaagtctagatctctctggtctttttgagcaagaggatgtttcctgagaggaagataagatttacatccatccattcaccaaaagatttggttgagaggattgaag

SEQ ID NO: 25691 - DNA, 384 bp, Glycine max
ctcgagccggttcaggagaaacttaatgagttgctggatggagatggtggaataagcaaaagaaaagatgccaccaaagggtacttgaagcttttgtttctcactgtggcatcaggtgatagaattaatggtgaagctattcaaagcaatcgagatctttccatgatccttgatgcccttctgaaaacaaaatctagagcagtgctgaatgatataattaacaaaaatggtttacagatgttacataacattatgaagcagtacaggcatgacttcaaaaagattccaatactacgaaagcttcttaaggtcttggagttcctagaagcaggcaagattttgacatatgaacatattaatggtggtcctccttgtcgtggaatg

SEQ ID NO: 25692 - DNA, 994 bp, Glycine max
agaatgtgcagccagccaacgtggaaggaagccaagaaacctaaatcaattcaaaagcgttgaattttccatttttcccccataaaataacaaaaaaacaccctcaattctctatttactcgctttgcttcaacgccaccaggcctccttcttttctcattaccctagtttttctccattttcttcataattgaaccgtttctcctcgatcccatatgtgttgatagtgaaaggcatcgtcctcatcatcatctatcatggcatggtttagagctggagctagcatagcaaaacatgcaattaggagaactctttctaagggtggatccacacaccttgtgtcaagggcaagggtccttccatcgataccatcatcacatagcagaagcttccacagctcggttttcaaggagcaagctgcacctgttcctcgtgcggttcctctttcaaagctaacagatagtttcttagatggcacaagcagtgtgtatttggaggagcttcaaagggcttgggaggctgatcccaacagtgttgatgagtcatgggacaatttcttcaggaactttgtggggcaggccacaacctcacctgggatttctggtcagacaattcatgagagcatgaagttgttgttgctggtgagggcgtaccaggttaatggccacatgaaggcgaagttggatcccttgaatctggaaccaagggaaatccctgaggatttggaccctgcactttatggcttcactgaggctgatcttgatagagagttcttcttgggggtgtggaggatggctggtttcttatctgagaaccgccccgtgcaaacccttagatccattttgacaaggcttgagcaggcttattgtggaagcattggatatgagtatatgcacattgctgatcgtcacaagtgtaattggcttagggataggattgagacccccacccctacacagtttaatagggagaggcgcgaggctatctttgatag

SEQ ID NO: 25693 - DNA, 347 bp, Glycine max
tgatatttgtacatagtgttaaaattcatattgagattctaattatttggcattatttatgttctctgtacacccaaggggtatcagcacagttgttggtctgttcacgtgaaaaaagggtgatgtctagtcagagttaacacgccgttggcagttctttcagtggaaagtactctttctattgtaagataacacgccaaaggcagtttcttccttgtgtggccattgtgaaatttaatctttgctagttttacttagtatagctgtttgtaccttgaacattgcttttgcaattaagttcatcgaatttttattatgagaaattcaatttcatattaattaattgt

SEQ ID NO: 25694 - DNA, 285 bp, Glycine max
cgacatatgtgtagcttataaaatctttagctaaatttgagcatcagagtcatggatgcttttcagttcaaaactattatttcaggcattcttgccctgctagcatgcgccttgttttatcaatttaagaaaacactttgtggcaatacaaagaagatctgtagggcacctcaagcagcaggtgcatggcctatcattggccatttgcacctcttcaatgctcatcaactcacacacaaaacacttggcataatggctgagaaacatggttcaattttcacaata

SEQ ID NO: 25695 - DNA, 315 bp, Glycine max
gtgagatacatgaccactagggaatagcgcccgagagagagagactcaacttgaaaaaaagcaaatttgctttctaggatagactagtttgctgtggaatcacgtagcagtatttgttttggggttcaccgatggatggttacgaagctacaagaattgtgttttcacggatccaaaacttggaccctgaaaatgcttccacaatcatgggtgtacttcttcttcaagaccatggtgtaaagggcatgattagactagcatttggtccagaagcacttgttcactctgtgattctcaaagcccgcaaggagttag

SEQ ID NO: 25696 - DNA, 382 bp, Glycine max
ccccattcctgattccattccgcttcctcctactcgcgcatacacggtaatttagaaaacactttccctcccaaaaccgccacaacactacacaccaacttcacggttcccgccaaaatcgatgctagggttcactctcccgctccagcttcgctgctgccacctcccgcaacaaccgccacttcccaacccgatttcgcccaaacccttctacccgcccctcgttccctcccttccccggctccgaaccggccccagcctgcgcgcgagttttccagccgggtccggtccggttttttccgaggatgagctggacgtggagctggggcggctgttggcgctgctgccggaggagatgcggcggcgcgtgaggaccaccccg

SEQ ID NO: 25697 - DNA, 674 bp, Glycine max
cagaaggagtcttgttgcgcaagctaaacgagtgctcgaaggacggaaatgtcgctcaagcgctttgccactacgatgaggctcgaaaattgggggttctactcaacctcgatcactacaacaagttgctctacctgtgttccattgaaagtgctgctggttttcccaatttgggtctcaaaagggggtttgaggtttttcagcagatgttgaatgaccgagttcagcccaatgaagccacttttaccaatgctgctaggcttgctgctgccaatgaagatcctgacatggcttttgaattgctgaagcagatgaagaatgttgctattgctccgaagctgagatcgtatgagccggctttatttggattttgcaagacgggtgatgcagagaaggcttatctagttgatgctgacatggttgagtctgggattgtggcggaagagcccgagctttctgctcttttggaagtcagtgtcaatgccaagaaggaagacaaggtgtatgatattttgcatcgattgcgctctacgttgaggcaggtatctgaatcaactttggggatagttgaggactggtttaactcagagtatggtgcaaacattgggaaggagaagtgggatgttaagaaggtgacggaaggcattgcgcagggaggtggaggatggcatgga

SEQ ID NO: 25698 - DNA, 521 bp, Glycine max
gtttgattcttgagctaaccagtctccaacaacaatctctctcaggaataggatatggatggctcagcctcaaagcctggtcacacaacaagaggacttggtttggttaaagcttctgttaacttatatggcaacaggattgaagatgtcaatagtcctttgctgaaaaaatatttctcaacgaagcaatcttctaaagcaaaagaactccacagagcaagcaaggatatggttcggtacaaagagaccaaacgggtagcagaatctgcaaaagctcaagcagaagctaagctttccaatgccaaacagacagtgaaagaccttttctctatgattggggaatctagctacaaggcaaaagcccgaatgcgagatgtggcaccactaaaggagtatgggaaaccaagcaagaatgatgatgataatgagtattcacaagttatgagagaattggaacatgctaaacgggaatttttccaacttaagcttgatgtggcttctgttttggaggagaaacagcg

SEQ ID NO: 25699 - DNA, 271 bp, Glycine max
ctcgagccgcatcaccctcttcctattctcaaccctttgagcttattacaattctcaaccacaaaagttctccctcctaacatgtttgatttttaagctaaccaatctccaacaacaatctcactcagctgttcggaggtgtggttccaaacaggaatacataggatatggatggctcagcctcaaagccttgtagctcaacaagaggaattggtttggttaaagccgctgttaacttatatcgtaacaggaatattgcagatgttaatag

SEQ ID NO: 25700 - DNA, 548 bp, Glycine max
tcacaaaatagtagtattacagtttatcgttaatttctcccagattcgctttgtcgtgtctcgagcatccttgatgtccagggaaatccatatttgtccttttttctgcgtactttcatcgaattattgcttgttagctctataccaacttcttatatatcccatcctccacatctacgcctgaatcatcgtccaactattagttcctctctctgcgttcatatcgcaacatgcttcccttttcaactctctttcaaaccccgttaaccaccgagtattggtacaaccaccccacaacaacacttctagcgttcttgctcatctcccttgttacttgctatgcatggctcaagcccaaggcccaaaggcttccaccgggcccatcgggcctccctttcttcgggaacctcctatccttggacccagacctccacacttacttcgccttcctggcccagatccacggtccaatcttcaagctccagctcgggagcaaactctgcatcgtgctgacttcgccgcccatggctcgcgcggtgctcaaagag

SEQ ID NO: 25701 - DNA, 431 bp, Glycine max
cgcagacaagcgggcgtccgctacgccatgcagaacccccactcctacgtggcatccaacatcgccggattcgtaactcttctagaagcttccaaaaacgctaacccccagcccgccatcgtttgggcctcctcgagttccgtctatgggctcaatgacgaaagcccattctccgaactccaccgtacggaccagcctgcgagcctctacgcggcaactaaaaaagcaggcgaagccatcgcgcacacctataatcatatctatggactctccctcaccggattgcgcttcttcactgtttacgggccctggggaaggcccgacatggcttactttttcttcactaagtccatcctccagggaaagcccattgacgtgtaccagacgcaggacgaaagagaagtggcgcgcgacttcacttacatcgacga

SEQ ID NO: 25702 - DNA, 993 bp, Glycine max
tggtgtgttgttttccattacacttgtactccttctgcgtaggattcgatgctgctactccttcttcagtttctacaactgagtttcatatcttctttctgttgatgtttatgctgaagactgaataaaaatctgagtgcctatggcgatgcaaactgtttatcttaggaagcatgaaggaaatgcacacaattttgtgggcacgttgtcgtctgcagcttcagcaccctggtggagtgcttttggatcacaatccgttcatcagggagaatcttgtggccaaatgaaaccctttgcattggagctgcctaactgcatagaccaacttgctgccactaagctatcagcaagaggagctgagcaagtgttgggtgaagggcatacaactcagttcaccatttttccagatggttgtaaaatgtcagatgatgcgcaaaagcttcagacaaccatgtcactgcagtcatcgcttactgatccacagtctcgttttgagatagggtttagtctgcccacgatatgtgcaaaatatccttatacggatcaattttatggactcttctcagcttatgcacctcaaatttcgggacgtataatgctgccacttaacatgacatctgatgatgaaccaatttacgtaaatgctaagcagtaccatggaatcattagacgtcggcagtcccgtgccaaagctgtacttgatcacaaattgactaaacgtcgcaagccctatatgcacgaatcacgccatctccatgcaatgcggcgaccaagaggatgtgggggtcgcttcttgaacactaagaattctgttgacggaaatggtaaaattggaaatgaagtgcataaaactgttggtgaacaattgcagtctagtggctctcagagttctgaattccttcaatctgaggttggaacttttaattcatcaaaagagactaatggaagcagtccaaatatttctggttcagaggtgactagcatgtattcgcg

SEQ ID NO: 25703 - DNA, 611 bp, Glycine max
ttggtgtgttgttttcgattatactagttcgctttcatctcccttctttctttccttttacttccactctctctctctctcctttgtgtttttaatttgcttcttcatattgtacgtaccgacatgactccaacctgatggggttaaacactgcttctgcgtaggattcgatgccgctactccttcttcagtttctacaactgagtttcatataaagctgcttactacaaaccaacaagattaactaagaaatcatcttttgggacgatgcaaactgtttatcttaaagagcacgaaggaaatgcgcacaattttgtgggcacgttgtcttctgcagcttcagcaccctggtggagtgcttttggatctcaatctgttcatcagggagagtcttgtggccaagtgaaacccttttcattggagctgccaaactgcatagaccaacttgctgccactaagccactagcaagaggagctgaccaagtgttgggtaaagggcacataactcagtttacaatctttccagatgattggaaaatggcagatgatgcgcaaaagcttcagacaaccatgtcactgcagtcatcgcttactgatccacagtctcgttt

SEQ ID NO: 25704 - DNA, 391 bp, Glycine max
ttcatattgtacgtaccgacatgactccaacctgatggggttaaacactgcttctgcgtaggattcgatgccgctactccttcttcagtttctacaactgagtttcatatctcctttctattgatgtttatgctgaagactgaataaaagtctgagaaagctgcttactacaaaccaacaagattaactaagaaatcatcttttgggacgatgcaaactgtttatcttaaagagcacgaaggaaatgcgcacaattttgtgggcacgttgtcttctgcagcttcagcaccctggtggagtgcttttggatctcaatctgttcatcagggagagtcttgtggccaagtgaaacccttttcattggagctgccaaactgcatagaccaacttg

SEQ ID NO: 25705 - DNA, 498 bp, Glycine max
  unsure (1)..(498): unsure at all n locations
gcacaacagaaggttgaagccactgcagaaaataatgctgctagtaatcgttcaagtggtgatgctgcttgcattcagagaaatatggaactaattgagaagggaagtgatgcacagagctcttgtacgaagcctgactgtgaagctgagagtggccctgtcgataacatcgataacatccaggaattttctccgctgaaatgtggggaagcgtatccaagtggaacagagacacaacaggttgaaacaagcattcgcttaggccagacattaatgatgcctgcccgtcatgctggaggattaaatgtgcgcatccgcgaaaatggtgaggcaagcccgactggtgccgaggatactgatacagagcattttgggaatgctagcatcagtggtgaggctcatgacaatccctatgttcaaattaactcttccaaggaagctatggacttgattggagcatntcatactcatccaaactgttccctgaaaaattccaca

SEQ ID NO: 25706 - DNA, 406 bp, Glycine max
caattgtggtttctatccaataatttgtgacattgtacacaaacaatatccatggcctctgcagcttccatttccctcatcacaaccagaagcagcaaaggttcatgcatctgatatttctagcatcaaagcctttgcagaatcaaagggagcctctctgatcccttacacctaccactccatcacagagcgccatgatgatgatgtagcagatgagcttgctgcttccatcccagtcatcgacttgtctctcctcacttcgcatgaccctcaaatccacgccaaagccgtgcaccaactcggcaaggcctgtgcagagtggagtttcttcatgctcacaaatcatggaattcccgagagcctggtggaggagttgatgaaaaagtctcgcgagtttcatgatttg

SEQ ID NO: 25707 - DNA, 273 bp, Glycine max
gtgaaaaggctgttacacacactgccaccatggaggcctttttcctccattttgacgtgccccaaatcagagttttttctttccacacacacacacactgctggttgagtggttcttctcaaaatgggtgagaaagatgatgattttgggttgagtttgagtttgagtttggggagagtgaaccaacaacaacaacaccctcctcctttgaatcacatgcaccagcctcaacaactacaacctgttcccatgaatcacaataagactctcttt

SEQ ID NO: 25708 - DNA, 318 bp, Glycine max
aattaacccattcactaaatatgctttgttgatgaacccattggcgagaagtctcgaagagttgctaccagatagaatctcaagtacttatcgatgtttcattcttcttagaacagcacttgttgtatctaccgtttgtgctgcttttctgattcctttctttgggtttgtgatggctttaattggttctctcttcagtgtacttgtgtcagtggtaatgccaagtttatgttttatgaaaattgtgggaaaaaaagcaactgctacacaggttgcgttgagcgttgtaattactacatttggagtcatttgtgggat

SEQ ID NO: 25709 - DNA, 418 bp, Glycine max
ctgtaaagcccacagatacggagaagggaaacaaatctaagcgattgagaacagatctttatgatgatcttcaaggaattgatatagtttttgacggagaggagtctgaccctgatgacaagttgccattccctcagctggatgatgacttacaacagcctgccccagttattattgagcaaagttctcctcactcgattgttgaagaaacagaaagtgatgtcgttgatagtagtcaattttctcaaatgggtactccattaggatctaacatcgatgaaaatggccaaactgaattttcttcaaagatgtctggtttacgtcctgatatgtcattaactcgggaatcaagtgtttcttcagacaggaagtatgttgagcaggctgatgacacgaaaaacgttcaagctaggccctc

SEQ ID NO: 25710 - DNA, 369 bp, Glycine max
ctcgagcgaatcggctcgagaaaaaacagaaacaaactcccatgatttcttcacttcttgctgttgttgttgttgtagacgtccgtgttcttcttctggttggtctcacaactgaaccacccaaaactcagtctcggatgcattagacaacaatggaggattccgagaaattgacggcgttgaagaaggcctacgccgatatcatcctgaacacggcgaacgaggcggcggcgcgtatcatcgtgtcggagcggaaagccacgcgctttcagcaggaacttgtttccactaaggaagaggcgcttcggatgcttctcagactcaaacaaaagttcgattctaaggtcagtgaagcagagctgacgtcat

SEQ ID NO: 25711 - DNA, 282 bp, Glycine max
tccttcctgcctttgtcagcgatccatgttgtgaagagcagaggatggataacataccagagcacatagtatgggagatattgagtaggataaagacaacaagtgatagaaatgctgtttctcttgtttgtaaacggctttattatttggacaatgcagaaaggaattgtataagggttgggtgtggaatggatcctgcagatgaagctttgagctgtctatgcataaggtttgagaacttgtccaaagtggagattacatactctggacgcatgtccaaac

SEQ ID NO: 25712 - DNA, 261 bp, Glycine max
ctttagatcaagatttaagatcaatatcagttcctttgtattgcaagacgttcatggaagaaacatttgttcccttacgtggcattaagaacgacctcaaagcaagaattccgtgctatagacaagattggactagtggattccaagctggaatcagatggaagtctcactgctgtgcagactcttgcatcaaccgcactatgcggtattatccactcaatcattggagggcagcctctcctcatactaggtgtagctgag

SEQ ID NO: 25713 - DNA, 403 bp, Glycine max
ctctgcgcgctccccatggcgtgctcagctttctgagatcaagtcaaagaacttgtcggtctcttacggcaaagcgagatgaagagaaaagaagttgagaaggagctgacagtgagagagccagctgttggaaccacattggctacaccaccatctggagactccccacatccatcgaaacaatatgtcgaagacatgaaggggcccttatctccagtgtctaaacagcttaaatacacgccaggggttgccaatggtttggtgagggaatcagcagcatttgtagatcagggtagaaggatggtacccatcggacagctgtcaatgaaaaaactaacaattgtaggacaagcttctggaaagttatggaggtggaaaagaagtcatcatcagtggctactac

SEQ ID NO: 25714 - DNA, 405 bp, Glycine max
tgcagatgctaggtgccaactctgggagaaggcatggagatcagggaaatgaaagatcaaatcaaagaacttgttggtctcttacggcaaagcgagatgaagagaaaggaagttgagaaggagctaaaagtaagagagcaagctgttggaaccacattggctacaccaccatctggagactccccaaatccatcgaaacaatatgccgaaagacctgaaggggctcttatcaccagtgtctatgccagtgcctaaacagctaaaatacacgccatgggttgccaatggtttggtgagagaatcagcagcatttgtagatcagggtagaaggatggtacccatcggacagttgtcaatgaaaagactagcaattgtaggacaagcttctggaaagttatggaggtg

SEQ ID NO: 25715 - DNA, 259 bp, Glycine max
gctcatcgtttgggtcagacaacagatgttactgtttaccgacttatatgtacagagacagttgaagagaagattcttcttagagctagtcagataagtactgtgcagaaccttgtcatgactggtggttctgtcggtggagatcttttagctcctgaggatgttgtatcattgcttctagatgatgttcaattggaacagacattaaaggacatccctcttcaggtaaaggataagcagaagaggaaacaacctatga

SEQ ID NO: 25716 - DNA, 293 bp, Glycine max
gttctgccagcctctaaatgggcttgggagggtgatgagagtgatgatgaacaaaggagaagtggaaaaaatatcggcttaagctactcatcttctggtagtgagaacgtgggtgatggtcttgttaaagctgatgaatcagagtctgcagctgatacacgtttttcagctcatgctgacagtggaatgaatgaagagcagaggcaaaagctgagacgcttagaggttgctttaattgaataccgtgagtctcttgaagagaggggagtaaaaatttggaggaattgagaaga

SEQ ID NO: 25717 - DNA, 464 bp, Glycine max
gggattgtccaccaggcctgacatctgcccgccggagtatttggaggagctctctgagcttcaagatggtttgcctacatttcctgatgaggaggcctttgcatgcattgagcgggaattaggactatctcttgactccatcttctcttctatatcgccatcagccgtggcagcagccagtttgggacaagtttataaagctcagttgaagtattctgggaaacttgtggctgtgaaggtgcaacgtcctggtattgaggaagctataggattggacttctacctgataagaggtcttgggatttttattaataaatacattgacataatcaccagtgatgttgttgcacttattgatgaatttgcacgtagagtttgtcaggagctcaattatgtgcaggagggacaaaatgcaaggagattcaaaaaattgtatgctgacaaggaagatatttgtgtccctg

SEQ ID NO: 25718 - DNA, 254 bp, Glycine max
gtccaaaacaactgaaagagatagtgaacaatattgtgtcaccgctgaaacaaaggatcgaactaaaggtgatagaaataagctaatttcaagaatgaaagagctacttagaagggttgctgcaacaaaaacagccgatagagaaagtttctatgatcaaaaggttttacattttagaagacaaggaaacatagaagcatttcctgaagatgatcaacgcatcagtgaatccccaaggatcagtttgacgtggg

SEQ ID NO: 25719 - DNA, 403 bp, Glycine max
gtccgatcttacgttgttgcctcgcagacgcaacgggcaaaagaagcgcctaactttggacagcacaagggttacccggtcattgaccatgagttcgacgcggttgttgtcggtgctggtggagccggtctgcgagccgcgttcggtcttgccgagggaggattgaagaccgcttgtatcaccaagctcttcccgacccgatcgcacacggtcgctgctcagggtggtgtcaacgccgctctcggtaacatgacggaggacgactggaggtggcacatgtacgacacggtcaagggatcggactggctcggagaccaggatgctatccactacatgtgccgagaacccccaacaccgttgtcgagctggagcactacggtgtcccgttctcgcgaaccaagga

SEQ ID NO: 25720 - DNA, 559 bp, Glycine max
gtttggacaagcgccgtggctactcactatacctgcaattgccataattggtagagagataaccatgtctgcagtcagggagtgggctgcttcccaggatagcaagcttttagaggctgttgctgtaaataacttggggaagtggaaaacagccacacagatgacagcattaaccatccttcttgcgacccgggactggagccatggaggaggagctgccattgtagtaggctctggtgttgctttgctttatacttcagcagggcttgccttatggtcgttggttgtatatatgaagaaaatatggagggtgttgttgaggtatgcttgcgaacatttaccaatgtcacgaaagggggctgcaattttagtggcatgcaaatgttttttttttttcctgcgcaatctctaaccccatgcagtgtcatttctcctactcgtgtattttctgcgcatttttttggtcctctaaaaaagataagggccactagccatgcttaagcgttacagcagtgattgtgttgggaaaacgttgtgttgtaagttgtaacccacgttt

SEQ ID NO: 25721 - DNA, 338 bp, Glycine max
cttgttgcacttgcaaccgttgccatattaattatcttccaaaattgtaatcacaattcataaaaacaagcaagcctcgaaggacccagaaggatctcaacaacaaagaagcaaacttttcatcaattttggcatcaagaagagaagggttgtgtagtggaattggtttttggcaaaaggatatttgtcgtaggaattgaaaacaagtaccaggaatttatagcaactcaagcttccgttagtgttttagaaggtggtttttggtgatggtgatgttaaactttgggaaaaaggaggagcagggattgcgatttgggtaataccgatttggaaaaacc

SEQ ID NO: 25722 - DNA, 389 bp, Glycine max
gtcggagctcggctcggctcgaagactgttaaaatctccccgattagaaagattgtatctgaagattcgggtactttatgagatgttgtgactgtgcctgttgagcaaactaatgtggaagattcaccaggaagaattcctgatgctgaaaatgaagcagagttgtcatttgctgttgtaaatgattcttttgatgttcagagggtacaatctggcaatgatatcgtcgaggttgaagctgaccatgaaccttcagttgaaaacctgaacaatgttgacagtaaggcaccagaagatttgcaggctcctgattcaaaggttgggcagcagaaatcccgcaagggagtggggaagacccagagtaaagcgtacgcacactgtgaaagctg

SEQ ID NO: 25723 - DNA, 757 bp, Glycine max
aaaatgcttgttcgcgaccctagaaggcggctgactgcacatcaagtattatgtcatccttggattcaagttgatggtgtagctcctgacaaaccacttgattctgctgtattaagtcgcttaaagcaattttctgctatgaacaagctcaagaaaatggcccttataattatcgcagagagcttatctgaagaagaaatagctggcttaaaagaaatgttcaagatgatagatgcagacaacagtggtcaaatcacttttgaagaacttaaagctggtttgaaaagagtcggcgctaatcttaaggagtctgaaatttatgatttaatgcaagcggctgatgttgataacagtgggacaattgattacggcgagttccttgctgcaacattgcaccgcaacaaaattgaaagagaagataatctatttgcagccttttcttactttgataaagatggaagtggctatattactcaggaagaacttcaacaggcttgtgatgagtttggcataaaagatgtccgcctggaggagataatcaaggaaattgatgaagataatgatggacgcatagattacaatgagtttgtggctatgatgcagaaaggaaatcttccagcggttggtaagaagggcctagaaaatagcttcagcgttaagttcagggaagcattaaaattgtagttttcattgtcatcattgagttttttttttttttggtgctctttattaccacacatccctccttttcactttg

SEQ ID NO: 25724 - DNA, 401 bp, Glycine max
tttcttccccgaagccgtgctccttaaaaagagaacagttgaggaagaagggaagcttctcccggagtttgaagacgctgaggaaagacaactctttgaagcgctgatgcttgagctggatagtgatatggatgttgatatattgcgccactatgaggttatgtacttaattcatgagaagcatgaagaggaggttgtagctgtcaatgagaaaattcaagactttttgagggagaagaaaggtcaggtttggagattgaatgattggggtatgagaaggctagcttacaaaataaaaaaagctaacaatgcccactacatgttgataaactttgagttggatgccaaatatatcaacgatttcaagactctgttggaccaagatgaaagagttattcggc

SEQ ID NO: 25725 - DNA, 435 bp, Glycine max
cgtgtcgcgtgggcggacgcgtgggcgagtccattcgtggtggatcatgggggagcaacacgagaacgagaatgggagaacgggaacaaagaaccagcatcagcagaagaagaagaagaagaaaagcgagttcgagttctgcaaagcgtgcaacataaaccacgaccaaggtctccgccacaagtactttcctaatcacaagaaatccctctccaccttcctctcccgcttccgcaaaaaactctccgacgttcgcttcttcctcaacgccccaatccctctcaatccccaactcgcttctcgcaatcgcttctggtgcgtcttctgcgaccagcacatcgacgaactcaacagttcctttgcctgcgctaacgcgattcgtcacctcgcgagtgcggaacacgtgaagaatttgaagcaattcttctggaaata

SEQ ID NO: 25726 - DNA, 450 bp, Glycine max
actagtctaagatcgacggcggccgcccggatctagaacggctcgagatcagttttatatgttttggtggctgaaaccctgttcgggaattcagtggctatggctgcaaatgaagatgctgtacaggaatttacaccaaagaagaagccaccttcagaggatgagaagaggaagaagaaaattgtgcctgggagtttaatgaaagctttgatgaggcctggtgggggtgatgctggaccttctgatggtgaccagattacctatcactgcacaatccggactttggatggagtacttgtggaatctaccagatcagattatggaggcaagggcatcccaataagacatgttttgggcaaaagcaagatgttattgggattgctagaaggaattccatcaatgttgaaaggcgaagtggcaatgttcaagatgaagcctcagttgcattat

SEQ ID NO: 25727 - DNA, 656 bp, Glycine max
ttccacgcgtccgcccacgcgtccgcccacgcgtccgtccacgcgtccgcccacgcgtccgcacagttggttctttcatattcttcctcttggtcctttcctgggcttatttatacgcatttcccagttctcaatcactggttcagagtcatgagattcccaacaacagttctgactcacttgttcagagtcatgagattcccaacaacagttctgatcacacttgttcagagttatggtgtgattctaaaacccaatgtttcaatggacacatgcaatgtgtttgaaggaagttgggtgagggatgatagctaccctttgtatgatgcttctcactgcccttttgctgaaaggggttttaattgccttgctaatgggagaaaagatagaggttacacaaaatggaggtggaaacctaagaactgtgagattccaaggtttgatgtccgtggaatactcgaacgacttcgtgggaaaagggtggttttcgtcggcgattctttgagtaggacgcaatgggagtccatgatatgtttgctactgacaggagttgaggataagaagagtgtctatgaaatcaaaggcaacaagatcacaaaacagataaggtttttaggtgtgaggtttagtacttttgatgttagaatcgattttta

SEQ ID NO: 25728 - DNA, 471 bp, Glycine max
ctttttcttcggtgtgtgtcgagaaagaccagcagagtagagataacagaaagaaaaagaaaaggaaagcggattcagttttgaggtcactcactcccaccgatgactgatcattaacacctttttcttccctttctttctacaattatccctaaactttcttcttcttcgtcttcttctttccctatcccaaaaacgcgtcaaccaaaacacaaaaaccctattatcaccaccacacacttccttttcttggatctgtagatctaacgctattgcgtcacataaccgttcctctgcaacctagtgctgttttcactgaaattcaacggttgaaattcttggattttagtgtttggactttgatttgaaactggttgttaacaaacaatagaataggtgtattattatttgttattagttattagttatataataatagtaataataggtgaggaagggtttgtggggggt

SEQ ID NO: 25729 - DNA, 359 bp, Glycine max
tgcagagtcctgttttcagacgcaatgaatgatgggtgtttccctcgtgtagattataataaccgtgatgatatagttgaattttctggatccacttcattttgtcaatcttgtaatatccagatatctgaaactggtggaacctcaacttcacagctaacttgtcctcagtgttctaataattatgaaggaatttcatcctcccaatctgtccctctagtactttctgctagtgatgataggttggggcctactgccaacggcaatcaattatttgggatggaggatcaccactttgtctccagagcatgtgctaacttcacttatgtcaacaacatatccagttcttgtgttgatgg

SEQ ID NO: 25730 - DNA, 307 bp, Glycine max
aatgtagagagggagagtggtgaggtgagcgttgttgttgagcagaagagaagagaattgaatccattccagatgtcatattgttggcacatacacactttggcgagcaaggctcttgttccaattccacagtcacagggcactatctgtgtgggtctgagtcagagtcagagggttccttgttctccgtggtggagacatactcacaataccaccagtatcaacaactatcccagtgtcagatgtgatgatgaaggaatttctaaaatacgagtgccagacagaaacacatccctgtttcctagac

SEQ ID NO: 25731 - DNA, 342 bp, Glycine max
gtacaagaatagtgacagcttctcatccttgagttctgagagtttgcacctttgcactgagggacttggctttgagagttcagatgatgttgaagacttcaaggatggaatgagtgagagttgtgaagtgtataaggagaaagagggtgtcaaaaggtgtgtgagttcaagggtgagtgagtaccctcctcctatttcttgcatagggaggagtgggaagccttgggtgtgtttcaggtcctacagaagtgaagggaggtttgttcttgaagagataaggattccaacacatgagttcttgcatgcttgtagagaggatggaaggctgaagctgcattttgt

SEQ ID NO: 25732 - DNA, 293 bp, Glycine max
gcttctgtgcgccttgacagcagcccacatagccactatgactatataccccttcagtcttgctgcctatgcctgcttctgtgagtcttgagagctaaattgtacttcgagcctttggagctgaagtctatctcactgaccctgccacaggaaccgatgcagttcttaggaaggccgaggagatagtgaataacacgcccggaagttacatgctccgccagatagataatcctgctaatccaaaaattcattacgagaccactggtcctgagatttggagagactccggaggg

SEQ ID NO: 25733 - DNA, 400 bp, Glycine max
agaagagaaagacaacgaagaaatattgaggcagggtgagaaaaaggaactcgcgaagcaaggcatatgggatcagataaaggaaattgtgatgttcacaggaccagcaactggactttggatatgtggaccacttatgagtctcatcgatactgcagttattggtcagagaagttcaatcgagcttgctgctttaggtcctgctacagttgtttgtgattacatgtgctacgtgttcatgtttctatcaattgctacttccaatatggttgctactgcccttgccaaacaggacaaagaagaagtacaacatcacatatctgtattgctttttgttgggctatcttgtggcattgcgatgcttttgttcacatggctatttggtgctgctataataact

SEQ ID NO: 25734 - DNA, 417 bp, Glycine max
gaggtctaagatcatgtcagcacctacacaatatcatttctcttctctcttcacccttttcatagttttgcttcaccactccaacgctgacgttggcaccgcttctcgttactcccctccatatttaccatccgggtgctacggtaccgaagcgacgcagtttccgtcgagcaatctttttgcggcggcgggagatggaatatgggataacggagctgcgtgtgggaggcaatacctagtgaggtgtataagtgcggagcaacctaggacttgcattccagaccagagtattcagattaaaattgttgattacgctgccactgccgtgtcgccggcttccgccggcggcaccaccatggttctttccgataaggctttcgggactatagctaacatgtctgccaccttgatcaacat

SEQ ID NO: 25735 - DNA, 502 bp, Glycine max
cgaaaaagagaatagatatttggttttgtttgtttctgtggtggatccgcgttctcacaccagttcggcatctggttaggtcgatttcgtttttccggtttggatatggattcggaggatttccgatccattctggagagcgcgggcgtggacgtttgggccctcatggacgcggccatcgcggtggcctccgccgaccacgctcacgagttgaagcgccggagagatggaatcgttgagcgcctttacgcggccagttcaccgccgccgctgtgtcggaactgcgacgccggcgacgggggagaaatcaggacgcagagcagtccctccgcggaggaggaaaaggatccctacggaggcttgttcgacgacgagcaacggaagattctcgacattaaagagcaactcgaagaccctcaccagtccgaagattcgttggtggagttgtgcagaatctagcagacatggatattacattttcagcgttagaagagactgacat

SEQ ID NO: 25736 - DNA, 241 bp, Glycine max
gtggggtgtataggaatcctgtcatctgaatataccatcatattgcatgattgtgaaaaggtggtcttaacctttttgggatttagggttgaaaaataatgcatattagatagacatgactgaccctaattatatattatagcatcctagctagaaacttcttaaccaacaagtaagcttttttttttctttcgtgcttttgaattactcttccttctataaattataattatatcactct

SEQ ID NO: 25737 - DNA, 488 bp, Glycine max
gttggaaagttttatgattctgcagaaacacagaagtcaggctccaggatccagcctctttacatagtactgtagcagagcctagaatcattgtgcaaacaacaagtgaagtggatcccttagatgatggatctccatggcgcaaatatgggcagaaagttgtcaaaggcaacccatatccaaggtgatattggtttcccccctacactttgattgcttatatttaatgaataattatggatgagcattatcattgtctgctaagtgacaagtttaagtgaaaaaaaggctcaccgtaaataaagtatgaatggacaagttcaacaacgtaagtttaacatgagtttaaaatgagtgaaaaaggctcaccattacaaattgctcccatagtttaaaatgcagtataaaaaggttaatctataatataagttttgtcccgcacatacttatgtatatgaatatttccccacagcataaaatttctggat

SEQ ID NO: 25738 - DNA, 346 bp, Glycine max
tttgctgtcatggttatcacacaacttgtctcatggattcatcttacactagtagtaacaagaaagaggtccaagccacgaccctagaggcagaaacgtatgatgattacaatggttatgacgatgatgctagtgatgacgatgaagaagccaaatcgggtggtcctcgtatgcgttgtatattgtgtactactgctgctagttgagtgtgtttttgtatgtgtccccagtttgtgtttgcatggttaatgttttagttcaaagttccatgcccaacgagcatgtgtggtttcttttgttgtcatttttttttatcaatataatcatgcgcccctatttttttttt

SEQ ID NO: 25739 - DNA, 728 bp, Glycine max
aagatcttatatttttggatgttgcccttgattctacagttagaacagctgtggaaagaagttatgaggaattaaacaatgctggacctgagaaaataatgtacttcattagcttggtccttgaaaatcttccactgtcatcggatgacaatgaagatcttatctactgtttgaagggatgggatgttgccttaagcatgtgcaagagtaaagatactcatcgggcattgtacgcaaaatcagtccttgacagaacccgccttgcactcacaaacaaggctcatttataccaggaaattctgcaaccatcggcagaatatcttggatcactgcttggtgtggacagatgggctgtggaaatatttactgaagaaattatccgtgctggatctgctgcttctttgtctactcttctaaatcgactggatcctgtgctccgaaagacagctcatcttggaagctggcaggttattagcccagtggaaactgttggatatgttgaggtcatagatgagttgcttgctgttcaaaacaaatcatatgagcgacctacaattttgatagccaagagtgtgagaggagaggaagaaattccagatggtacagttgctgtcctgacacctgatatgcccgatgtcctatcccatgtatctgtacgagcaagaaatagcaaggtgtgttttgctacatgctttgatcccaatatcctggctaacctccaagaaaat

SEQ ID NO: 25740 - DNA, 474 bp, Glycine max
agtacttaagggaacaaatgagattgaacaatgggaaactcaggcttcaacactctttgctgaacttcagatttcttctgtcaatgaaacattattagagggaaatgtctgtgagctagctgagatgtttcgtgttttacatactgagaaaacagaattgcaaagaatggtggaaaatctgaagattaaatatgatgaagccgaagtgatgcttgaagaacaggctaatccaaattttgaaattgtccacagacaaggatcatcaaaatgaagagctcatatgcctgtgtgaagtgaatcagaagttggagtctgaaatggggtacctacgtcaagagcttggagatactaaactgagggaaaagaagctaggtgatgaagtacttaagagaacaaatgagattgaacaatgggaaactcaggcttcaacactctttgctgaacttcagatttttgctgtcaatgaaacattat

SEQ ID NO: 25741 - DNA, 715 bp, Glycine max
accacatcctctcacttcttgattcagaggaagaggactcaacacaagacctctcccctctcatgacaaccctccaacaagaaatcacttgtgcctcctgaaataccctagatgcccttttggtgtgcccaactcaagaaaatgaccaaaacaccctcacaatcactagtttagaggacaataatgcaacaacctcacaagttttgaaggaagatgaagagagtgacaaggagagggtcatgaaacatctccttcaagcctctgatgatgaacttgggattccaaatagtggggatgggttatggggttttgaagataatgaatttactagtggggatggattttcttctttgtgtgacaagttgtgggagcttgaagatgaaagagctaactactatgctttcttgcaatctgaactcttcctaggggggtattaggatagtggaaattattattacctgggtgaaattctggatgagaaaaaaaaaaaagaaaggtgataacatagtatgtaggctcaaagatggaggaatattttttaaaattttatttagtttgattttttaaggcctcttttgtaaagatcacgggaagtctatgttgtcattgcttattatctacagttaggcagtgccacttttgcaggtcaatctgtacttccgcactggaaaaattaattagatactcacattaaaaaaaaagggaatattagact

SEQ ID NO: 25742 - DNA, 516 bp, Glycine max
  unsure (1)..(516): unsure at all n locations
ttttcctctgtccaaaaacactccaagtgaccgactgacggtggcggcgctcggtggtgacggcggcgccactctgttcagcgacctaacattgtaaagcgataaatgacatggcgttcagagggaaagagatgttgaagaaagttctgaagacagtgggagagaacggtttgagtcgaagagaaaaggaatcgttggagagatgcttgcctcgaagcaagattgtgatgaaccgcgccaaacgcggtctcttcgccgggaaacacattcagtttgggaaccgtgtcagtgaagatggcggattctaaacttgttctactaaaaggatttgtggngagtgatggtctctatcagttccctcaacttcttgattctatgcccaagtgcaagcttccttcaaatgtttgcaattctgttaaagcttctgtacaaagtcctgttgtaaatacaatcactagtgactctgattttcaatgtttcatccaataaagttgttgtagataagaatgttgtaaa

SEQ ID NO: 25743 - DNA, 416 bp, Glycine max
  unsure (1)..(416): unsure at all n locations
ctaacattgnaaagcgataaatgacttgtcgttcagagggaaagagatgttgaagaaagttctgaagacagtgggagagaacggtttgagtcgaagagaaaaggaatcgttggagagatgcttgcctcgaagcaagattgtgatgaaccgcgccaaacgcggtctcttcgccgggaaacacattcagtttgggaaccgtgtcagtgaagatggcggtaacaagtcaaggagaacttggaaacctaatgtccaggaaaagcggctatttagttatattttagatcgtcatgttcgtgttaaaatcaccacccatgccctacgatgcatagacaaggcaggtgggattgatgagtacttgatgaaaactccttatcacaagatggacactgagatgggcatcctttggaaggcaaaga

SEQ ID NO: 25744 - DNA, 271 bp, Glycine max
cttctgtgctgagtgatagtgaagatcgaatctttttgtaggtttagttgtggcccttcctttttggtctgcgatcttggctggtagctgctgctagccaacaagataataaggagtatcaattgctgttttagaattagaaacccagaatcttgtgattcttttattctttaaagggtatttgaatttatcttatctgtctctagtttcagtgttcatttttgcatttatgaaattttaagctattggggtggataagacagcatcttat

SEQ ID NO: 25745 - DNA, 121 bp, Glycine max
aagaaagaaaggcttgcgaagcaaccccacatgaagcgtttctgctcctgcgctgtaagacactacaccaagtggtagtagtagtaacagtgacaaagtgaagttctgcggttccactcaa

SEQ ID NO: 25746 - DNA, 370 bp, Glycine max
gttaagttttcgcttcagcaaacgcagcgttgccgtcgattccctctgcgttttggagcttcgtgttgtcgtttaacagatcggagttttcctcgccatgaccgaaaccgaagctttggaggatgcgaaggaggtggtggtgttggaggaagaagagtgcgcggagaaaatggtgtacatgtggggataccttcccggagcctcgccggagaagtctccgatactgtctccggcgccggtgaatctctccgatcgttcactcgccggagattcgtggaaggacgtgtgcggcggtggttgcggattcgccatggccatctcagagaaagggaagctcataacgtggggttctgcggacgatgaagggcag

SEQ ID NO: 25747 - DNA, 718 bp, Glycine max
ctttattttaaaaatcacttaagaaaaaacgcacactttgccaactaaaacagtaaaacctccccaacaacacgcataaattgacagaaaactacggcaccagaaggttctgattctgaattctgagctttctagttttcctatcatccaatctctttagttagctcctgctccttttctgccagaagcttcaaggaaaaacaaagaaatgagacttggatttgcttcttggagattcatcctatgcaccctagttgtctttttgattctacaagacagtgtagctagaaagatagctacaacatctgggaatgaagttcaactgaaggaagtatcctatgatttgcaaaagcttgcaacagagggtcttgtacttgacagtattattcagcttgaaggcgctgatataaaaaggaagaataagcatgtccataaagacgaggctagagtgaagaaaggaataggatttgacatagaagaagaggaggataaaaatgatcacaaaaagatagttggaaaggatgtgcatggttataagccatctcatgaggatcacaaacacatggaccttgaactgaatgtgttcttcaccccaaatgatttgaaggttgggaaaataatgcccgtctatttttccaagaaaaactcctcaacatcttcaaaatttctgaccagagaagaagctgatcagattcctttctcatcaaaacacctacca

SEQ ID NO: 25748 - DNA, 320 bp, Glycine max
ccaggagcgcataactagtatactgtatacggcgggatcggattcgctgaggagaagctgtctcatcgaacgacgtcgctttggtgtcctcggagatggagaagttcctgtgcgagttgttgctggattcctcgcagccaatttccgagcgtttcagagcgctcttctctctccgcaacctcaaaggccccgtccctcgcaacgcccttatttgcgccacaagggattcgtcgaatttgttggcgcacgaagctgcatttgcgttgggtcaaatgcaggatttggaagccatccctgctttggcctcagttctcaatgat

SEQ ID NO: 25749 - DNA, 721 bp, Glycine max
ctttagtgatttgagcataactagcagcggacctggttttggaagtggctctggttttggattgagttctgatgttggttccttttctaccaagtctaaaggtggtccaacttcatctgccactgctccaccaaaaggtcttggaatgaagcttggtaaatctcaaaggacaaatcagtttttggaatcattgaaagcagaaggtgaggtcattcttgaacatgttcaaccaaaacttgctcaggcagctgccccaccatctacagatcccatttctttagctgttgaagagaaactaaatgtgacactagaacgagatggtggagtcagtaattttgatgttcaaggcacattgtctctccaaattcttgacaaagaggatggacatattcaagttcaggtccaaactggggagaatcaagccatcattttcaagacacaccctaacatgaataaagaattatttgccaatgaaaatgtactaggtctaaaggatcccaataggcctttccccacgggtcaagctggtggttctgaaggtgttggtcttttaaagtggcgaatgcaaagcactgatgagtcaatggtgcctctgacaatcaactgctggccctcttcttctggaaatgaaacttatgtcagcattgagtatgaggcttcatcattgtttgatttgcggaatgttgtgatctcagtacctcttccagctcttcgagatgca

SEQ ID NO: 25750 - DNA, 343 bp, Glycine max
aatgataaagcttgaccgaatctgcagggaggcgaatgttatgttgatctttgctcgctcatatggccttacagggcttagtcgaattagtgtgaaggagcatgctgtgattgagtcaaagcctgaccattttttggatgatctccggttaaataatccttggcctgaactcaagagatttgcagatgacattgacttgaatgtgcaagatcctgtagctcataaacacataccatatgttgtcattcttgtcaagatggctgatgagtgggccaaaagccatggaggaaggctcccatcaaccagagaagaaaaaaaggagttcaaggagcttcttaaggct

SEQ ID NO: 25751 - DNA, 461 bp, Glycine max
caaaagcaagccctaagagaaccaaggtaattcagtcataatctaccttctgaatggagcttggagatagcagcaggaggagcaggttttcctcttatgagagagagtggcagccataagcttggtggttctagctgtggcgtctcctctctatatagaccatagaccagagagtgagttggaagatgatgagcaatccctaagctttgctttttggttgcccctgctgctctttgtattgataattgccatagctttatcggcttttctcgaccggaacttcaccaggttcgatcgtcactggattcatagagttggtggttcttctggtggtattgttttgattcttgttgttctctttctagttttgaagtgtaaagcgtctgtgtaacaagctggcatgctcaaactctctatagtaagatgatatgcaacaactttttttttctgttgtgtttgtg

SEQ ID NO: 25752 - DNA, 444 bp, Glycine max
ggtgaactatctgttactctggtggatgctcgaaagctttcttatattttttacggcaagacagatccttatgttattcttagccttggaaatcaagttatacgcagcaaaaagaacagtcaaactactgtaattggacccctggaatgccaatttggaatcaggattttcacatgcttgtttccaaccctagaaagcagaagttattcatccaagtaaaggacgctctaggatttgcagatttgactattggtacaggagaggttgatttaggatctcttaaagacactgttccaacagacagaattgtggttttacaaggaggttggggattcttaggaaagcgctcttctggggagatattacttcggctaacatataaagcatacgtggaggatgaggaagatgataaaactgaggtggatgcgatttatactggcattt

SEQ ID NO: 25753 - DNA, 273 bp, Glycine max
acgatgacgaggcaaaattgccggtgtcacaatcggttagcatggttcactccagcaccgcaccgtaccgccggcgggttttccagtgtttgattctcatttctcacgcgctccattttctctctctcgttctctgctttccctctcactctctctgcgcattttccgggatgaatcggagctgaatctgaatctcatcgaactcgaattgcgttgccggatccttctgcggcctgagaagagagatagggcggcgctccgctccctcgcggc

SEQ ID NO: 25754 - DNA, 258 bp, Glycine max
cttttgataaagaagttcaaataaagacttgttcaaaactgttgaaggaagccaattggtgatgaaggcagaagtgtagacacaatacccccaaaatgagataggcacatgtgattggaattgtaaagatatggccactttaaggagatgatgatgttttctttcagctatggagttttgctgaggtcatttccacaccggagaactgaaaagtaacaccttttggtgtaaaagtctgtcatagctaattctatttat

SEQ ID NO: 25755 - DNA, 536 bp, Glycine max
tgcttgacaagcaaccaatgaagattttcaaagaagaatcagcgagattctatgcggcagaggttgtcattggtttggaatatctccactgtttaggtataatttaccgtgacttaaagcctgaaaatatcttacttcagaaggatggtcatgttgtattagctgattttgatctatcatatatgacatcttgtaaaccacaggttgtgaagcaagcgatacctggtaaaagaagatcacgaagtgaaccaccaccaacatttgttgcagagccagttacacaatcaaactcattcgttggaactgaagaatacattgctccagaaattataactggagctgggcatactagcggtatagattggtggacccttggctccccctcccttccttgtgcttgaatacaaattctgtagcatggtttttattattattatagataactaaattagcttctgtagcttcctggttatatttttcaacattaagccctatccctattgtgaggagattattaacagaatgcttacattgcc

SEQ ID NO: 25756 - DNA, 801 bp, Glycine max
caaaataagcagtatagtagtctaaaaaaaaacatcccacacactatcattcaccctagccaaaaccctagaaatgaggatcatgcaagaatctcaatctttcattattcccaccacaattctactactagcactatgctacaccacttcaggccaactctcaccaattcaaccccccacaacatcaccatcactcccatcaccaccactatcccaaccctccccgccgtctccggcactccactccccgccggcaaccgcgccggcgccggggttcaacactgtccctcttgtcccagtaaccccaagtggggcccccacacccaccaccatcatccctaagggccccaccattgacatagtccaaatcctaagaaaagccaaaaggttctcagtcctcactcgccttctcaaaaccacacaactcataaaccaactcaactcacagctcgtaacttcaagctcaggagggttaaccctatttgcacccgaagacagtgccttctccaaactcaaagcagggttcctcaactccctcactgatagacagaaggtggagctcttacagttccacactctctcttccgtcatttccatctcaaactttgataccctcacgaacccggttcaaacgcaggccggtgatgaccctcagaggctgcaactaaacgtcaccacttacagcggtagcgaggtcagcatggccacgggcgccgtcaacgccttcgtcaccggaaccgtttactccgacaacaagttggccatataccaggtggacaaggtgcttctccctcttgacct

SEQ ID NO: 25757 - DNA, 494 bp, Glycine max
ctcgagccgaatcggctcgacaaaaccctttgtttcggttgtgtgttgagggtttggagtggagggaggtgcagagcagaatggttctatcaaacaagaaactgaagcttaagctgagagctgaattagcccaaagaaactccaacgccgccgccgaacccccttcatcttcatcttctactaataataacaactctctcaaaactcttctggactctgccacccctaaagccagattctccaaaagagagaagcgaaggaagcttcgatccgaccaaccttcacaacaagccaacaaggaaattcaaactgaaacagaagctgagggttcgcccaataagaagagaaagaggaagaaggtagagggcgatgacgtggcagcaaatggagtttccgacacaccaaagaacaagaagaagaagcaaaaacagaagaagaacatgaacaagaacaagaagaaatccacaacggcggaagaaaacgaatctaatggt

SEQ ID NO: 25758 - DNA, 337 bp, Glycine max
gacaaagtgttgaaatggctggatgagcagccaggttcttctgttgtctttctttgttttgggagcatgggagggtttggtccttctcaaacaagggaaatagcactagcacttcagggtagtggggtaaggttcttgtgggctatgcgttctcccccaacctcagacaatgcagacagaaccttaccagaaggtttcttggaatggatggaggaaggtaaaggaatggtatgtggatgggcaccccaagtggaggttttggcacacaaagccattggggggttcgtgtctcatagtggatggaactctattttggaaagcttgtggtttggggtac

SEQ ID NO: 25759 - DNA, 262 bp, Glycine max
  unsure (1)..(262): unsure at all n locations
tgcaattcacgttgacgtcttgcccttctctcttcaactcctcacacaagacatccccatccatggctgnctccgtctccactgtcggagctgtccccagagctcttttgaacctgaatgggtctggacctgggccttcagctcccagttcatccttctttgggagcagcttgaagaaggttattggctcaagggtccccaacacaaagatttcctctggaagcttcaagattgttgctgtagaagagaagaaagagattga

SEQ ID NO: 25760 - DNA, 465 bp, Glycine max
gtcacgtgcttctcttggtcaagactttgtatttgtgcagattaggagcttgaaagcactttaacttcttaatacatggcttgtcaaatgggaactatgactctgaactggagattatcaattacagagaatgaaagctctgaaaagtcatgtgtcaaccttgcaacttccagaatccacagctgttgctgtgagccaaattttaacgggctaactctaaaagcttgcatgaaatcttcaccttttgctcagagctgtttcctgggaagaagagctgggtggaaaatagcttttgcattgaacacaggtggagtgtctggaaatggtgaccaacaaagcttcaacgaagccagttccaatctcggtggtactcgattgggtaggatattgactgcaggtggcagacaacttctagaaaagctgaactcagctagaaagaacatccctttgaaagtattcctgcta

SEQ ID NO: 25761 - DNA, 278 bp, Glycine max
ctcgagccgtttagagagaagatgactattctctcagccatattttgctgcttcaagtcaaaggaagaaaagagctctatggtggaagcaggttctttatctcggaaacccaaaggagatcctcagcgatcttcagctcctattgttgtttcttatttcccagttaactctcatccttctcgcttgtagtttatgaaacaccgacacggacacctgtaatgtccaaaatatagaacgtagtacaggtgtcgtgtcggtgtcgaacactgatactgacg

SEQ ID NO: 25762 - DNA, 646 bp, Glycine max
gtctttctctaactaaactaaactcatttcacttctctctccaacaatgacttgagatctgggttttctccggcgaattttcggcgccaaaaaaccatccgattccaaatccgccaagaaaagatggcccttcctcaaacacaccgtcacgaacaagtcactcccgccgccaccgccaccctccgccgtcacttactttgcttcctcaactcccttggacgccaacaagcatgccatcgccgtcgccgccgccaccgccgccgtagcagaggctgctctcgccgccgcccacgccgctgccgaggttgtcagactcacaagccgcggcgtcgccgccacaagcaccagccccagaaccgctgtcacggcggcgcgtgttggcaaccttgagaccgccgccgttacgatacaatcggcgttccgtggttacttggcaaggagggcattgagagcgcttaaagcattggtgaagttgcaagcattggttaggggccacattgtgagacagcaaagtgctgatatgctgaggcgcatgcaaacattggtgcgacttcaggcccaggcacgtgcaagccgtgcgcacttgtcggatccttctttcaacttcaactcttccctttctcactatcctgtccctgaagaatat

SEQ ID NO: 25763 - DNA, 376 bp, Glycine max
gagaaagtggagggaatgaaatgaaacactgaagaaggaacggtttaaggcaaaaaaacggaaaacgcgagacgcaagcgcaaaagcacggaataggagcgattaagcgaatctcaatcttgattatcgattaacagtggtcgatgatcgatgccaaagatgaagcacctgctgagaaagcttcacatcggtggtggcgctgccaccatcaaccccagtcccaatcacaacgcattgtcgtcgcacgctcacaatcacactccccctccctccacttccacgctcccttcccccaacgtcgtttcggatcggagccccgtcgtcgtcgaggcccaaaacgaagtcgccgatttcaatttgttgcaggaggaggagt

SEQ ID NO: 25764 - DNA, 472 bp, Glycine max
attggaagaacttttccaaggtcgtccatttgatatgcttcatgctgctttatacagatacagttgccaaattccctgttgatatccagccatttaaagatatgatagatggaatgagactggatcttaagaagccaagatacaaaaactttgatgaactatatctttactgttactatgttgctgggacagttggtataatgagtgttccaatcatgggcatttcaccaaattcccaagccacaacagagagtgtatacactgctgcctcggccctaggcattgcaaatcagctaaccaacatactcagagatgttggagaggatgccagcagaggaagagtgtatcttccacaagatgagttggctcaagcagggctttccgatgaagacatttttgctggtaaggtgacagacaagtggaggaacttcatgaagagccaaattaaaagggcaagaatgttttttgatga

SEQ ID NO: 25765 - DNA, 274 bp, Glycine max
caagaaaaaggataaaaagaaaagtctctgtcgtccttcgtcgttcgcgttgatctcagattcagtcttcgccatggcggagggtgcttcttacggattgcgtcgtccattagatattcagcaattacaatttgaagcccagcatcgatggttgcgccctgcagaaatttgtgaaattcttcgtaattatcggatgtttcatatcacatcagagacctcataacaggccaccaagtggttcactttttctttttgatcgaaaagttttgagata

SEQ ID NO: 25766 - DNA, 389 bp, Glycine max
ctttcttgatgctggcttcagagaacagggaactggggaaaaaaatatcaaaaggattctaatttgccagatgagtttattagaggactttcaactgcccatttttctggaagggctcagattgtttatgactcttctccaaattctgactgctcagaaatcttgtctaaaaattgtggtggagagttgatattttatttggatggagctcatagtccagagagcatggagacttgcgcaaagtggttctctaatgccgtaaaaagatatgaaatttcatcacattcatcttttgaagtagaaaatgcagaggaatctttagaaaatggtcacttcctacatgaaagcaagacattggagcagctggagaaatcttttaggcggattct

SEQ ID NO: 25767 - DNA, 775 bp, Glycine max
tgcacactggttggccagattcctggatttagtggcttgtccaatgcaagggtaactctttttggggatgtctatccacttccagaagatcaacaggaatgggctcataagcagtatattgcaaaacatcaacagggtccttctcaacagtggggcaacttctactattttaggatgcagaatataagtgacatatatttcattggaggctttggtactgttgcttgggtggatgtaaaggaatatgaaacccttcaacctgataagattgcagttgatggtggtgaacagtatttaaaggaactcaatgctatcttctcaaagcccctaaagaagcttctatctaatgagaccgaggtagatgacgctgcactcatatctatagacagcaaaggaactgatattagggtccgtcaaggtgcccagttcaacattcagaggatatcatttgatgaaggacagagtgtagaaacattggaagaagctaaagctgctcttcggaaattaatacacaaaggaaaagtgtacaatttgcagaaataagatgttggatgtcctcttcccctttgactagagtagacaacaagatatggaaccatgcgagtttctaatcggactttagaatggttaattttatacattttgcctggttgacatgcaccagacagtgtattatatccatgcatctgcaagcatatttgctaaagtctgatcgtgagaggactttttgtgggctataccaccatagtcaaactagaataaatatatcagaact

SEQ ID NO: 25768 - DNA, 288 bp, Glycine max
ataattcgtggtgtttgttcttcttctcttatcaaagtacataacatagcggaaatttcacaccagagacatccactgcaatgggaagttattttctgaaaatcatgtttgcagtgttgactgcgcttgcttttcgcataccatagtatccattcttggattcaactcaccatcacagagctcacatgtgaaatgcattgagagggagagacaagcatcctcaacttcaaaaaaaagtctaagatatctcaatctatcagtgttgggtttggtgggaggattcctcat

SEQ ID NO: 25769 - DNA, 381 bp, Glycine max
gttgcattgtttctgataagagagaggtcaaggagtaattctctttggaagcattacttcagcgttctgcctaaggaaactgactctactatatattggtcagaggaggagctctcagagctacaagggactcaacttctgaacacaactaggagtgtgaaacaatatgtggagaatgaatataggagattggaggaagaaattatactccctaacaagaagcctttcccttctcctcttacacttgatgacttcttctgggcatttggaattctaagatcaagggcattttcccgccttcgctacgaaaatctagttgtgattccatttgctgacttcataaatcatagtgccagagtaacaacagaagatcatgcttat

SEQ ID NO: 25770 - DNA, 229 bp, Glycine max
cttctctctctctcttttttgctctctctagttcttcattttctccaccaagccattatgaacatcaataacgtgttatagcaatagctatattgaaagtaagagaaactaacctccaagcttgtcatattttttattcttttttttttttgggggggggttttttgggttccgatgggaaccggcatggggaagctaacggtgtgcttcaccggaaacggaggagggg

SEQ ID NO: 25771 - DNA, 532 bp, Glycine max
aattggtgaacataatatcatctgcttcctcctcttcctccttcaagtcgaaaattgaaacagaattaaaaaccaaacactaccctgttgctttggtgatagcttaaaactcaacaagtaaatgattagactaaatgtctactgttcgctaattccaagtgcaagacaagccagacctggcagcagctatggctccttgatcatccataatcacaaagcttcaaaattttctcatcggatttccatcaaggctaaggccataaaagatgagatggacggagaaacaagcggatcttcaggacgtagctgggatcctgggttggaaattgaggtcccttttgagcagaggccggtgaatgagtactcatctctaaaggatggaatcttgtattcgtggggtgaactaggtccgggatcgttcttccttcgccttggaggtctctggctggcagtatttacagttcttggggggccaattgcagctgcaagctttaatccttcaaaagagcctctaagatttatactagctggt

SEQ ID NO: 25772 - DNA, 701 bp, Glycine max
gatctaaattatcggaagccgataagcatattgaccaaactccacctgatgctcgggtgcggtatctaaaagatcagctcatccaggttagggtatacctttcccttcaggcagtaaggaacaatccccatctcactcgagagcttcgattacgggtaaaggaagtctcacgaacactgggagatgcaagcaaagattctcatttgcccaggaatgcaaatgagagaatgaaggcaatggagcaaacattgatgaaaggaaggcaaattcaaaatgattgtgctgctgctgtgaagaagcttagggctatgctccactcaacagaggagcagcttcatgtgcacaagaagcagaccttgttcttaacacagttgacagcaaaaacattgcctaaaggtctccactgtcttccgttgcgccttacaactgagtattatagcttgaatacttctcagcaacaactccccaaccaacagaagttagaaaaccctagactataccattatgcaatattctcagataacatattggcaacagctgttgttgtgaattctactgttgcccatgctaaggacacctcaaatcatgttttccacattgttactgataggctcaattatgcggcaatgaggatgtggtttttggtgaatccaccaaaaaaggcaaccattcaagttcagaacattgaagactttacatgg

SEQ ID NO: 25773 - DNA, 322 bp, Glycine max
gtgaaaacatattgggtgattaatctaaatagcttatgagtatgattataattcaggggagagagggcattttgcagccgtgaatgccgtgaccagggaatgatgttggaggaaggtggagatatgcatatgggacatagttgagttcctttcccgatgctttgcttcaaagagcttatatatagtaactgtttcacttttattagttgccttgccttgattcatttttgggacataaaagtggtccttcccttgaagatcctggatcactgtacctggttttgttctttctctttctcggtggtagtcctgtagaaggtga

SEQ ID NO: 25774 - DNA, 516 bp, Glycine max
ggggagcgtgtcgtcgtggcggcgagggttgaaggattttgatgatagagagagggtggtgcgttctcccaagggtttgagggatgtgaagtctccgtcgtggtcgaaggattctgtttctgagagcgagcaatcgaagaagaggtcttcttcttctccgagaccattcagagatggtaactccgtcaagtctaagtccaagtctcccacttggtccaaggattcggagagcgagctgtccaagagtgttgaggtgaagaaggttgaggaggagttgttgcagcaggttcagagtgggagtgggagtgggagtggtagtgagatggagagtagggtgagcttgagcctgaaccccaagcggaaacggttcctcccgtgaccgaaggcctgccctctgttgctatggagactgatgagaagcaagctcagaagaatgaatgccaccctaatgatgacagcactgatgctgctgtggatgagagacgggagttgtccagtaaggaagaagtgatacct

SEQ ID NO: 25775 - DNA, 484 bp, Glycine max
cggctcgagacgatggtcatcacaaccgcattccaccattgcacacttacaagagtcaaggcccttgcatagaacatctttatatcctgacaagcagcaggaatttcctcatctttctagtgaaccaattttggtaccgaactcctcatttacttcttatcctccacctggtggtagatctcatcaggcttctccaagtcagaattcaggccacttaaaccttccttatcatgctacgggagctcagatggcactatcaccaccaaatcgatctcatttccccaattctgcattacagttgagtggattttaccatgggtccaccttttggtggaaacatgcgtcaatttcctactggttcccctcttaatcagatagtacagaatcaattggtaaaccaggcaggattatatcctggagatcatcccaatatttcatcaggtttacccatgattaacaaatatgaccagatgcttgggctgat

SEQ ID NO: 25776 - DNA, 292 bp, Glycine max
ggaaacagtttaagaatggacattatgcatcctgcttttcataccttgtcatgatctttattgcaaccatcagttttagacataagtttattttaattatacatttccactcagttatggatgaattttattgaggtggcatgctatccttagacaatccacttgttcatttttggatctgttagaatttaccatatgttaaccatgtaatgggtaggttgtcaactgttatagttagcaaaataatatctctaattgaaggatgtattatcctgtaggtactctcttaatg

SEQ ID NO: 25777 - DNA, 586 bp, Glycine max
atctaccatttagccacatggagcatcatcacctaagacttattctcctactcttgttcctgttcctacccaacacctgcttctctttctcatttcaaactccttcaagcaatgaattctcgaatcaaagttcttcctctctgaagcagcagattctggagctagctaatagtcccagcacggtgaaatggatgaagagaataaggagggaaatccacgagcacccagaacttgcatatgaagagttcagaacaagtgctgtcataaggcgtgagcttgacttgttgggtgttgaatacaagtggcctgtggctgggactggtgtggtggccaaaattggttatgggtctcctccttttgttgctcttagagcagacatggatgccttgccaattcaggaaatggttgattgggatcataagagcaaagtagatggaaaaatgcatgcttgtgcacacgatgcacatgttgccatgctacttggggctgcaaagatactgcaagaaatgaaagacatgttacagactactgttgttctaatatttcaaccagctgaggaaagaggcacaggtgcaaaagacatgat

SEQ ID NO: 25778 - DNA, 454 bp, Glycine max
gtgacaaaggagaaaacctttgatcttcaaccagtgtcacctttttcttctggtgtaggtttgccatatgcacctgaagggtggcctaatcctggtatgtatggggctggaaagtggcaaaaaggatgaacaattctggatattttactgatagattccttactcttccaagatcacttgagaagtctcgtcgcaaggcagagtttcgaagcaaggctgatattagtagatatcttcaatcagattatcctgacatgaaaattgaagcattctttgctttatttagctggcagattccctcaactcagcaaacccctacaaaagttagctcaaaacagtttcacaattttcttttcaacctagtgttgctattttctcattcatttttgccttgttttttttatttttggtattgtcttgatttgctgtagtttaaatctttcaattttttcct

SEQ ID NO: 25779 - DNA, 261 bp, Glycine max
cattgagagcccatggccgccttccatggctgccatagccatttgcacacacctaagttgctgcacacccctcctccctttgcacatcctactcaattccttgggattgattttgaaagtacccgccaacggttgctgagtttgttcgattctgagaggacccctccttcatttcaacaaccaccatacaaagcttccatggctgtcgtccatggctgccacttgccgtacggagcttccaccttccactaccaccattcc

SEQ ID NO: 25780 - DNA, 308 bp, Glycine max
ctcccactctcacaatccctttctctctttctattttcactccggctattacttattagcattactctcttttgctctgccttcccgccaaattccttctctgtgttcaccaaggattcaaggttgagcgttgcattcttgaaccttgttgttgttgttgttgttgatgtgagtggactcagatttcacttgaagcgcatccaaagttggccatattctcttccccctagctctctctccctgggactatacctatagagacgaaaagcaaaagttgttacccataaaacaccttggtttttctttct

SEQ ID NO: 25781 - DNA, 545 bp, Glycine max
aaaacaaagtgaaaaagactgagtgcgagcatttgctgacagataatgataaccgccaaatttcagttatatgaatgcaatatctaaaattcacaatattgccatcccgcacaagaatctaacacttgctcagcaaaatttatgtaaaagcccattcaaggcatacaactgcaacatatcctgaatggcaggatgtccttacatttcatatataaataataatgtaaatattctacccgggatctaaaacgaccaactgtatccaggcccacctaaatctccatcaaaacctcccgaagatttttgtatacattcgtgtatgaatcctccttattaccagcagttgaagcaatctgcttttctttttcccattctttctataataatcttcgggaggttttgatggagatttaggtgggcctggatacagttggtcgttttagatcccgggtagaatatttacattattatttatatatgacatgtaaggacatcctgccattcaggatatgttgcagttgtatgccttgaatgggcttttacat

SEQ ID NO: 25782 - DNA, 231 bp, Glycine max
cttggggagtttggtggaaattcattggcttgtggtaagaggccaattatttaaatttgcctacacagaatttctaatttaagatttttgtatacattcgtgtatgaatcctccttattaccagcagttgaagcaatctgcttttctttttcccattctttctataataatcttcgggaggttttgatggagatttaggtcggcctggatacagttggtcgttttagatcc

SEQ ID NO: 25783 - DNA, 518 bp, Glycine max
gttgaggcagtatcagataatgagacagacttcgacagtgatgatgatattgttggagaagccgtatatgatgaagaatatctcaagaaacgcaagcagaaaaggatgtcttctagtggctccgaaggagatgatgaagagtatcagtgggacgaatacaatgttgaagatgatgaagaagaagatgacgacgacgatgacgattccttgagcatcagtgaggatagtgacaagccccgcaaggtcaaacagctgcagttgcgtggccgcacaaggagagaaaccaaactcaggtctgtgggtgagatacaatccggtctaagacgcagtaagagggcaactaaaaatcgtataaattaccgacaatgtgaggcatcagaatcagaaacagagttgatcaaatctgagaagtctaattcatcagctgatcactcagatcccagtgagaatggtgaatacatgatggaaagtgaagattcagatggcagtgataatgaagaacaagaaaagaaagtaga

SEQ ID NO: 25784 - DNA, 335 bp, Glycine max
agcttatacagggtttgtctctctcaaacgacaccgtggacgcgggtttcgttttcggacttggttatgttctcaggctcaaggcgttcctcttcccgagcaagtcactgtcccagacccagacaactctgtgaccggggattccattcggcagagattcttgaatttctatgcttcccgcggtcacaaggttcttcccagtgcttctcttgtcccagatgatcccactgttctactcaccatcgcagggatgcttcaattcaagcctatcttcctaggcaagattccaagacaagtaccttgtgctgctactgctcaaaggtgcatccgtacta

SEQ ID NO: 25785 - DNA, 298 bp, Glycine max
ggagttcagagttcagaactcagaagttgggtttttcttccgcttcgctatctatgacacaatttgaattcattgcttctcatatgattgtgtttatttgagaagttgggcgtttcctggatgctggctgttatgaaggtgctattttgatcgaatctgaattataaattcatcaccaatgggttacagatgcattcagtgtgggtgtcctgtcaaaacactttacgtgcagtattctcctggcaacattcgcttgatgaaatgtgagaattgcaaggctgttgcagccgaatacata

SEQ ID NO: 25786 - DNA, 273 bp, Glycine max
cgaagagtcctccaaggcggttgaggttgagcaggaagcaagtgaagcaaaggctcctcacgaggctttgtttcttgtcttgtcatatcttcctgtgtacgaggttgtggtcatgtctcaagtctgcacatcactaagggatgcagtgaacaatgacatattactatggttgaatgttattgttcaaaggcccctcagttggcgactcaacgatgagattctaatcaaaatcacctcaaaggccaatggtaggctcaaaactctcgctctcat

SEQ ID NO: 25787 - DNA, 514 bp, Glycine max
cggctcgaggtttatctggagctattcctcctgagatcagcaacatggctagtctccaagtgttgcagttgggagataaccagttggtggggaatatacctacacagatgggttccttaaagcaccttagtactcttgctttgcaatataacaagttaactggtcaaattcctcttagcttggggaacttggagaagctaagcaggcttaatttgagcttcaacaactttagtggtactgttccagcaacactcgcacatattgagcatttggaagttttagatattcagaacaattatttgtcaggaattgttccttcggcattgaagagacttggcgaaagattccaaggtgcaaacaaccccggtttatgtggggttgggttttctactttgagagcctgcaacaaagatcaagatttaaacgttaaccatattgatacctcagatggagaccaacccgaaaatagtgattcttcaaaggcgctcccggagcctgcatatgttcagtcaca

SEQ ID NO: 25788 - DNA, 894 bp, Glycine max
ttttaaaattttacaatattgttgcaaatcctccaaataaatacatagtcattgtgtagggtacttcagatgaagttgtagattgctcccatggcaagcaactctgggaactgtgtaaagagaagtacgaaccactgtggctcaaaggaggaaaccattgtgatttggagctctttcctgagtacatcaggcatctgaagaagttcataacaacagttgagaagtctccatcgcaacgatacagtttccggcggacacagaccagtttgagcagcctcgaaagagtacagatatttttgaagtaagtagaaagagcactgatcgtagagaaaagccaaggaagagcacagacaagccagaaaagctgaaaaacttgtctaataattctgatatgttagagaaattgagaatgacttttgatcacaaggaaaggtctaggagaagtgtggattgtcatgagaagtcccggaaaagcattgaccatcaattagaaaaagcaaggaagagtgttgacaggctggacagaataaggagtggataataattcttcttatagtgaaattatattcatgcatgggttggttttatggggttctttttcttttttatattggtcatcatgttgtgtagtatggcttatatcagatatgaatactatttagcattgaagaaaagggtttggtgtcatagtgagattcacttttcattcatatggtatggcctatttacctctgttgcactctcccactttatgtgacaaatgctactagcatgttagcacattaatcttttgaaaaatttgtcaaaaatattttatcaaaagatacaaagaaattcttatatttgtattttcatttcttattttagttttagctaaggatcaatgttgtgatc

SEQ ID NO: 25789 - DNA, 402 bp, Glycine max
cattcggctcgagatactacacataactacatcatctcaaaacctagtctgaaaccatagcacaaaatcaaccatgtctccattgattgttgccttggctacaatcgcagcagcaatcctcatatatcgtataataaagttcataacacgcccatccctccccctcccaccgggccctaaaccatggcccatagtgggaaacttgccacacatgggcccggtgccgcaccactccctcgcggcgttggcccgcatccacggcccgttgatgcacctccgcctcggcttcgtcgatgtacgaggttgccgcgtcggcctcggtggcggaacagttcttgaagattcatgactctaatttcagcagccggccaccgaacgccggcgcgaaatatatagcttata

SEQ ID NO: 25790 - DNA, 273 bp, Glycine max
cacacttgttatgattcccttccctagctagctacccaccctatccctcggtactgtccactgtccattatttttgcctacttattaacaacacatacagttctctctttttctctccatccatgactccttattctctgaacccaccaggcccttccatacaagctggtcaatcccaactcttcaatatttctcctaataatcaggattgccgtaccatctttgacatatttgatccaaggaataccaggatagaaattggagggttaagag

SEQ ID NO: 25791 - DNA, 456 bp, Glycine max
gcatccctttaccatagactgctacaaattgagtttcactacacccaactgttaggtgaaacatcaccaatggctgacctaagagaccttagctcttgcaataactaaggcttctacataaccaagctgtaaattgaagaaaatgcacgtctattctaacttattttactactttaaccattgatgttcttctgattttgaagtgaatttaattaacatatggaggctcgtttaagcttttggtgcgagcaatgagtgagctgagcttttatttgtgcagttctgcgtggcacttgccttgttttatatttacctgtattcttccttgggaaggttattctgtaaatggctctgtagtttcctttttcaagtcagtgcatgcgtttggcatctgaaatgtaagttctgaacagattctactcgtaaatggcagatagcttttagtttttacggggt

SEQ ID NO: 25792 - DNA, 670 bp, Glycine max
agaaaattaaattcaacatctctcttattctctcattctctctctacttctcaaagaacgcacgcagcgttctaaaaccctaatcgggtatgtgcaaagagagctttgtagcacgtgcttaaggtatgttttaaacattgcttgtttaattggttccttttgatgtcatggtggcattgtgatgcaaaatgtgtgtgagctcatactgagaaggagctcatctgctaagtccatttgaagaggatgtatggaagggcatcatcaggtcttgataggtttaagaaggctcagaccttggaaccattctctgttgctgtcaacgcttcttccagaaatggtgcccaaccctctagtaaagtagttggccattcatctgctttgcctccacaggctcaggcttcttccaaccaatcccaacaacatgcttctgggaagactgtaggagtggaggcggctccattgttggggcagaatcagcaggcgactcaggttgggggagggcagtcgacgtggcagccgccggattgggcgatcgagccacggccacgtgttttttacctggaggttttgaaggatggccaggtgctagaccagattaatctggacagacggaggaatatctttgggaggcaaatccagacctgtgatttcgtgcttgatcatcaatctg

SEQ ID NO: 25793 - DNA, 643 bp, Glycine max
tgattttgatattgcacgataaattcggctacatattctctaatagcaaagctgtccttgatgaagtaaacaacctttctcttctattagccttcacaattctgctcaacagtgttcaaccagttctctcgggggtggcagtgggatcagggtggcaatcatatgttgcatacataaatttgggttgctactatattattggggtgcctcttggaattttgatgggttgggtcttcaatcaaggagttatgggaatctgggcagggatgatttttggtggcacagcaactcagacattaatattgagcctcattacaattcgatgcgactgggacaaagaggctgaaagagcaaaattgcatttaacgaagtggactgatccaaaccaagaattgaactaatcaagggatactcgctttgtaacctaaatgccaaaggaatccgcatatttgttttaggcttcggtgatattgaacgaaactaaaataattatgatatatgtcattattaatacaatgaaattgtttcatgatagtagtattagcaaagaaaattctatttaccaattttctccagttaagctccagtgtggtctttgattctcccatcactccacaagcattttatgaatacccttgatttt

SEQ ID NO: 25794 - DNA, 537 bp, Glycine max
gtttcgatgatgggtggtcgatgttacagttcatatcgtagtaatgctgtggcagctgtgatgagggacaggaaatggaaatccaattcaaagtcagaagaagctgatgttgttgtgattggtagtggcattggcggactgtgctgtggagcactgttggcaagatacgaggaagatgtgttggttctggaaagccacgaccaaccaggtggtgctgcccattcctttgatatcaaaggctacaactttgattctgggccatcgttgttctctggcttgcaatcaaggggtcctcaggctaatcctcttgctcaggtcttggatgcgctcggcgagtctcttccatgcgctacttacgattcatggatggtccacataccgcgaaggacaattcttgtcgcgcataggcccgacggagtttttcaaggaccttcaacagtatgcaggtccaaatgctgttcttgaatggcggaaacttttagatgctgtacttccattatctacagctgcaatggctcttccccctctatctattcg

SEQ ID NO: 25795 - DNA, 269 bp, Glycine max
ctactactaactccaatctccctatccatgtatccctcttcctcttcctcctcctcctcttcctctcagtccatgacccaagctggcctcactcgctacggttccgcccccggttctcttctcaccagcacggttgattctcttattggtggatcccgtcccagtccctacttttccggagagtcttctgagtctccctgcaaagagcaaagatctttccacaaccaccccccctccttcgcttcctccttgctccgccagaaaagctc

SEQ ID NO: 25796 - DNA, 427 bp, Glycine max
cttgtgggtaccagattggtttcttcattttctattggttccactgcctctgtttcagggggcttctgcaatagctaatgaagaaaccaatcttgtgggtaccagatttggaggaatggcataagacggagagggttatacaaagacagttgcagaaaattggaacaactttcaaccttgaacgtgtatatctaatatttcttgaagcaatttttacatgttagaagtaatgattgtcgagacattatatagtttcctttagaggcctttatcaataacggaagcatttagatgtttcctgctagaacctagaaatagtttggaagaatggatgcttccgagtgagtttctctgtttatctatttcccttttcctttcctgttttatatacttgaaaaatattttcaacgtgatatacctatttcat

SEQ ID NO: 25797 - DNA, 293 bp, Glycine max
ggagaagagagaaagcaagctgaatggaggtgttgcagttgctggcttccgattttaccctccgccattccctttccaagcccaccgtctcccttcctcccactcactcactctccgtcgtcgtgttccggcggcggagatcaccctgcggcgggcggtggtgggctccgcgagcatgcgcggtggaggtgtcggagtcggagggagggaagatggtgatggagctggtgggagccttcaacgagttgacggagagaatgaacgtgctgtcgacgagctcttcgcgtcttctc

SEQ ID NO: 25798 - DNA, 642 bp, Glycine max
ctcagatttcacttttacgcgtcggtgtaaaaccctggaagagagcgagcagtggcaaggaatcttcatggtcgatgctataaaagcgtccgttgtttgagattccatgtttcgaatcgtccaacttgagatcctcacaaaaacttgaatcaactctcctccgaacaaaaaagagaaacacgaaattcataggaagcatccttggttttatatcaatttcaaaggaacgagagaaagaaaaaaaaagcgcttaaattggttattcatggaagagactaaacagcgtgttgctcttcaagagagattgaggatggtgtcttctgaaattgttgaaaaaggtcaaagcagtgaaagcaacaagcaaattctgaggtcaacccttaaggataacgctgctgtggtgcaagagatcaagcaatacaacgagcacttgaatccacccagagaagaaatcaacaccctttttggagaaaaagaaaatgcagatgaagaatttgtttgtaaatggttctccaagtggtgtctatctttgtttctgtgcagatttgggcagaagagggatgattcatttgctggtggtgctgagaagcaaggtcttgtggcaaaagatattgaagagaaactttacaaaatgagagaaat

SEQ ID NO: 25799 - DNA, 478 bp, Glycine max
ctcgagccgaatcggctcgagttcaagtttagatcctaacaaaaagcttgaatcaactgtgctcgtaacaagaaggacacccaagacaaaaacacgaatttcataggaagcatccttggttatttcaaaggaagcacgctaaaaaaagagagagaaaaaaaaaacactcaaattgggttattcatggaagagactacagagcgtgttgctcttcaagagagattgaggatgatgtcttcggaaattgtggaaaagggtcaaagcagtgaaagcaacaagcaaatactgaggtcaacacttaaggataacgctcccgtggtgctagagatcaagcaatacaacgaacacttgaatccacccagagaagaaatcaacacccttataggagaaaaagatgcaaaagaaaaatttgtttgtaaatgcttctcaagtgtctatctttgtttctctgcagatttgggcagaagaggggtcattc

SEQ ID NO: 25800 - DNA, 490 bp, Glycine max
taaaagtaaaattctacatgctcttcttcttcttcttcttcaacattcaactattgggttgcgcgtaaagaacaggaaacagtttagtccggtaaccagaaatgaacgccctcccttcatcttcctcttccaccttcactttcttaactcagtccaagaaccccaatcatctcttcaagttgacacataaagtacccattttacccctacactcaccttctccatgttgctccctcagtgactcgtcctcctcgtcgaccacggtgctggacaaaaatgccctttcacccgaacagaattctcgcattgcaggttcgccagaagactcgagctccaaggaaaacctcgtggttcgccggccggtgacggatttttccggcgaagactccggcaaggaggaggaggaggaggaagaagaagaagatgacccgaaggcttcggtgatcgacgagggtctcgcgagattcgcgaagaagatgccgatgtttga

SEQ ID NO: 25801 - DNA, 432 bp, Glycine max
taaaaacattaaggttggtgtacagtagctgctttcactcgtgtccgtttatactggaagcaacgatcaaccgttaaatatatgctgtgcctggtcaacttggtaatggccctgcatccgccgctttaaaactaaagcatatgtaaagaaggtgtctttggccgaagagttatgcttctgttgaatggaaagtgacagctgggcaagtattcacctctatgactgttaatttatactccgctttaagaggtgcataacttaataaaagagaggcagcctggttttccggcttgctttgatcatttcatgctcttgatgcctaaccaatttttatttaaaacaccatcacataaacagagtgcattttagcacctataatggttgtattttatttactgtatatatctggttatggaccgtcttgttgattgt

SEQ ID NO: 25802 - DNA, 338 bp, Glycine max
gagaagacactggctaacttccagaatgtgcttcttttgtcctcacctcaggtaacctttatatgcttatgatgggaattatcatggtttttaagacctatatttgaacttctagttccattgtttcaaaatatcctgtattcaaatgctggatcatttcctaaagggtgaagattgtaacttatgtatcaaccagagtataataaattagatagaagtctacatggtggaaagcttatattgattagtattcaaggtaatatggatatcatgactatttagtgactctctctgcctttctgcaagggtctattatctttttaaattatttttgttga

SEQ ID NO: 25803 - DNA, 455 bp, Glycine max
cttcgatccaacgatgatgatgctggcgaagagagtaacttcgacgaaggagatggtaatgacatctcaaaagtggatgatctagaggtcaagatggatcttacggatgacttgttgcatatggttttctcgtttttggatcatcccaatctctgcagagctgctagagtttgtaagcagtggcggactgctagtgctcatgaagacttctggaagagtttgaattttgaagaccggaacatatctgtagagcaatttgaggacatctgtaggcgttatcctaatatcacggcaatccgtatgtctggtcctgcctctaaccagcttgtcatgaaggccatctcttcgttaagaaatcttgaggctttaacattgggaaaaactcatataatggataattttttccatgctttggccgattgttctatgttgagaagactaagcatcaatgatgc

SEQ ID NO: 25804 - DNA, 585 bp, Glycine max
  unsure (1)..(585): unsure at all n locations
gggccaaagaaaagcaagttcaacgcatttttgttattccaccgcagttgtctgttccccttgctggtatgagttcaacaattactgcctataagacttgggagatggaacaaggaagtcttcaagatgttgaatcncattgatttggttgatatttatcctcatgttgcggcttcataccagaaggccttggagatgtataatgctcgttttcatcttgaagaacagattttgagcccgaatatttcagattcagaaagattacaacactacatgaactatttgaaatttgagcagtcttctggaatgccagccagaattcaagttctatatgaacgagccattactgactttcctataacacctgatctctggctggattgtactcgcaatttggacaacactttgaaggttggtaatattgtcagcaatgtttattctagggcaactaagaactgcccttgggttggagaactttgggttcgatatatgctttcgttggagcgtggtcatgcttcggagaaacacttgtctgaaatctttgagaagtccctgctgtgtaccttttcaactcttgacgagtat

SEQ ID NO: 25805 - DNA, 286 bp, Glycine max
aacgaaacgtttagattggaagaaggcatcgtcttcatcttcttcccttaggttaggttttgcagagctcccttcaacgcatttcttcgacccatattcactctttcaagcacaacgacactatctcattgagtggtatcctatctcacgataatttggtttctttattttctgtctttgaactcccattgatcggcgacaattgagagatgggaaaagcaagggacagaaccgaagatttcaaagacgccgtgcgccaaaccgctcgctttttaggctacgatga

SEQ ID NO: 25806 - DNA, 616 bp, Glycine max
  unsure (1)..(616): unsure at all n locations
gcgaatctcacaccgtatagtgatggccgagaccgatgttcccgagacgcccgctgcttcagagacgcccgctactggtccatctgtgaaggagtttacgctagaagatgtcaagtcgcacaatttggcaaaggactgctggatggtcattcgggacggaggtatccgcaaggtttatgatgtaacgactttccttgacgatcatccgggcggccctgcgatcatggtagacgtagctggacaggatgccactgacgagttcgaagacatcggccattcgaacgacgcgcgtgcgcagctgaagcagttcgagattggtaagatcaagggcgactccaagcagcaggtgccaagtgccagcacttcgtcgggacgacaggacattagcggtcaaaatggtccgctgtaccccgtggtggcggctgtggtggtctttgctgccttttacattcagtacaaatgatcggcagggtgtgagcaatggcagagcaggacaaacgttgcttggtgtgtggctggcagagcgccatgctgccacaaccttgtcacggcataactaacgttacatataacaacttttaaactttgcnnnnnnnnnnnnnnnnnnnnnnnnnnn

SEQ ID NO: 25807 - DNA, 304 bp, Glycine max
caaccccacaaggttccttataatccttcttcagattcttacccccctcaaaatccttatttcaatcatctccttcagatatagcaatgacttttcagaagcagcaaaaagttccttgattcattaccaggttcaagctctcattttcctgagatgaacttatctcctctcacaaacgaagggattcactccacccaacatgagtggtgggggctgctacaaaccgacaccaaacaagaaggttccaacaacactcttgccatgcctcaaaacctcaaccaatcagaatcaccctttcttcaag

SEQ ID NO: 25808 - DNA, 260 bp, Glycine max
ggaaattaacaattcagagaagcagtcaagcatttgtgatcaaagatttgacaataatgttcaagaaattaagttggtgtcgaatctctcccatgatgttaatcatgtcaatacatctgacgcctgttatcctgtgagagatgagatagttactgaaggcaatgtagaatctagaaaagagataaatgatttggaatcgtctttggatccaaatggtttcatcataggaaaggaccaaaatattgatatctcagaaattc

SEQ ID NO: 25809 - DNA, 300 bp, Glycine max
attttgttccttggaacgtacgagatggagcaagagcgtaacagcaacaaaggactcaggcgacaacaccgcgacccacttgaattttttcgagaaatttaaacgctttaaccctctcgagtcttccttgggagtactagccttcttcttcgtcgcttctctcttcattgccagcttcttctacttggattacaaaggcttccgctccaggggcactgccactgtccttcacttggatttctcatcaccatcttcttctgccccagttcagtttctgagccaagacggtgataaatgtga

SEQ ID NO: 25810 - DNA, 1179 bp, Glycine max
catgtctgacccctcaatcataacttcatcacacaattgtgctttaacagtcttggacactggtcaattttcttttcaattttttgttgttaaaattaggggttaggtatgctttcatatttatttttattttttggcatagagtagatatgttgcttgaactgcaacattcataattttgtttagacttacctgttggaaaaggaaatgctaatgggcatggattgtctcctgctttatcgttcatccactcatggaagaggccttggcagattttggtctcatgttgaaggttacaaaggtcctttgttaattttgatagctgcaagttcaggagatgctcacgagggaaaattccattgataggaaatgggttataggtgccttaacagatcaaggtcttgaaaataaagatatcttctatggaaactctggatgtttatattctattgacccagtgtttcatgtgtttccaccaactggtaaggaaaagaattttgtttatagccacttgcatcctactggtaaagtataccaaccgcatccaaagccggttggagttgcatttggaggaactccaggaaatgagagaatatttattgatgaagattttgcaaaagtgactgttcgccatcatgctattgacaaaacttaccggagtggatctctctttccagatcagggtttccttcctgtcgagggtctgatttctgaagttgaagtttggggacttggtgggaaagtagcaaaggaagtgcagaactcttacaagaagagagaagagcttttcactgagcaaagaagaaaagttgacttgaagacatttgcgagttgggaggattcacctgagaaaatgatgatggacatgatgtctgatccaaatgctgtacgaaaggaagaccgctgagttggatcatctctagtgttgcattgcttagtgcaatacttaacaggcataagcgtggaatatatttcatgctttatattatgttttgtcattacttttcaggctcgtgatccttaagtagccgtacatactacaaaaaatgtatatattaacaaatatatcgcttaatgcactatacggggtttgtgtatgtttgctgtaaaaaattgtcctcaaatgtgatcaaggcatcgcattaggaatggcatccctctttctcatcgttccacacc

SEQ ID NO: 25811 - DNA, 462 bp, Glycine max
cagcttcctgcagggaagtttgtgacgtgggttatgagcaccgtgccatgcctcccggattgcttgaggcagtatgttcatgctagattgctaatagcagcatctgatggggttgaattggcatgctctaatgcctcctctgttggagatatttcatcacctgctgcatatgattatattttgacccaaggaagggcatgggcaagttctatcacacagaaaagtacaagaaatgaagagatttctagagcatttataagcaatggaggtggaatggataataaccttctttatcgttcatccactcatggaagaggccttggcagattttggtctcatgttgaaggttacaaaggtcctttgttaattttgatagctgcaagttcaggagatgctcacgagggaaattccattgataggaaatgggttataggtgccttaacagatcaaggatacgaaaat

SEQ ID NO: 25812 - DNA, 697 bp, Glycine max
gccaaatttcattttattcattcatctctttgccaatttctgttcatttttaggctcgctgttccaaatccaacaaattagagcttcgtttccgtcctgaagacccctattctcaccctgcatttggggagctttcgtccaccaactctctgcttctcaaaatatccaagacaaaaccaccaccacctgttcatgatgccgaagcttctagcagctctacaaatggggagcaagaccaagagggaagtctttgtgctgatatcgtcgctcgttttcccgaggcttattttttttatgggatggcggactaccaacatgtgattccagttcatgctgatgttgcccggaggaagaagcggaactggtcagagctagaagaactgcattttgataaaggtggtttcatggatctggatcacgaggatgttatgattatagtgcctccaattttcgctccaaaagatgtgccagaaaatttagtcttaagaccagctaccatgtcgagttcgaaaaagaaaccagaggaagttgtacaaccccattttgagatggacatggagccagttcttgcaattgattttgacattaaagagattcctaagaaagtgaattgggaggaatacataccccaaggctcagatcagtgggagttacagatggttgtatctagaatgtttgatgagcggctatatggtca

SEQ ID NO: 25813 - DNA, 302 bp, Glycine max
aacgaagacgaaataattaacccatcagagagagagaggtaataatgggagtgataaaggatggcacaatctcaggggttctaccggaacctcaaggatttatggtgcactatcctgcttatccatcatccatctctcgagctgttgatactcttgggggaattcaagccatccagaaggctcgctgttccaaatccaacaaattacagcttcgtttccgtcctgaagacccctattctcaccctgcatttggggagcttcgtcccaccaactctctgcttctcaaaatatccaggacaaaa

SEQ ID NO: 25814 - DNA, 364 bp, Glycine max
tgtattttaggggtcaaattaaatgatgttgatcttttagaatttcttcagcaggttataaacatcataataagatccctttctaagttatctccctttagaaattggatgttttatgtctttttaacttccaatttatcattaccttccaggttgctgtcactgatggatcatcaacaatgccaccatctgtcttacgagtgctaaatttgaaagcatgcagaggtgcaattatgtttggggactcattgctaccatcagaatgctcctttatagttgaagagctaaaacatacatcgctttgtttccaatgtgctcatgggcgaccagcaactgttcctctagtcaacttggaggcactgca

SEQ ID NO: 25815 - DNA, 284 bp, Glycine max
caacaaacaaaccctttccttccttcctctctccctgcatccatataaaataacatcacttggttgttctgttccaatccaagaagtatggaagagtctgaggggagtggaagtgggaataatcagagttacagcagcagcagcagcagcagtggatcagcaatcagcaacatggctcaagactacctctttactattctcctcctcctccccatagatgcaatcctctccctatccatgacttgcaagagattcagggctctcagttcctcacacacactatg

SEQ ID NO: 25816 - DNA, 545 bp, Glycine max
cctaaacgcacacacctctctccattctctcccaacacccacacacaaaaaattaattgcaaaattatattaaattaaattcccattagaaaaaaaacccaatccactgtcgttcaatttcatgttccttttacgtatccaagaagtttctcataaacgattcctcatagaattcaaaacatttttcaactcgtttactgagtggagggttctgctgcttcggctactactaggtccaatcgttctctactctatgtttctgtacttgaggtgcatgtggttgatactccatggaaactgtggttggaattgaggacaatgatgatggaaagtttgaagacagtggggttgatagaagcagttcagctttgtcttcaccgaagcaaattgccaacccaattgtatacaagcttgttcgggttgaaggtgatgggaggttagtgcctgcaacggatgatgaagtaatggaggtgggggattttcttgagtatgaaaatagtgaaatgcatgttggcacatacactggacaaagtttggaatgcata

SEQ ID NO: 25817 - DNA, 283 bp, Glycine max
ctcgagccggacctaaacacacaccactctccatttcactcccaacacccacacacaaaaaaaatttaattgcaaaattagatttaattaaattcccattaaaaataaaaaataagacaaagagacaaacttgcgttcaatttcatttttctttgacgtatccaagaagtttctcataaacgattcctcagagagttgagaacatttttcaactcgtttactgcgtggggggttctgctgcttcagctgctactgggtccaatcgttctctactctatgtttg

SEQ ID NO: 25818 - DNA, 946 bp, Glycine max
gtggtattcagcccgggaatccaatttaggggaccgtcactcgtcacgcactgaactgcaaagaaatttccgtagaaatttccgtgaagaaagagtaaatacctaaagtagtaaacgttcacaattacatgaataatcaattgatcgattccccttgatcgctctgttttactgtccgtttcaaatccgacagcagcccagcccggcccggcccaatcatgactcccaaactccaaaccgcggcctccgtggtggccaccgcgatgctcctccgttccctcgcccgcgactacgtcccggcggagctccaccactacctccgctgcaaactgtcgaaactcctctcctcattctcctccgaactgactctggtcatcgatgagtttcacgggctgacgccaaatcccctcttcagcgccgcgcagctctacctcaaaccccacgccgcccccgatacaaaacgcttccgcgccaccctgcccccgaaatcgcgccacgtttccctcctcgtggagcgcaacggagaaaccaccgacaccttcaactccgtccagttccggtggaaactggtctccgaacgcgtccccgcgaggttcatccatcaggactccttccactccttttcgaaatccgaggttcggttcttcgagctgagattccacaagaagcatagggacatggtcctctcggagtacctcccgcgcgtgatggaggaagccgaggtggcgcgtgaccggaggaagacgctgaagctcttcacgccggcggacatgaggatggtgggaaggagagggtgcgacatgtggcagggcgtgaatccggaccatcccgccaagttcgagacgctggcgatggatttggagatgaaggagatgataataaaggatttggatacgtttcttgagaggaagtttttgtataagaatgttggaaaggcttggaagag

SEQ ID NO: 25819 - DNA, 415 bp, Glycine max
atcaattttattcccccgaatttctcccactcttaatcctaatcctaattatttatcatcatcagtagcacccacccctctctctctttctctcactggcagaaggttttcatcttcacccgtttcagccatggataaggaagacgcagcggcggcggagcaagaatacgcacttcactccaccttactccaggaattcaccgccatttccgccatcgacaaggcatggctcttcaaatcccacactcacaccgcctccgcttcttcttcgcatgcaatgttctgcgttagtcaacccaacctcttggtcaacaagaggaagaaatccatcgtctccgccaccattctcacacaaaacgacgcctcctccgtcacgtttcagtgggctccgtttccgatccaagtttccggagtc

SEQ ID NO: 25820 - DNA, 307 bp, Glycine max
caaagcacaagattaaaaaacaatttataaaaaaagaaagaagagagattatagaaagggaaagagagaaggttcaagttcaaggttctcaagttcaacaacaaagcctctcttctgcgtgttccgaggaagaagaagaaaaaaccctccgagtcaactcggacgagttgcctcatcgtacggttccgtcctcggactctgtcctcttctttcccttccgaaatcaccgttcgcggggttttgctctctctccgttttgtgttcagatctcacattggtttcagctgaaacgacgccgttcaatttc

SEQ ID NO: 25821 - DNA, 369 bp, Glycine max
ccggcacttgttcgtccctaaaacgcaactccaaaggccaacaacactatgaccctctcactcgaggtctcactaactcccttcacttagttaaaactcaaaacactttgttttttcactttcagttcccccacgcgccaccaccaccacccatgggttgcacggcgtcgaagctgtgaaaacgaggacacggtgcggcggtgcaaggagcggcgccgcctcatgaaggaggcggtctacgcgcgccaccacctcgctgctgcccactccgactactgccggtccctccgcctcaccggctccgccctctccaccttctccgccggcgaacccctctccgtctccgaccacactcccgccgtcttcctc

SEQ ID NO: 25822 - DNA, 532 bp, Glycine max
cttttgggttttcatttgcaaaggaatcattttccatttgccaatcaaccttcttcatccctctagatcgaaaggccaaatttttctttttcttttcctttttcattattatttcatatttttttccccttttcaattcttcaaaaaattctcgcgactaaattcacgtcagtacacggaaacataaaattcagtttttttttattaaaatttgttggcaaacaaaaacaaaaaaaaaattgaaattttgatccgttttgccgaattggaccgcgcgttcaattgggttgtcgaattcgaggcagaggaatcgtgggtgtacgaggaatttcgactgtgttgttgtactttggtgattgtcagaaaacggtgtcgtttggtttgagagaagctggggaccttggggggatcgaaaacgacgtcgttggaggagaaggagaaggagaagggaatggtatttttgaaagtgggcaccggcggcgatttgggggtagatttggcgggggacgaaagatttgttgcgttttgccat

SEQ ID NO: 25823 - DNA, 914 bp, Glycine max
tccaggtcgaagatactgttttccaaaccagcctgacattggtttgtggaatattgcacagttcacaacaacactacaagctgctcatttaataaatgaaaaagaggccaactatgctatggaaagatatggaacgagatttatggatgattatcaggttacaatgaccaaaaagcttggcctccctaagtataataagcagatgattaataaacttcttagcaatatggctgttgacaaagttgattacacaaacttctttcgtacgctttcaaatgttaaagcagacataaacattccagatgatgagctgttagtcccactaaagtctgtactgttagatattggtaaagagcgtaaggaagcatggaccagttggttgaaagcttatatacatgaggtctctaccagtgggatacctgatgacgaaaggaagatctcgatggattcagtgaatcctaaatatatactgaggaactatctctgccagactgcaattgatgctgcagaaataggtgattttggagaggttcgcagcctgctcaaattagtggagcatccgtatgatgagcaaccaggaatggaaaaatatgctcgcttgcccccagcttgggcatatcgaccaggtgtatgcatgctttcttgttcttcatgaggctcccatttaggtctaaaggattacaaaaatgaaaacataaaaactaggaattaattaagagcaaaaaaatagtagcgtgtttctttgtttattatttttccatatgtttccaatatactgtccccgagtattatttaacacgtacaatgtaacatttggtcgaagggtttgtttgcgggttgattgttattgtagtgtgaaaatttgtttgtgatgggtcagtaaattgatctattaaaattacgggattcttggt

SEQ ID NO: 25824 - DNA, 372 bp, Glycine max
ctcttttagagggaacacataaccattaagataaggaaccgcactttattattttatttatttggtttagctttgcttgtgaagttggcttcgttttctgcaattcccactccacaaagccacacccttcatcaccccccagaaactaacacaaaagcaaaaaaagaaaagaaaaaggagaaaacattataacaacacattatttttattaatattgttgtaattattgttacagttttcatttgtcttgtccctttatttttcgattggatctgaggctcttcagagttgcagaaaggcacaccaaagttgcttcactttcttggagtgtggtttctccttgctccaagcaaccacacacacgcacactca

SEQ ID NO: 25825 - DNA, 685 bp, Glycine max
aaaccaggttcaaaggcgacttctagatgagtccatcgccgacgaaccttctgcagcagtttcaaagccgtggattgaactttattgtggtgcagtctcttcccacgtttcagttcaagaaaaacgagagagaacaagacaagacaattagtgtggagtgtgccatctgcctcggagagtttgaagaaggggagtggctgaaacgtcttccacactgcagccatagtttccatgtttcatgcattggtacgtggtttcagtcgcattcaaattgtccgtctttgtagatcttttgtgcatcatcacatcctacagtgttctatagcttctcacacattgctacagcctttgaggagggaggactttgaaagggttcagagataaaagtagctaccctttttgttgtttgcttttagttttgatattttcgtgaggtgaagccttgttggaaaatagaatttggatgcaaagctaacagctaaagaaacctcattttaggtgggttataagagtgtctaagcgtacataacgaagcttctattgtgttttgtgagtattgtcaatcataaggcgtaggatgattatacaagatgtttcggagttcaatctcaaatttgtagatccacgaatcatgatcaacataactgttgaaatcaagatttagcatactttatagttacaacat

SEQ ID NO: 25826 - DNA, 921 bp, Glycine max
cagcaccaccttcttcactcactagtccctagtaatggcagatgccaagagcaaccccaatgcacaactccttgaagaactggaggctttgagcgaatccctttacaaacaacacacctccaccacaaccagaagaacagcttcccttgtgttgccacgaacttcggctccacctattgaagatgccaaagatgatgatggaagcagcaacaaagctcggcggcgcatgtccatgtccccgtggcgatctagaccaaagagatgatgatgccactgccaaggcagaaaccaaaaagcttgatggcacatcaacaatttcttcaggtgacagtgacaggaaagggatttggaagtggaagcctattcgggctttgtctcacattggaatgcagaaactaagctgtttgttttctgttgaagtggtcgcagctcaaggccttccttcttccatgaatggacttagactatccgtttgcgttagaaagaaggaaacaaaggatggtgcggttaagacaatgccatcaagggtttcacaaggagctgcagattttgaagagacccttttcatcaggtgtcatgtttatcatacctccaaccaaggcactgcaaagcagatcaagtttgagccacgccccttttggatatacctttttgctgttgatgctaaggagcttgattttggaagaagctccgtggatttgactgagctaataagagaatccattgagaaaaaccaacaaggcacgcgggtgaggcaatgggacacaagctttggcctgtctggaaaggcaaaaggaggagaacttgtttctcaaactgggtttccagatcatggagaaagatggaggagttgatatatataataatcaagtggagaattcaaagtccagctctggcaagcttagtagtttctcttcttct

SEQ ID NO: 25827 - DNA, 684 bp, Glycine max
aaaagaagaaaaaaatagacatgaactatcgtgacaccgtgtactaccattggttgaggaatcgtgtttgagctctctgttctgctaccgtgctgtgtggtgcttcgattacagcttatccatggacacaacttgcatacgatttgctttaggacccatcctcctccacctcctgttcttgtccctccctaacctttccctagcagaggttatttatagtccccttgagctcttcagcatcaactgtggctctaacagtagcttgtccacgcgcgatggtcgcaattggactgcagacatcaaattcctctcagaaaacaaggactcagttgctgctcctgcactcacaccgtctaccctggagggtccttacaccgatgctcgtttctctcactcccaattcacctactctttccctgtctccacaggcccaaagtttcttcgcctcttcttctactcaacttcctaccaaaacttccatcgctccaaagcctatttctcagtcaaagcaggcccctacaccctccttcaggatttcaacgcttccctccatgctgatgctggtaacgagcctggcgactacttgttcagggagtattcaatcaacctcaaagatggcgatcggctcaacataaccttcattccaagcaaaacatctcagaatccagattcgtacgctttcat

SEQ ID NO: 25828 - DNA, 477 bp, Glycine max
gctaaaattgcagattttggtttggccaggtcctttcaagaggacaagagccacataagtacagctattgcaggaactttggggtatatggctcctgaatacctagctcatggtcagttaacagaaaaggcagacgtattagttttggagtgttgctgctagagatagtcactagctagacagatacaacaggagcaaagtcatgcagagatatgtcatgacagcttagttcacagtgggcccttgcagatttctacaatgaagtcaacataattagtagtgtggaacacaagaatctagtcagactgttgggatgcagttgttcgggacctgaaagcctgcttgtatatgaatttctacccaacagaagtcttgatcgctacattttcggtaattactgaactgatgcagtaggcttgactgctattttcacctataacacctcattctgatcactataagtgattatcaattcat

SEQ ID NO: 25829 - DNA, 314 bp, Glycine max
gcgaaatatgcaacaaagggttccagagagaccagaaccttcagcttcaccgaaggggtcacaaccttccgtggacgctaaggcaaaggtccaacaaagaggtaaggaagaaggtttatatctgccccgaacaaacctgcgtccaccacgaccctgcaactgcactcggcgacctcactggcatcaaaaagcacttcagcagaaagcacggtgagaagaagtggaagtgtgaaaagtgctccaagaaatacgcagtccaatcagattggaaagcccacaccaaaacctgtggcactagagaatacaaatgcgac

SEQ ID NO: 25830 - DNA, 266 bp, Glycine max
ttaacatatataaaaaacattagaatagcggtcatcccactatctgctatcccgctatcccacttttggggtcgaccactctgctccgctgcgccggtattgacaactatgaatttaggtaggaaaagacatcaacaaagacttatcccactaggggaggtcggctacatggatcatacaatgccatttaacacggttaaaaaccaaatttttagaaatattatttagcttgaatctcaatctcccttgttgatttcctccaacgt

SEQ ID NO: 25831 - DNA, 365 bp, Glycine max
caaagatggaggaatattttccacaacatgaaagagttgcctctaagctaagctgggaaactgagcagatagattactcctcaaattgtggcatgtctaggtgattagatgattatggaagaatcgtgtagagacatttgttagtttaatggtttaagagactactactactattatggccacaatttcctttcttttattatgctattgcatttaccttgttagtgtaaactacagagctgacttcaatctagctttgaagcctaactactcttctgctcaatgtgaattctggttttttcaaaacataggaattgtaagatttttgttctctttcaaaaaaaaaaaaaaaagggcggccgccg

SEQ ID NO: 25832 - DNA, 581 bp, Glycine max
tcgtacaacgaagttatatttgctgccacaaattgtcttttcttcctctgtcttcgtcttcgattccttcccaaatctcaaaactgcgtctcggggatttgatttccgttcaattcccctcaaaattttgcgacttttcaaatccctgtttggcttttccatctgggttttcattcccgatcgatccgtgggtttgagattcagacaattagcattcatttcgggtttcaataaagttgatgcatttaaaatcttagtgggtaggtttgggattgttgtgatttgggggaaaaatggaatcaagtcggagagcggttgaatcgtactggcggtcgcgattgatcgattcagctacgtccgatgaagataaagtcgcacccgtttacaaattggaggaaatctgcgaacttttgcgttcttcgcatgttagtattgtgaaggaggtttccgagtttgtcttaaaacgtttggaacataaaagcccaattgttaaacagaaggctttaagattgataaagtatgcggttgggaagtctggtgtggagttcagaagggaaatgcagagacattcagtggcggtt

SEQ ID NO: 25833 - DNA, 543 bp, Glycine max
ggaaagtcgtacttaaatagacagaacaatggacatggaactatgttttcaagacgatttatccatgcagggccatatgataatctgaaagagattgccgtgaagatcctgcaaaatggaggtttcaacagttcctattatccattcatcttctgaagatgcttcatttccacagctactacatctcgcttcactttcaggaatccttaaatgcatttgcaggtattttaggcactgctctagttccctgccctatacttcaacttccaatttgtgcaatccctgtggggacgtgggtgcccaaaattggggaatcaaatcgccggcctctagcaatgttgagaccaaatgcttcacttacttcagccctaaacttattagttcaagctcaagtaagttcaataccaatagttgatgatagtgactcattactggatatatattgtcgaagtgatataacagctttggcaaaggacagaacttacacacatattaatcttgatgaaatgactgttcatcaggcattgcaattgggccaggatt

SEQ ID NO: 25834 - DNA, 916 bp, Glycine max
cacaggtaagtcacatcacatgagagtgtagttggtcagtttttcacgagacaaagttctcccaaacacttcaacatggcttcttcagctatggaaacctgcaaatcagaggatttgcacatgcaggttgacattgagaagaacgcgaaggacataaggtctcagtgggtgcttaacgctcctgagcccccaagtccatggcgtgtggttgcagattctgtgagcaaaactatctcccactataaacataaactttcctctctcatagatcaaccctgcaccacactcctcctttcagttctgcaggtggtttttccaattcttgcttggggcagaaactacactgctactaagttcaggaaagatcttcttgcaggtctcactattgctagtctttgtattccccagagcattgggtatgccaccttggcacatcttgatcctcaatatggcctttatacaagtgtggtaccaccacttatctatgctgtaatgggaacctcgagggagatagcaattggtcctgtggcagtggtttctctgctgttatcctcaatgatggtgaaattagtagaccctgctactgatccagtgggttatacaaagctgattttgcctgctactctctttgctggtatctttcagacttcctttggactcttcaggcttgggttccttgtggatttcctatcccatgctgcaatagtaggatttgtagcaggagcagccattgtgattgggcttcaacagttaaagggactcttaggaatcacccattttacgaccaaaaccgacatagtctctgtcatgaaagctgtttgggaagcagttcataatccatggagccctcgaaattttatcctgggatgctccttcttggtcttcatcctaacgacgagatttttgggtaaaagga

SEQ ID NO: 25835 - DNA, 166 bp, Glycine max
ctcgagccgtttttttagtgtttggtttatgtgaaaaggaaaaaagccttcttaggtaggtcgatggcgtggacagctgaacagaatgttgcttcttccaattgtatttacttttccattacgattcctaataatatagaaaaaagagatgctattcttttctttt

SEQ ID NO: 25836 - DNA, 316 bp, Glycine max
cgaggtacaggttgaactaagttacctatactattctggatacaatggaactaatcaaaaagatccacagaattctggggcctatatcttccgtccaaatggcacacatcccatacaccatgacaaaaagggtccattgactgtgttgcatggacctgtgctagatgaagtgcaccgacaaatcaatccatggatatatcagattaccagactatactaaggaaacgagcatgttgaagtggagttcataggtggccctataccaattgaagatggaattggcaaagaagttgccctcggatttcaactactatgg

SEQ ID NO: 25837 - DNA, 466 bp, Glycine max
gggctcatcaatttccaccaatcatacgaatcagcgctctaggaattcggctcaagcttcaaatggtccttctgattcacatgctagatacgcgccaaaaaccattgacagaaaaattgtatatgaggataaggataagcaaggcatgatttcaaatgcagcaggtcgggtgcaaccaattaaacctaacaatgcccatcaaaattctgcctcagtggcatcaaccagttctgctgttggggtgtattcctcttcaacagatccagttcatgtgccctctcctgattctagatcatcgggtgttgttggagccattaggcgtgaagttggggttgttggtgttcggcgacagtcttcagacaacaaagcaaagcaatcatttgctcctagtagccctcatgttgtgggtaaagatggtacatctgcagattcttttcaatcagttggggctgtctcaaagactgaa

SEQ ID NO: 25838 - DNA, 593 bp, Glycine max
cagctccctggtggagtgccttaggatctcaaccagtttacggggagtattgtggtcaaatgaagtccttttcattggagatttccaactatgtggaccaatttggtgctggtaagcaagcggcacgaggagttgagcaattgttggataaaggacatacaactcagggtacctcctctccagatgattgtaagatgtcaggtgatgcacaaaatcctcaggcaacattatcactgcaatcatcactggctgagccccacaatcgttttgagataggggttaatcagcctatgatctgtgcaaaatatccttatatggatcaattttatggactcttctcagcatatggacctcaaatttcgggacggataatgcttccaattaacttgacatccgatgacggaccaacttacgtaaatgcgaagcagtaccatggaatcatcagacgtcggctatcacgtgcaaaagccgtacttgagaacaaaatgattaaacgtcgcaagccatatatgcatgaatcacgccatctacatgcattgcggcgaccaagacgatgtggtggtcgcttcttgaacacaaaaggctctactaat

SEQ ID NO: 25839 - DNA, 717 bp, Glycine max
aaattttcttttctttcctgcaaccattttttgtcctttctgtttttcatcccattctcatttctctctcatcaatcccacaccagcgacctttattctcattaataatataatctgagttcatgtatttacttttattttattcctgaaacaagtttttggtcactggttatagttgcgcattacatttgtgtccactttggcattttgacctggcctgtgtttggttctttctttggttgtgttgtgagcgtgatcctgctccatgctcacctcctttttattccctgcaactgcaacagcagaaagaagataatggcatggcagtgtagtgccatcaccgggaaccaacgacacactcacatggaatgaattatagaacccaaacctaccattcatagatctcaaggatctcacagtttccttttttcctcaataaagttttactctttttggtcttctgagtgctcactcctcttgcttggattcaaattctccattttccaacttggttttgtggtggcaaagaaagaagcaattttggcatctgggttctgtttggtttgatgttcattgaattgggtcaaagagaagttgctgttttggtgagagtgggaatctgattccaaagagtggcttttttttctgtttggataaggtgatagagatatagactggaccttctttgtgggaatggggattcaagttgttaattat

SEQ ID NO: 25840 - DNA, 273 bp, Glycine max
gcaatcatttaatatatcaactaaattctgagcacccaagtggcctgttgtaatgttttatcttgataactagaccatttccttgacactcacacacccctgttcctaaggttcatatataaaagactttctgtaaatgaggaaagcagttcccgcaggtgaagagagaatattgtaattcagttaaacatccttcagcatcatggatttgactgtactgctatatactttactagcaataaatttacttttatcatcttttatgatggtacg

SEQ ID NO: 25841 - DNA, 594 bp, Glycine max
atgaggaatatgcccgaagagttgggtcaggggtgccatttgtaaaatgaagatctatcaattaagtgagctgagccatatcctgtcagacctaattcaactgtgcttgtgtgaagcatctgaaaataaaaatccagggttgggttagatggtgatcatgttaagtttcatggttggacgagattgttgcagattattcatgggcttctagcaagcctactgattttaccactggcaacgattctggaatgcactgatcaggcatgctcaaacaagtaaaattagtttggctactatttaactaggattttgttgtttggttatcctcttttggtgatgtatcttgcttcaacatttgcattcttgttgtaacctttcatcacttgctggaacaaaaatgctaaaaactagagaaataaaatgtaatcacaatgagcaacagcggaacaccattagattccatatagatgttctaaatgcattgatatgattaatgcaaaaatacaagtatggaagaaataatattaagacttaagtgatgctttaagttttcaatgaaaaaaaaaaaaaaagggcggccgccgaccaggaatt

SEQ ID NO: 25842 - DNA, 745 bp, Glycine max
gtcaacataggttatgaagatatgggcaatcagcaggttgtaaaattcaatggagctcgaattaaaaacattcatcaccttgcacacctcatcgattcatgcgaagacaggtatctgcgttttgaatttgaagacagctatgtagctgttttagagaaagaagctgttgctgctgcttcaccctccgtactgagtgattacggaatcccatctgaaagatcttctgatctttcgaaaccttatgtcgatacactagaagtagaaggtgaccaaccagcagaccaggaatttggtgatagcccagtttcaaattatgaatttggccctgatggactactctgggcataagaaacttgcatctgaagatatctgtgtgaaatttctcatggcggcagcatttgtagcaagtgatcacaattttgggctgcagagaaagtgctgcaacaacatggggcaaccttgatgtgaacacatgaatggttttatgctaccatgggggcatgttagaagcaacctatttaacagaaaggcgtaggaccataggaaagagagttcgtgattattttttcccatgtatgttttattctttcttgtcactcttcttgatttgataaacccaaatgatgtcttctggtttgatatctacatttttcacgcgcattctgtatttttaaggaaatagtgaacataagagtcacttgtatacgcctttgatgcaatcaatgtaacattttacagtacattg

SEQ ID NO: 25843 - DNA, 1014 bp, Glycine max
gatttatctgctccttgggctggtgaaatagagcaaaagattctaagctcaccagaagttggaattggaccttatgtggaggtagctttctaccacaaaccttcaaaaacactattggtgacagatgctgttatttttgtcccaagacagccacctgagtgtataagcaaagaatccttattagcatcagcaaaaaatggcttggctgttaaacttcttagtaaaggaaaggaggtacctgacgagccagtagttgacgacaaaaggaaccgacaaaaaggatgggaaagaatggttctacagatcttgtttcttggtccatcaaaccttttagaacctaatgcaagctttgaacagatgtcacaaaagttgattgtttcacctattgtgaagactctggtcttcagtaaagttcctgagaaggttagagagtgggttgatagcatttcgcgagattggaggttcaagagaataatccctgctcactttgctgctccaataagtgcaagtaggtctgatttcagggctgcatttgcatttttggatgagtttttgggggaaagtaatgctgcatggccttcactttcccttctcttctcatcaatcatgggaaaggcagccagctattttcctccggatgacatgaggaccctatcatcccttgaccagtttttggtgtctgttggtgctgtgaaaaaaactgtttcaggcaggaaaaggtgagatgagaggtgcatcacaacttggccttgccaatacttgttaacttttcaaatgtaaaataagtataattttgttacattaggagctcgattcttaaggaaaatgtaaatgttgtttgacattggactacatatacatgttgaggaaacaaggaaatgttttacatggaaagatctgtgaggcataagtgagggggtatacatgaatacaagtttggtgcattttatagtgtaaataaatgataatggatgtttggataataatgtaaaataccttgacaccatttgatat

SEQ ID NO: 25844 - DNA, 559 bp, Glycine max
accaatctgacctttctaaggaaacaaattttatttgatatattatggagacatcatgagatcgacttgccctttggttagctttaatcaaacgctctaccacttggtcaaaagccttatcttagtttccttctgtgtgtctctaggagcatcatccttatctgtctgaggttgcatcagcaaaggtgtcttcgaaggttcaacaagatttcatcagagagcacttattttactatttctcaaggtacatacagaaagtttgtttgagctaagtgagtaaaaggagaactatgtcattggttatatctgcagagttggctgatacatcatatggaaatgccaagctctacacactaaagggaacggatgtcacaccagatttgtcctcccacaattttgcaccacataagcacagaaacatgtatatgacaaagtcacactcctgtgagagttatgcccagtacttccgggattcaccaacagaagaactgatagaaccgtctagttccagcatatcaggaaactcagttcaccctgatggtgcttcttcttacctgct

SEQ ID NO: 25845 - DNA, 285 bp, Glycine max
tccggacaggatgagaagggttgggccgggtggcgtctcggatgcgggggtcttgggccgcgggactcggcccagttccagtggatgaatggtggctatgaagttgaatccttttccgaggacgaagacaaacacattttgctacagagatgggttctctataccaattcagtgcatgtatcctttgtccctctggaactgacatcaattttcacatggcaaaagaaatcacagaagatgaaaactgaccaggtggcagattttcaccacctaacgtcccaattt

SEQ ID NO: 25846 - DNA, 350 bp, Glycine max
  unsure (1)..(350): unsure at all n locations
gttccagagactgaccgaagtattatcccacatgcagaggttcttcgatcctcgtgtttggaggnctgtcgtggatttacctgactgcaagaccaggtgttcttgttggtgccattgatgcgtaccttttggcacctcttcaactgggtttggacaacttgtctggtaggaggaacttgaagaggagtgactttgttgttggagacaagctcggtgaagggtcctttggtgttgtctattcgggtattttggtcccaaagaatgtggatctggatgtggtgcagaagagggggagaggcaagacaacacaggtggatgccaagtctaaggataaattcattctgaaaaag

SEQ ID NO: 25847 - DNA, 826 bp, Glycine max
ctgaagaagaaggtagcaaaacggttgaaagggaagaagtatctggtagtgcttgatgacatctgggaaacccaaatatgggatgaggttaaaggagcccttccagatgaccacacaggtagtagaatactcataacaagtcgcatcaaagaggtggcacactatgctggaactgcgcctccctactaccttcccatcctcaatgaagatgaaagctgggaactcttcacaaagaagatttttcgaggtgaagaatgcccgcctgatttagagcctctgggaggatccattgggaaacctggggggggtttaccacttgccattgttgttttagcaggactcgttaccaagaaggagaagtcacaaagagagtggtcaagaatggaagtgagttggcatcttacagaggataagactggagtgatggatatactgaagcttagctacaacttcttgcctggaagattaaagccttgctttctgtattttggaatctatccagaagactatgagatcagtgcaaggcgattgatccaatattggatcgcagaagggttcatacaaccacaaaaaactggaattgcagatacaacagaactggaagatgtagctgacttttacttggatgagctggtggatcgcagcttggtgcaagtggcaaaaaggaggagtgatgggggtgtcaagacatgtcggattcatgatcttctacgtgatctttgcttatcagaaagcaagtatgataagtttctggagtttgcacaactccaacatttttaccgtcagtaatgccaatccccgtagaatgtccttccactggaaacca

SEQ ID NO: 25848 - DNA, 285 bp, Glycine max
cctttccatttcgtaaacctcccttccgaaaaactcgctcgtgacatcgccacccgaagcatacttgtgaaggggatgtatgagctgtggggtgaagggagtagctatgaggagttgaaggagtctgtgttgagttaccctgacgaaaggaagttgccgtacttggattctgatagcactttcaagattaccgtcgattgctttgggaaggtcattagcttggaggaccaaaaggagctcattcaagggctctcttatatccctgtcaagggccgagtaaagttg

SEQ ID NO: 25849 - DNA, 359 bp, Glycine max
gccaaattcatcaagtgatttgatgcgtcgacgagaacgagccaatgcattttgtaaggcaatccgtgctctggatgctacagatcttcctgcaaatagcgttcgggacttgttcctgcctgctatacagaatctcttgaaagacttggatgcattggatccagcacacaaagaagcccttgaaattattatgaaggaaagatcaggaggaacgtttgagtcttttagtaaggtgatgggtgctcatattggccttccatcatcagtgaccagcttctttggtgagagtggattgcttggaaagaaagaaaccacagagccaccatcagaagcaacagtgtctcccaaagctgctgcac

SEQ ID NO: 25850 - DNA, 446 bp, Glycine max
caaaatagtaacttttcattaaagtgtcatgaatatatctctattctgtactgtgatttcgaatgcattttcaatttggattttaataaaaactttttggattccttaatcagtgccctagggttacttattagcaagacccttgtgctatcagtttaccattataggttctcttatagattgtagattagtggtaggaatctcgacatttgctgctcatattatgccatatggttcttggtggtgccggtttatccacaattgcttgtcgctaggattttcatggccattgccgttgaagactcgcagtcctaaccaagcttctggagcctttcttttgatagagtcctttgtcttttttcaattgttaatttcatgcaactatgtagatatgggactgaaatggtatttctgctgggtaaaaaaaaaaaaaaaaaaaagggcgg

SEQ ID NO: 25851 - DNA, 523 bp, Glycine max
ccaatttaaaagctctccttcgaagtttgcactaattttcatttttcgcaccagaacttttctatccatttcgacatcgctgtcgtgctcctttaccctaaggaattcttctggcctctgtgccttcttcacagttgcctcacgcttatttcgttagtttcataagatgcctcgggaaaaagcaatttcttcatcagctgctaagccatctgagcctgaggagccagttgaatctgatgagaaggttgattttgaggaggcaaatgatccagaggaagcaatggaagaggaaattgaatatgaagaagtagaagaagaagaggaagtggaagagatagaagaggaagtggaagaggtggaagaagaggaggacggagatgtctgtagaagatgaaggggcagtggcggtggagactcgaagtcctaaccaagcttttggagcctttcttttgatagagtcctttgtcttttttcaattgttaatttcatgaaactatgtagatatgggactgaaatggtattt

SEQ ID NO: 25852 - DNA, 293 bp, Glycine max
aaatgtttcagattgatgattctttcaagccatctgttatgcagctgtacctcaggcccggaaagcatccttggctcgatttttagaaaaacgcaaagaaaggttagtttgggtgcattatttttctgggtgggtgtactgaatctgacacaatttatatttctccaaaaaaggaaggcgtagtagttatcatccattggttggcaacataaaaatttatgagtgggattggaaagtacagccaatcattcctccacctgtccaccaactctttcctttacacccctttaaat

SEQ ID NO: 25853 - DNA, 483 bp, Glycine max
tctgctcctcagtttctccaaacccaaactttcacgacaggtgcgtttggttttactttaaactattcaatattcatctgatcctctagcttcattcattcattcattcatcttcgttcagatcatgatctgtgccttgcaccatggaaaaattgaattagcttaatttcactgaatttatgcatgattaacgggaatctaatgttgattcttttttatggccagatttcgtttgaaattttgtttgttttattttgttctgtttttggtttgcttgattggctttaatttattgagatgtaaaaaaagtgttcacaaggaagaggcaattcagctacgtgtacggaggaattcattcttggatatttatgattaaaaataaattttggattttgtactgctatgacagagatttgcatgttttagcatattaggatgtgtagcattgatgcgttccctgtttggcgtcttttgtgcttcgat

SEQ ID NO: 25854 - DNA, 457 bp, Glycine max
cctcaattgaatgaagcattgcaaattgttggtagcaaaggtcctgagcgtgaccttttactggtttatggacctgtgaggagccatcttggttttcctgcatggagacttcgttacacagagatcagacacatgggatcattgaacttcttgagatatggttccttaatgaaagccatttacaacttcacgaaagtgcaccaaaattatggtacgtagaaaaggaatttggaggtagttaaatgcacaagcacaaagcataggcgtgaagaatagaaaaatatctagctaaatatatttgtggaaaaagggctttctcactagtggttttacttactctaaatgtgtcaatcatcatgcatgagagatagaattgcacgtcatgaccgggttgtaccaactgttaatttttttttttttttaagatctggtaatttaaaaggtggattgatctggt

SEQ ID NO: 25855 - DNA, 322 bp, Glycine max
cggctcgagctcgaccgaatcccgctgcggtttcttcttcctccccttggtcttccgggacgcacgccgtgggcaggggcagtgtcggtagattgaatttgagacacggcgaaaggagcgtgcttttcaccgattccgattccttcactacttcacacgacgatgacagtgatgttggtggagagagggagagagcgggtctcgcttctaattctgcagccgctgatgagttggttattccgtttaactcatccaacgagtggtttagacagactttcgcttcgtggcagaaaggtgacgtcttgggaaatgggtccttcgg

SEQ ID NO: 25856 - DNA, 425 bp, Glycine max
tggtcatcaccactaggggtcttgatgatctaatcagtttattccggcggcctccctctcgaaaagtgaaaactgcatagtggctagcaggattttccaacatagttctgaagttttaaatagtatcttaggatggaagtttctaatgaaaaagctctgtatcggattttttttcgtcctttgctgaagttggttgctttagtggataaaaacagcaagatattttgttttggctgtgcgaaattaacgacgccaaagttttgatattttttgcccgtttcatttggcgcatttttgttgtggtaaaaaaaatgcttactaattcatgccttttgaacacagggttacccgggttgttataggcaaggcttgtttacatgttacttagtctcggctcaataaaggatccgtttggttgatttgtc

SEQ ID NO: 25857 - DNA, 372 bp, Glycine max
ggagagagagcctcacacaaaaggcatcactgctcaaaccacaataagaagctaagaagcctaataataagtaataacaccacacaccattttctcttataagttctgttctcttcaaaatggagactaataatgcatgtactatgcattctcattgcatagagatgtccatggaagtgcaccaagttgtgccaccacctcacaagagcacccttcagaaactcaagggtaggctcaaggaaactttcttccctgatgatcctctgcgccaattcaagggacaacctcttaagagaaaactgatccttggagctcaatatgtgttccctattctccaatggggtcctaagtataatctcaaactcttcaaat

SEQ ID NO: 25858 - DNA, 284 bp, Glycine max
atccatctcttcatctgtgtcaatattgtgcatcacttatggggcaccgttgattgggaacgagtccttttcccaaaccattttcaaagaaagatggggtggcaacttctgccacgtggtgtcaaagcatgacataatgccaaggttgctctttgcccctataacctctctctctacccagctagattccctgctacagttttggcacttgtccatgacttcaccagattttgggaagcttgcaaatcagatatctgaacaagagaaagataagttgttcactg

SEQ ID NO: 25859 - DNA, 643 bp, Glycine max
aacacaaggagactttatccgatgcttaatcaaagaagtggagggtgctgcatttacagacattgaagacgttgttctctttgttaaatggcttgatgacgagctttcttatttggtggatgaacgagcagtgttgaaacacttcgattggccagagcagaaggccgatgccctgcgtgaggctgcattcgggtattgtgatctgaagaagctagaatctgaggcttcttcgtttcgtgatgatcctcggcagccatgtggtccagcccttaagaagatgcaggttctctttgaaaaattagagcatggggttttcaacatctctagaatgagagaatcagcaacaaatagatacaaagtcttccacatacctgtccattggatgcttgataatggttttgtgagccagatgaagctggcatctgtgaaattagccatgaagtacatgcggagagtctctgctgagcttgagacaggtggtggtggtggtcctgaagaagaggagatcgttgtccaaggagttagatttgcatttcgagcacatcagtttgctgtcgggtctgatgtggagacaatgagagcattccaagaattgagaggcagagcgatgtcatgcaatcttcaatgtcatagccagcaacag

SEQ ID NO: 25860 - DNA, 273 bp, Glycine max
ctaaatcgcactcacatcatctcttctatctcctcagtactccggcgatcggagcctctaatccgccacgttctccctatctcctctttctcaactccagaatctcgtcctcgtgagagaaaataaaagttagttagggttacgcacagttgattaattaattaataatagaaaaaatgagctttcaggacatcgaggccggccgttccttcgcttcccggcgaaatctaatcaacggcaaacaagaccccacgcaggcggtggcttccggca

SEQ ID NO: 25861 - DNA, 671 bp, Glycine max
ttagtcagctgcatgagaaatccctgtttgaggcaaacaactcattccttgaaaaacataaagattctttgatgcatcgagcagcttttgcagaaatcttgcacattttggattcaaacagaaagtctgaggctgttaagttcgttgaagagtcaacaaataacattgtgcccagaaatggagcacttggaccaatcagggaatggaatcttacagactgtattgcagttcacaagcttcttgaaacagttcttgctgatcaggatgctggattgagatggaaggtgcgttgtgcagagtatttcccatattctacatactttgagggatgccacagctctgcctctcccaactcggccttcagtcagttacgtaagaactctgaaaatgagagtctaaaccattcagtggatcggtcaaaatgtgggctccatcacatcaaacgggaaactagaggcatttaaagatctcactatctaatcaagtcgaaatacacatccatgaggctaaatatacatgcgtgttacccagcttggatgcttgcaaaaccaaacggcgtttgacacttccagaaacgactgtgttgcaatttgcagcaacaacggtcacagttttggtgcgggttatggcaaattctacacacgttattccgatgtattttctttgcatga

SEQ ID NO: 25862 - DNA, 507 bp, Glycine max
cctgaaaccaaatatattgatatggtgaaacatgtgatcaacattagagtcctaggagtcctagaagagctaaggctgtctgagcgtagcatctacaaggttccttgcacactccgaaaggtgaaggaggaagcctatactcccctgtgcatctcaataggcccaattcacctcggcaaacaagaactcgagccaatgcaagagcacaagctaagatacttccaattcttcttgaaacgtgtctcatatgaagccatgaagacttataaacactaccttgagaccaatgaaaaacagattcgacaatgctatgcagagaaattccctggcatggcccaagagaaattcgtggacatgatgttgttggatgctgtgttcatcatggaacttttgttgagaaactgtgaattgaaatcacaaagtttcaagcacgagcaaaaacacaaggaatccaaatcgtttcgagggagaaacagtgaagatctcatcatgacaagtcctggctca

SEQ ID NO: 25863 - DNA, 269 bp, Glycine max
ctcgagccgctcgagccgctctccctcgtcttctcactttcacacatccatccatgtcttgaaacgatgcttcgcagatcaagcatagtcgattccaattcgcgcaagctcatggacggagatcgctgatacggcgaaccagatcgttgcacgagattcgtcacgtgacactcgatcttagttaggactagtgctagaaagcagaagctacttggttcttttgaaggtttgatttggatgtggaaataatgtcctgcaaggatggtagc

SEQ ID NO: 25864 - DNA, 344 bp, Glycine max
ccgaagttctgcatccaatgttgcgactgagtctaacatggctcatccaagctctttgtctgaaagtttgtatggctcatctgatatgtcctctggtgaagataaccactatcatgttgtgatgcccctacagagtgacaaatggtctaaaggaaaagatggttatcttgtcactgatttatggggtgcagaagttggtacgtgggtgtttgcctctccaacagtttggcttcaacatacaggagagaaaatgtatctttgtgtttatcagcatagaagccttactttgatgcttctgattcctgtatcatccattcctaacggggagcaaggtgtgtcggcag

SEQ ID NO: 25865 - DNA, 517 bp, Glycine max
catgtgatatcaactccaagactgtatatttacattatctttttgttcgatcgagcaagaggagttggagctggtaggaaagggggctcaaaattttttcctatagaggagccttgcaagagtttttggaagttgaggtacataacccgaatgaagtcaccgattctattgttttccgttattttcctaaaattttgcatggagtactgctaccatcctaccactttagagaataggcctaactgaagcttaaaattttggctagctgtgaatgggcaaatgtgacactttgcagtttccttgtgataatgtgcatcattgtgggtttcaagggttctttgctgattttgttttcatggtcatctttgttgttcatatgtaattttgttcccttatattcccgggcattggtatccttatgggttttgttgtctatataatggatttttgaggaaaaacatttaaatgaaacattttcttcggtggtggtaggcattcagataaaaaaaagaacgaa

SEQ ID NO: 25866 - DNA, 365 bp, Glycine max
tctgcatccatattctatataagtgagaagtgagaagtgagaagaatgagcaatacaagatcttaatttctttcacaaatcacaatggttacttgtcctggttccataataatccatttcttcctcttctcagcgcctctcctttcagtcttatggtcttgttcatcagtttctgcattgaaaccccgtgccttcatcctccccatcgagaaagacccaaccacccttcagtactcaacttccatcgacatgggtacccctccactcacactagatctagtcatcgacatcagagaacgcttcctatggttcgagtgcggcaacgactacaactcctcaacctactaccctgtccgatgtgggac

SEQ ID NO: 25867 - DNA, 574 bp, Glycine max
tggatcttctttcacatttcttcccaatgaagtttatcaaaaagttgtaacagagtttgacaaacaagtaaatgcgtccaggattgttctccaaagttcatgggagtactgctataatgccagttcacaggagttggttaacattccaccattgaaactcgctttttctaggaatcaaacttttttaattcaaaatcctattttttatgatcctgctagtcaggaacaggaatacaccatcttttgtttgcctgtaagcccttctgctgatgactacgctgccattggacagaacttcctgatgggttatcgattggtgtttgatcgggagaatctaaggtttggctggtctagatggaattgccaagatagagctagtttcacatcaccttccaatgggggatcaccaaaccctttaccggcaaatcagcagcagactgtccctaatgctcgtggtgtaccgcctgccattgctggacacacgtcccccaaaccctctgcagccacacctggacttgttactacctctaggcattccttagcttcattgtaactgatatgtcacctttggctt

SEQ ID NO: 25868 - DNA, 606 bp, Glycine max
attctatcagatggaaatggagatgatagagtgtcagctcgaataatggataacttgagcaaaagaaatctccagtaacaagatctttctttagctcaagttatccattattcgagctgacattctatcagatggaaatggagatgatatggcagaaattgaagctctcttagaggaagcatctgaactcgttgacggttcacagcagaagagcccatactattatctcacttacaaagttaagtatgttatgaagaggcaagacgatggatcatggaaattttgtgaaaatgatataatggaaacaccatgaccatttgagctcattaccatgccacgctaggataactgatgttgcagctaacttagttccttccctactgttttctggagagccgtaaaattcaaaatacgatcttcatttaggctgatgatggtattgaccctgtaaggaattactgatcgattggaattcattggtattcatcagaaaagttgaaatttcttattcaattttctgctaacagaagtaatgtgtaaagatttctttctttcattttttaagtcaagaatttatctatcttgaatgtcaaaaaatgaaagaaa

SEQ ID NO: 25869 - DNA, 408 bp, Glycine max
caaaggtcaaaaaccatttccgattggaattttcatttattcgcaacactccccaactaccggttggtcagagtcacgtttttttcattcttccctccatccctctccctcacaatggcgaaaaacccgttactctgctcgctcctcctcctcgccgtgctcgccggagccggaccttccgacgaagacggcgccgagctcgactactcgaagctctccggcattataatccccggcttcgcgtccactcagctccgagcatggtccattctcgactgtccttactctccgctcgatttcaaccctctcgacttggtctggctcgacacaaccaaacttctttctgctgtcaattgctggcttaagtgcatggtgttggatccttacaaccagacagatcatcctgat

SEQ ID NO: 25870 - DNA, 520 bp, Glycine max
cttcaattcaatcttcaaggtcctctcagagttccacaagttgcttaagcttgacaggaaaaatgggttcccttccattttcatgggagtctaccctggctcattttatggaagactgttcccaaacagttcttgctctttgtccactcctccttcagtcttcaccggctttcaagggttcctccatcactctatgctgagcacaaaaggccattgaacaaagggtgtgtttacatttgtgaatcaagccctgaagtggtgtctcaagcatactatcaacaattccaagaagatttttccttgttccttaggtcaaggtcagaagaactagtagtaggtggaagaatggtgctgatatttttggggagaaggggcccagaacatgttgacagaggcaactctttcttctgggagattctttcccgttcttttgctattctagtctcacagggagatgtagagcaagtgatgtttgattcatatgatgtacatttctatgcaccatcaagggaagagatag

SEQ ID NO: 25871 - DNA, 427 bp, Glycine max
tgctatttccttaccaacacaactcgcagccaaatacaaccttgaacctaagtttgcactttgtttaccttcaacttcaaagtataataagcttggtgatctctttgttggtggtgggccttactatttgccacctcatgatgcttccaaatttctttcctacactccaattctcaccaacccccaaagcacaggtccaatctttgatgctgatccttccagcgagtactttattgacgtgaagtcaatcaagcttgacggtaaaattgttaacgttaacacctccctgctttctattgacagacagggaaatgggggctgcaaacttagtaccgtagttccttacaccaaattccacacttcaatataccagccacttgtgaatgactttgtaaagcaagcagcgcttaggaaaataaagagagtg

SEQ ID NO: 25872 - DNA, 615 bp, Glycine max
cttgtatactggaattaatacaaggcacttattgaagacaagcaagatggtcgaagagttttctggtatgtatttacaaccacacaaagctgttgtaggtgataatgcctttctccatgaaagtggcgttcaccaggctggattgttaaagcatagagctacatatgaaatattgtctcccgaagatattggccatgaaaagtccagtggagttaatatggtactagggaagctaagtggacgccaagctttgaaaagtcgtctcaaagagcttggctatgaacttagggatgaagaagttgaaagtgtgtttaggaacttcaaagcaatagctgagaaaaagaagagagttaccgatgttgatctcaaagcattggtatcagatcaagcttctcatgctgagcctatttggaagcttggtggtttgcaggtgacttgtggaactatgggttcttcaacagcaactatcaaacttgttactagtgatggtagcacacatgttgcttgttctgttggtgtaggaccagtagattcagcttacaaggctattaatctcatagtgaaggaaaccgtaaaagtacttgaatactcaccaagtacagttacaggaggcac

SEQ ID NO: 25873 - DNA, 217 bp, Glycine max
agacaaaacctaatggagcagagcacaagttttgtgcaaaatccttggaaacattaatcggttttgcaatttcaaagctgggaaagaacattcaagtactttcaagttcctttgtgaataagcaagagctatacaaagtggaaggagtgcaaaatcttggagacaaagcagtgatgtgtcataggctcaatttcagaacggtggcattttattgcca

SEQ ID NO: 25874 - DNA, 443 bp, Glycine max
cttatatgttggatccacatgttaggaaaattagggatgagagatataggtggaagtatagttgtggagctaagggctgcacaaagctttttcatgcagctgaatttgtgcacaaacatttgaagctaaaacaccctgagattgtgatggatctaacatccaaaatgcgcgaggatctttattttcaaaattacatgaatgatcctgatgctcctggtggaatgcctgtcatgcagcaacctcagaaggataggcctcttaagcgaagattaggaggtttagagggccgattgaaggatgaccgtggtaaccggcgagaccaggacaggagtgacagaataaacggagataggcctgatggttccccatcccatgaaaggcaaatgggaaatcatgatgaagcaatgtatgatgcatatggagggctcggtgtacctcaattt

SEQ ID NO: 25875 - DNA, 272 bp, Glycine max
acagattctatctcctctctctctctctctgacacacagacactcagacactctgtttccattttatctctttgggccattcattctcgcaagtcactcttgtttgtcttattaaatggctgagactcgccggcgaagatgaagttttccggcaaggggagttttccggtgggcattgctttgaggagcgtgaacaacccttcgccggactcagatcttgaaccggcgaagcatttctgcggcggaatccgagaactccggggacacggttg

SEQ ID NO: 25876 - DNA, 275 bp, Glycine max
ccgaaaactgaagtctaagattacaaccaataattggacagaatatttatgtcattttctagagatgatcaatattcctgaactacggcaacataaaacaactataaaacggggacattatggccttgtagatgccagtgctaaattaaaaatcttaggcgaattggtcaatcgagcccttgaaactgcaatattcagggaaaagttagatgagattattgaacagcggcaggcacttggggccactagaagggaagaagcattggaaaatggta

SEQ ID NO: 25877 - DNA, 262 bp, Glycine max
caaaactttaccaaatctataatcttccccttctctcactctctctctctctccctccccccccatctccttgatgaagtagtgcaatcaagctatgatcaagccttttggggcttcgattcatcatctttttgtgctaattaattgaacactttgaaaattaatttaccatgtccaccatgaagaacaatttcaaagaccaagaccatctctactcttcatggagcttctcaaagctaatggctttcttcttcctcttaat

SEQ ID NO: 25878 - DNA, 403 bp, Glycine max
ggacacccacgaagcacaagttcagtttgctcttgaaagaggagttcctgcattaattggggtcctagcatcaaagaggttgcctttcccttctagagcttttgacatggcacactgctctcgatgcctcattccttgggctgaatatgatgggctttatctgaatgaaattgatcgaattctacgccctggtgggtattggattctatctgggccaccaatccggtggaagaaacattggaaaggatgggaaagaacaaaggaggatttgaataaagagcagaccaaaattgagaatgcagctaaaagcctgtgctggaacaagctagtggagaaggatgatatagccatttggcagaaagccaaaaaccatttggattgcaaatccaatcgtaagctcact

SEQ ID NO: 25879 - DNA, 224 bp, Glycine max
gaaagttagaatttagggttgatgaaaagacctaaaaagagaaagatgacgtggggaagtcattgaagccaatgagcatgacctcggcacgcaccttcgcgtgacaggtgcactcccgccacactccatcgccacaatacaatacaacccaatcttctttgctctctcttctgccctaattcccattttcccaactcctccataaccaattccatcttcaaata

SEQ ID NO: 25880 - DNA, 537 bp, Glycine max
gaatatatggagaagggaactctcaagggtcatttatatggttcaggtctgccaagcttaagctggaaggagaggcttgaaatatgcattggatcagctagagggcttcattaccttcacactggctatgctaaagctgtcattcatcgcgatgtgaagtctgcaaatatcctacttgatgagaacctaatggctaaagttgctgattttggattatcaaagacggggcctgaaatcgaccagacacatgtgagcacagctgtcaaaggtagttttgggtaccttgatccggagtatttcaggaggcaacaactaacagaaaagtcagatgtgtattcatttggggtagttctgtttgaagttctttgcgcaaggcccgtcatagatccaacacttcctagagaaatggtaaacttggcggaatgggcgttgaaatggcagaagaaaggacagttggagcaaatcatagatcaaacacttgcaggacgaatcagaccagattctctgaggaagtttggagaaactgctgagaaatgc

SEQ ID NO: 25881 - DNA, 241 bp, Glycine max
tgacatgtttttttgcttaaacaaatgttttcttactgcttgtagatgaataaaatgaatctatttgcaggtttgtttcctgccttgccttcattcaggctcaggaatgccctcaaggccttcttctctctggcagtggtgattccacagttcgattgtggcatattgactctggagcacttctagatacttgtgaggttgcaatcaaggcagggcttttagagtctaatggtaaagcaga

SEQ ID NO: 25882 - DNA, 244 bp, Glycine max
gatcaacatttctttgttactacggaaaggaaactggaataaggcactgcagaagtcatatacaatggaaggtatcaacatcataatcaacaacaaacatggctactcttcaaaaatctaccataaaactatcaagtaatatccatcagcatcaacaatttctaggcatgtccaccaagaataatccaggggactgaacaagaatttgcattcatgtatggtttcatgtcctcttgatctttga

SEQ ID NO: 25883 - DNA, 281 bp, Glycine max
atcggctcgagcttctgaacactggactggcacgcataggtttcttcctcgcctggctagcaaacttcagactcttactctttgctttcgatatgggacctttgtcctctcacccattaatctctcttccacgttttgttgctggggcgtgcttccctatcaagatccaacaaaatcaacctcgtcaaaatggtaaaaccccacatccaaatccatcttcaatgatacggtatgccatagagggtcttgctttgggcgttttgctgaaaatctatgactac

SEQ ID NO: 25884 - DNA, 420 bp, Glycine max
tggtgatgatcttgacagtatggcgagtgatgctatgtggactgatgctaatggcgttgttgtgggttgtgaggattctaaacagagaaaggagctaaaggggtttcttcttgattgtgttatagaatatctagaatcaaattgctgccaatattttaactctggattcaagaaatggacgaagctgcccttgtgcatggaagctgagatgttggctcaagaggtgaagagggagatcaacaagtggttatctatggttgggatggtgcctgatgaaataatagaatgggaaatgagccactccttggggagatggactgactatgacattgaaagcattgaggctggtgttgatatagatggcgatatacttcaaattttggttgatgaagtcgttcaagacctgcaagttgcaaagca

SEQ ID NO: 25885 - DNA, 263 bp, Glycine max
gagaattacaactgagattaaattgctatctgaagatgcttctaagccctctgccacttgcaattatcacgaagctatttccatatataaaaggattgagaagctgcaaacagaactctgtcatccttgatcaatcaacttgatgcatactagggagaagattttgaagtcactaatggagctggaacactggacagaagctttagcatattgcaaattgaccataccattctatcaaagagtgtatccagctgttcaccctc

SEQ ID NO: 25886 - DNA, 353 bp, Glycine max
tagcaacattttgctctcaaggccacagcaatggccaacaaagtccatgttttgttgtgtgtccttgtgacaacgttgttgagttgtgatgttgttgttgttgtttggggccagacattcgcttgtgatgttgggaagagccctgcagtggcaggttatggtttctgtgacaagtctttgggagtggaagcaagggtgaaagaccttgttgggaggttgacattgcaagagaagatagggaacttggtgaactctgctgtggatgtgagtaggcttgggattccaaagtatgaatggtggtccgaagcacttcatggagtgtccaacgttggccccgggacgcgattctccaa

SEQ ID NO: 25887 - DNA, 751 bp, Glycine max
tttgttgcgtgttcaagggttggattgaggaaaatggaactgcacctgtgaaacctggtactgggcttactgttgcagtcaagaccctcaaccatgatggactgcagggtcacaaagagtggcttgcagagttagacattctcggtgaccttgtccatccaaatctggtcaaattggttggtttctgtattgaagatgaccaaagattattggtttatgaatgtatgccccgtggaagtttggagaaccacctcttcagaaaagggtcgttgcctcttccttggtctatcagaatgaaaattgcacttggtgctgcaaaaggtcttgcttttctccatgaagaagctcaaagacctgtaatctatcgtgattttaagacgtctaatattctattagatgcggaatacaatgccaagctctctgattttggactcgccaaagatggtcctgaaggggaaaagacacacatatctaccagagtcatgggaacatatggttatgctgctcctgagtatgtcatgactggacatttgacatcaaaaagtgatgtctatagttttggagtagtgctacttgaaatgctcactggccggcgatctatcgataagaatagaccaaacggggaacacaatcttgtggagtgggcaaggcctgtacttggggaccggaggatgttattacggataattgatcctcgccttgaaggtcacttctctgttaaagggtcacagaaggctgcgcacttgctgct

SEQ ID NO: 25888 - DNA, 472 bp, Glycine max
gaaatgagatgcaatgcatgctggcgagaagtagaagggcgagccatttccacaacttgtggtcacctattatgcacagatgatgccaataagatactcagcaatgatggagcatgtcctatttgtgatcaagtcctttcaaagagtctcatgaaacccgtggacgtcaatcccaatgatgaatgggtcaatatggccatggcaggggtatctccacagatattgatgaagagtgcatatagaagtgtgatgttctacttggggcaaaaagaactggagatgcagtttaagatgaacaagattgttgctcaatgccggcagaaatgtgagatgatgcaagagaagtttacagaaaaaatagaacaggtacatactgcttaccaaaagatggccaagaagtgccagatgatgcaacaggaaattgagagcttaaccaaggacaatcaagaacttcaggaaaaatttgctgaaa

SEQ ID NO: 25889 - DNA, 270 bp, Glycine max
tattaatcacaactagttgatcttgctaccacttatattgatttgttggaactcctctgtggggtgatttgtgctgcttacacaaatgatgtcttctcagaaacctgtataaaattgaaggtaaatgacatatatatgaattcaattgaattcaatcgaatttaaaaagaaacatacttaagtttaaccagctggatccaaatgtagtgatgtgtcatttgtactgtaaggaaattataaaagtgtttcagtactcgttgattgcatctg

SEQ ID NO: 25890 - DNA, 297 bp, Glycine max
ctcgagcagttcaagcaattctcactttctcacaaatggccaatcccttcccaacattcctcccctcttccctcatcttcttttccttcttctttttcttattctcccctctcaccgccgccaaaacacaccgtttcgcgcgcaccatctccccctcctccctgggcctggacggggagcctgagaaactaagccacctccacttcttcttccatgacgttgtcagtggccaaaaccagaccgcggtgcgagtcgcggcggccccggccaccgacaagtccccgacgctcttcggtg

SEQ ID NO: 25891 - DNA, 450 bp, Glycine max
caattcttcgctttaacgaaaaaggacacattttcccttacaatggcacgaaccaaacaaactgcgcgcaagtccaccggaggcaaggcacctcggaagcagctcgccacaaaagccgccagaaagtcagctccggcgaccggcggagtgaagaagccgcatcggttccgccctggcacggtggcgctgagggagatccggaagtaccagaagagcacggagctcctgatccggaagctccccttccagcgcctggtgcgcgagatcgcgcaggatttcaagaccgatttacggtttcagagtagcgctgtttccgcgctatacgaagcggcggaggcttacttggtagcggttgttgaggacactaatctctgtgccattcacgccaagcgcgtcaccatcatgccgaaggatattcagcttgcgcagagaattagaggcgagagggct

SEQ ID NO: 25892 - DNA, 437 bp, Glycine max
tctaaagtctgaatgggtgtgacacacaagaaaaacgagcctattgtttttttcttacaccaagcacctaactctcactccttcttcttcgctttcttcacactcccaatttgctcaccatgatctccaattctcttccctcgtaaccagatcatccaaaatgatgaatcacgattccgacgaccaacagcatcacattctccacgcctcccaggacgacgagataatggactcgctgatcctccaccacgacgacgacggctcctccgttcaccatcaccaccgtcctacgtcgccgcaaagccctaattcccctttcaactcgttccttgaccctccctcttacgccgatgcaatcttcacctccttcgattccaacggccacgaccaagccgtcgagtccctcgccgcccgattcggctccggcgactacctcc

SEQ ID NO: 25893 - DNA, 480 bp, Glycine max
ccatatgctattggttggaatatagattgactttgtcaacaacataactccaccggagaatctagctaacgacctttacccaccaaccatgttcttttctatccagcttgaacccgagactttggttaaggaatctaggctcaattccactccattttctttcatttgaacttatggttatataccttagtgtataagtattcaaggtagctgatattcctggaacagtatcaaaaggggcaccagatttctgcacagtatatgttgttgctaaagggaagattcaatccatgcgatctgcttctcgagctgcccctgccttctcccctctacaaaaccagcttagtcatgccagtgctaggtcagaccattcagaaccacgtgggcctctggttaatggtgccaaaggacctgaaaggaggtcctttgaggcaccaccccgtagatcacaggatgcaccccgtaaatcaaatgatggaa

SEQ ID NO: 25894 - DNA, 336 bp, Glycine max
aatctgatgaaattagccatcaacttgtcctctgcctcccccacctagtgatttttatgacaagacagcttcaatgaaccaagcaagaagtgtcaggcaaaatacatctgctagtggtgctcgtcctaatcctcaagggtcctttcattatggctccatcaatataactgatacttatgtgtttaaggttacatccctggtgccaatcaatggtacaaatcgagctactattaatgggatctcatttctcaagcctgaggttccattccggcttgctgacaagcatcaattaagaggaacatataagcttgattttcccagcaagccaatgaacag

SEQ ID NO: 25895 - DNA, 942 bp, Glycine max
caatctccttttgtccaagacaaacacaacaatggggaaccaatcctcttcaaacaagatagaaactcttcccatcgacacaacatttaagcttccagcaaatataccagtttggccacaaggtggtggatttgctactggaaccatcaacataggagggctaaaattgtttcaaatttcaacattcaacaaagtttggaaaaccttagaaggtggaccaggtgatgcaggggcagctttctttgagccagcaggaatacctgagggattcttcacactaggccactacagccaacccaacaacaagcctctttttggatcaattctggtggcaaaagatgagacatcatcaggtgacaataatggagctttgaagaaaccaattgattacacacttgtgtggagcagcaagtcccaaaagatcaagcaagacaaagatggctatatttggctaccaacagcacctgatggctacaaaaccttaggccatgttgtcaccaccacacctgagaagccttcacttgacaaaatcaggtgtgttaggtcagatctcacagaccagtgtgagagaagctcatggatttggggaccagacaagagcagtgatgagaaaggtttcaatgtttatgaagtgaggccaagcaatagagggactcaagctcctggtgtgcttgtaggaacattttttgctcataatggtgaaattccttcccctctccctattgcttgtttgaagaacaccaacatgaacttctcctgctccatgcctaatttgcctcaagttaaggcacttgtccaagcctattctgcattcatgtacttgcatcctggtgaagagttccaacctgcttccaccaagtgggatttcacaaatggggcattgcttgctaagaaaggagaagagtccaaacctgtgccaatagaccctacagggtctaacct

SEQ ID NO: 25896 - DNA, 419 bp, Glycine max
cgtttgcgtgggtggacgcgtgggcttttgtccaagaaaaacacaacaatggggaaccaatcctcttcaaacaagatagaaactcttcccatcgacacaacatttaagcttccagcaaatataccagtttggccacaaggtgcactcccccccgcgtccttcttgatattgtagtgttatttttaacttctaatcacgttttttaaaaaaccacatgcaactgtgattttggtcacaatgccaagattttttgactcaactactgtattacagtttcaattatgatcttatcaacagtatttgtctgtcattttctatgatgtcaatgactgcgataaaattgcaatgacaactctaatctaaaaccttacttctaattatgtgtttcttaggccttcatgaattgaaacttttcatgt

SEQ ID NO: 25897 - DNA, 376 bp, Glycine max
tagaaacagctagaacattcaatttgatttacaccaaggaaattcgtccatggacacacatgatggaggttccgcaacttcatggatttggaccagctgccaatcgtttattggaggcctataaaatgcttttgaagtttttgggcaacctacggaatcttacggactcacatgcagcacttgccttcggttcttctgagacatccgacgggccttcatctgtcacacgaataatctctgaatgtgaatctgcattgacagtcttaaatcgtgatcttggaattctctctgcttccattgctcgtgaacaggtagagaagatgaacatttgacgaaacatgagaaacaagttattaatcctattcttttggatttt

SEQ ID NO: 25898 - DNA, 317 bp, Glycine max
cattggatatgtcttaccttttggatcttcatttgtttctttcgaaaccaatcaaacctgctcccaccgaagaagagttcttgcaggatatggatggagtaatgtctagatgtgaacaggcaatggcaaatagagaaaccatttatggtcgtttcccacaaaaagtcatcgtccttgtttcagacagagttagggaaattattgatacttctgcggaactggaattattgcagagaacctgtaaaaatgcatttcgtttatattcaaaaacaaaacccttacccgcaaaggagtccattagaagagtaaaggatttg

SEQ ID NO: 25899 - DNA, 899 bp, Glycine max
cgggtcgacctggtggactcgactcgtttaaaaactactccgagggagagaatattccggtgaacgatttccggcgatatagccgcgactccgccgggcataaagatggttttctgagctacggcacgaacggcaacgtggtgcagcagagcttccatacctaccccgccggagccaccggcggcaccggcgagttcaagcactacgccgacgaaaccaacgtcccgaacctcggcttcacctcctactccgacaacgccaacggccgaacccaatccttcacttcctactccgaaaacggcaatgccggcgagcagacattcacctcgtacggcaaaaacggcaacggcccgaccaacgtgttcacctcgtatggaacagagtccaacgttgtcgggtcagggttctccaactacgtcgagaccgccaacgccgccaacgacaccttcaagggatacggcgtcgacatgaacaaccccaccaacacgttctccaactacgccggcggcggcaacggcgccgtcgagagattctccagctaccgcgacaaggccaacgtcggcgccgactccttcacctcgtacgccaaagccgccaacgccgcagacatcggattctcgaactacggcaagtccttcaacgagggaaccggcacgttcaccacgtacgctaaatcctcggatggcgaaacaaaagtagggttcacttcctacggcgtaaacaacactttcaaggattacgagaaaaagggtaccactgtctcattcgccaggtacaccaacattagcacgaccctctcagtttcagcttcatcagtcagtggcagtttggtaaataagtgggtggagccgggtaagttttttcgtgagaagatgatgaaggaaggaaccgtgatgccg

SEQ ID NO: 25900 - DNA, 499 bp, Glycine max
tgtcaatatgaggtgcaattgataagcaatgagcaacaaccactctctcgtatctcaccttcttcttcttcttcaaaaccaagttacttattatagaatccttaattttcctaaagttagaattcaatcaatcaggtggagatggtttgggtgaatgagaaactgaaggggttcgtggggcacagatgggtggtgtttgtgtgcgcgatgtgggacatgtcgtttgcggggacatcttacatgttcgggagcatatcgccggtgataaagagcagcatgggtttcaaccagaagcaggtggcgttcttgagcgtggctaaggatctgggtgacaacgttggtcttcttgcaggcaaaatcagccagtcttcccctatttgggcgcttatacttgtcggggtcgtgcagaatgttgttggctatggccttgtttggctcgtcgtcactcacccgctcgccgctttgcctttgtggttgctcatgcattgtaatccttgtg

SEQ ID NO: 25901 - DNA, 206 bp, Glycine max
acgaaattggtacaaaacaaaatgctactgtttctccggctgatgatgcagttgttgtgatgcgtcaaagcactgctccaactgctcgataattattctcgctgttaccgccagcaactgcttcttttgttagatctcaaagactgagttagtggttggaaaaggtttaattaacaagatgtgcaaaagaaagtgtccaggtcgag

SEQ ID NO: 25902 - DNA, 471 bp, Glycine max
tgttcttgttcaaccaccttctgatcttcatcttcatagagaaagtatgaagatctatattttgctagtcattataacttccttcacatttggtttcattgagaaagttgtttcaaatccaagtctctcgtccatatacggcaattttcaactttggtgactctctaagtgacaccggcaatttccttgcatctggtgccattttattcccagttatcggaaagcttccttatggtcaaaccttttttaaacgtgcaaccggtcgttgctcagatggacgactaatgattgattttatagctgaggcatacgaattgccttatttaccaccctatctggcacttaccaaagacaaagacattcaacgtggagtaaattttgccgttgctggagccacagcacttgatgcaaaattcttcatcgaagcaggacttgcaaaatatctatggacaaataattcattgagcattc

SEQ ID NO: 25903 - DNA, 329 bp, Glycine max
ctttaacctggaaaagaataaggaaagacacgtttatattttagatttagatttttagttcccaaaggccacacacaaatacgtacgttgtcgtattttacattctctcttacggggaaagcaatgcaaacccaatcaataataataccaagaaccaatgccgtgtgggttgtggtcgtcctcatgactcatgtgagtcatgggggtatgttaaaaatgttaatgtgctatttcactttcttctttcacaaccataccctaaactaaacccttctttgatatttatattttatttattctatgcctttatgcctaggtaagttattatt

SEQ ID NO: 25904 - DNA, 670 bp, Glycine max
tcggctcgagctctaactaacggcatattctctttctctctccatgccgcagcgcatgctttgatcgaccaagtcacctctctcgcattcttcgtagttccaagatccgaactccgagattccggtgaaccctcctttctctttatccttaaatatatcaacaaccacgacaacaaccttgaccttttttgtttccaccaaacaccattttctttacaacagactctgagaaaacgagtaatggtggtgaagatgatgaggtggcggccctggccgcctctcctctcgaagaagttccaagtgaggctgctcgtgcggaggctccagggctgcgatctgctgcagaacgctgcactccaaggttcaagattggtccttgagattcgctggaagggtcctaagctgatccttggctctctgcgatggaactccgtcgccagaaactctactaaagaggcggactttgaactcgacggccccggcgccgccgtcgttcactgggacgaggagttccagactatgtgcaacctgaacggttacagagacaatgtctttcacccttgggagatcgctttcactctctttaatggattgaaccagaggccaaaaaacaaggttcctgctattggaaccgcattattaaatattgctgaatttgcatcttcaactg

SEQ ID NO: 25905 - DNA, 267 bp, Glycine max
gcatgctttgatcggccaagtcatctctctcgctcccattctccgtatttccaagatcccaacgcactgtcctatcctcccagattccggtgaatccccccttcccttttaatcttaaatatatcaacaaccacaaccaacaaccttaacctttttgtttgtttctaccaaacaccattttgtttttctataacagagtaatggtggtgaagatgatgcggtggcggctcctggccgcttctcctctcgaagaagttccaagtgagg

SEQ ID NO: 25906 - DNA, 282 bp, Glycine max
gaattttctgctcctcaagaggaaagaaataaagagtcttggtatttgtgcacattcactgatgaaatccagccaaagttgcacgttcttggttttggtaactgatattataaagaatgtttgctggttccaaggctattccatctgaatttaatgaatgacagcactgcacttgttccaatgcaccaggtcctcctgaaacggtggctcttgtcctttttcttttatcatttttcagggctttcaaaaattgggtaagtagtaattaacttggatctcact

SEQ ID NO: 25907 - DNA, 510 bp, Glycine max
cgcggttcttcttgttgttggcttgttgctatatataatgattttatatctttgatggccaaccacgatttgatactcggtcaaagtcacaatttagcacttggtcatgatcagcaattggtgctgggccatgaccataatttgggcctcagtcagaaccatgaattggaaatgggatcagcccatgagcaccatttagatctgggacaaactcatgatcatgaactaggcttgggcgcatgcccatgatgaattgggattagaacagaaccatgaacatgaaggtgatgatggtcacacttacgagcatgagcatgagcatgagctagccatggatcaaaagcccgaacatgatgaccacgacttgccccttcctggacaaaatcatgattttgtcctatcagagaacaatgatttgactgtttcagagaaccaagatcttgatgagaacacggccctgtctgtggttcagaactcagacatgggaattgattctgcaaatgatatgga

SEQ ID NO: 25908 - DNA, 273 bp, Glycine max
atggttgatgaatatcttctgggtccacaacatagtgcagtaggagcataaagttaaagcatgaaagactaagctagctagcactaagggatgctatcacaatgagaggtacaaactcaaccaaagatcaatccctcacccagaaacttcttccatgtacactccatgttttacttcctatacctctgctacctttagttctgctatccttttactttcaccctctttctctgactccatcccatcaactaagctctcactttccaccccttc

SEQ ID NO: 25909 - DNA, 285 bp, Glycine max
gtcttatattcttctgggtcttctgtaaatccttgatctagcttgtttcactttgtttcagtcaaggaactctcctctctgatctgccctataaatctactaagcaaacacaaaggacagtcacaattttattttttgttataaaaaaatgtcaatggacatgatggcaaccgaacgtgtttgttatgttcactgcaacttctgcaacaccactctagcggttagtgttccatgcagcagtttgctcaccatagttacggttaaatgtggacattgtgccaattt

SEQ ID NO: 25910 - DNA, 759 bp, Glycine max
ccctcaaaggcaggctggcgtacagcagcaatcatccatgcactagagagcgatatgctaatacataatgaagatacctactgctctgagcaggcaaagttgcatattatacaggaactacttggtacattgcatgcatctgcatctagtagttcaagaactacagctttcaattcacttcttgaagaacttaatgaggacagacctgaagcacgaagcaagatgaagatgatgtctaatagatcttttggagcaacattcctggctagcacaggacaagaatctgctttcgcttataacattcatcagtatgcagatgtttataccagtaagccagagaattttcttctgcactcacctgaagcatggcttcatgttccatttgatgtcaagatcatgcctcatcatgtgaaggttccatcaagcttgttcaaaaccgggtgaacggttctcgcaatcattcaacttattggtggcattccgcagttctaataacggagtaatgatgagctgcaactggaagacaattgttgcagtagtaacgtgcattcaattttattcttgtcattgattccctcatttcatctcgacatagctaactttatctggtatgcttcaattaatagagaaagaaattagaaaaatgaaagccttctaatcatgtatatcaatttttcatatattggatatttgttgctatgctgtctaacaatgaatgaataattatattttacataatatattacctatcaagataaa

SEQ ID NO: 25911 - DNA, 269 bp, Glycine max
tgcctttctagctagttttctgtcacacccaccaaaagatcatcatgtccatgcttagtttccttttcattctcatgcttttaccctcatttgaagccattccttcagatgaagaagtgtttattaatccctcagaagtccaaacccaagacatgcaagccttgattgcacaagcctgcatggacattgaaaaccaaaactcatgcctcacaaacatccacaacgagctcaccaaaataggccctccaagccccacttcagtggtgagt

SEQ ID NO: 25912 - DNA, 187 bp, Glycine max
aagcaatgaaacaagttgcactgcagatattcagttttgctatcaaagcagctggagaaaataatcccgagttatcaaaagaagcagctggtatttgtatttggtgtttgagtcaaaacactgaatgctacaagcaatgggagaaagtttatcaggacaacattgaagcagtgtttcagttctggag

SEQ ID NO: 25913 - DNA, 429 bp, Glycine max
attaagttgaggggttttataaaatggtccctctgtagtatattgtcggtgtactaatcagatgcagatctagaagcagtgatacatacccgagacaattaggaaattcggggttatgactgatagtagccctcggaaatggaaatgattactgattagcaagtgtcaagaagcactgctgttccggtctaacattaaatagtagtctgcaatattgatgctggcataagtgccaagacattgtttgtgtatatgttatcagatgatcttccttcagtgtttatatcataaaatattcattagtatggggcctgtgttgtaagaatgctgtctgcttgtccctgactgtaataatttcattgagatcaaagctctgctaccctgattttagagatgaattttaggtgatatgctatgccactcaaggat

SEQ ID NO: 25914 - DNA, 697 bp, Glycine max
taacaatgttggagatcaacattccattaatgacagaacagttccagtaacatctttacactttggtaatatcactgagtataatgtccacaatttatatggactactagaatccaaagtaactaacacagccttaaaggatataactggcaaaacgccattcatcctaagtagatcaacttttgtcagttctggtaagtatgctgcccactggacaggagacaatgctgctacatggaatgatttggcatactcaatccctgcgatattaaattctggaatctttggaattccaatggttggagcagatatatgtggtttcggaggaaatacaactgaagaactttgccggcgctggatccaggtaaaattgattcagtagtatggataatattttgacttgtgtgaaataaataaacatatatatttaacttcttttattttcctcaatgaagttgggggctttttaccccttcgcaagagatcattcagacaagaactccaataggcaagagctttatctttgggactccgttgcagattcagctaagaaagtgcttggcctccgttatcgtcttctcccttatttgtacacactgatgtatgaagcacacacaaaagggacaccaattgcacgaccccttttcttttctttccctggagatgtcacaacttacgaaataagctcacaatttct

SEQ ID NO: 25915 - DNA, 404 bp, Glycine max
caaagtcggggctatgatgatgtagctctttaaggttatggcactgtacttctatttgtaaatttctgtaccttgcgaatgaccaaagccgcatgaataaatttgctaggatgttgtaccatttatcaatttggagataaatgaatagagtgacgagctggacatctggattgggatctagacctgctaatgtttaggcagaaaaaatgaagtgatggtcgaaagtattatttgggagttgggagctgtctcaagtctggtgccatgtatttggagtctggggtttatcattttccttattattggaagactgtacaactgtataatggaatatgttgttgtatcatgtggaattatgaatatatgtactttcccttaatatcatcttatatatactttgcccc

SEQ ID NO: 25916 - DNA, 405 bp, Glycine max
caaattcaaaacttgaggctaaatgttgctctgtcactcccaactcttcacaaatggatgccgatgaagccaaaatcttgctcggtttccctcccaattctcgtccaactccatcccaggtaaaatcagcttacaaaaagaaggtgtgggaatctcaccctgatctatttccttctcatgaaaagcctctcgctgagtctaagtttaaactggtttcagaagcttacgagctgttcatttaatttttttttatttcctcgactgtatcatcacaagaattcggatgataggagcaattttacaactctagtctagttgtgaatggtgatgatattggtagttgactagacatcacatggtgttagactattacagtaaaactgtgtcgtgaatgagatgatggcc

SEQ ID NO: 25917 - DNA, 1801 bp, Glycine max
cttctggttttcattttcattttcttcaagtcccatttcacactcctcctttctctctctttcattattgagacttctttccagatttctcaatctatggctctgcattttcttctcctgctgctttttgcagtgtctgttgttgcagctgatgaagaaccatttataggagtgaatattggaacggatctctcagatatgccacaccctactcaagtagtagctctactaaaagcccagcaaattcggcatgttcgattatatgatgcagaccaagctatgctccttgcacttgcaaagacaggcattcaggttgctgtgactgtcccaaatgaagagatcctagcaattggtcaatcgaattccacggctgccaattgggtttcccgcaatgtggtagcgcattatccagccaccaatatcactgccatttgtgttggttctgaggttttaactaccctcccaaatgcagcaaaagtacttgtcagtgcgattaaatacatccattcggcccttgtggcatccaatcttgatcgccaagttaaagtttcaacacccctttcctcttccatcatccttgattcatttccaccttcacaggctttctttaatcgctcactcaatccagttttagtcccactacttgatttcttgcaatccactggctcttatctaatgctaaacatatacccttactatgactacatgcaatcaaatggagtgattccgttagattatgcactcttcaagtctctccctcctaacaaagaagctgttgattccaatacccttctccactacaccaatgtctttgatgccatggttgatgcagcatactttgccatggcctttctaaattacaccaacattcctgtagtggtgaccgagtcagggtggccctcaaaaggtggctccaacgaaccagatgcaacggtcgacaatgcgaatacttacaacagcaatttgatcaagcatgtgtttaacaaaaccggaactcccaagcatccaggaatagatgttagtacatacatctatgagctctacaacgaggatatgaagtctgggccattgtcagagaagaactggggactgtttgatgccaatgggacacctatttacattctacacttgacagagtcaggggcagtcttagcaaatgatactagcaataatactttctgcattgcaaaggacggtgctgacccgaagatgctgcaggctgcactagattgggcatgtggaccggggaaggtcgaatgctctccattgctgcagggtcaaccatgctatgaaccagacaatgtgattgcgcatgcaaattatgcatttgacacttactatcataagatgggaaagactcctgatgcatgtgacttcaatggagtggctacaatctccacctcagatccaagtcatggttcttgtttatttcccggaagtgttggcaaaaatggaaccttaggtaacttcacagctccttccatgaattctacaaattcagattcctcagcctacaaattcagctgtgacttgagaattagaagccttttaatggtaacaggatttctattatggggagtggttttgctataaagtggtatatgtcagaacgtgttactttgaaattttttgtggtggatgataatgctacatattcgtcttggtacgattctattgttcatagtggtccattcaattttgtacaaaaaccagctaagggtttggaccgaatgaggccgcaactgaattatcatcatcatcattattattcttttcaactagaattgattcaatctttatc

SEQ ID NO: 25918 - DNA, 385 bp, Glycine max
acggctcgaggaggttataaagcccagctttttataattaggagggtgtaaggtttatttaggtgatggtcattagtaaatttgttcttatttcttaggcattattaaatttgttctcctgtgtttcttattaggtacaatctcagaaagtttaaatttaaatagcaagtttgtgtgattattcctagaggaaaaatcaaatgtagttaaagccaattgttttacccaaactctaaaatttgtgatacaggtagcaaaagccatccaaggtcttctccctgtaccaggagccaaggcgcacgagtcggtaagaagagaattcgaagtaatggagaaaaagaagtcagccattgacaagaaagcagacaccatggttcggcgtgag

SEQ ID NO: 25919 - DNA, 497 bp, Glycine max
caaagcctagaaaaataataaacgtaggaaaggatatataagatccttcttatttccccctatgacctacaataaataacacaagtaaaatatagataccttaaaaattctctcattctgtcaccagtatacactatatacaagcaccaaactcacgataaacatcactcggtaaagctgtatatagaaacggaccagttttgtaaacaaaaccacaataacacgtatgaatggatcactcagtgcttgaagatggcaagcatggacaacacaaccgcagcaccgatgacggaggcagagctcgagactgatccagctgctccggcatccggagccggtgttggagagccctgagcggacacggtggcggagaagagagcgaggaggaggaggatggcgaaggacatgaacatgctctttgttgatgccatgaggaagtgaaagtgaaagaagagaatgagggaaagaggttaaatatagagaattgaatagtggta

SEQ ID NO: 25920 - DNA, 404 bp, Glycine max
gagtcattggatgatcctgatacaaagattatgagacctcaacaggtttatgttggggagtggttgaggcattatgcaccaatcaatcaaaggactacatcaagtaacactgacaaacttggtcaattggctgtatcaaacgcctcaaagaggcgacttgctggatctggggcttaacatagtgaaaatgccaagtggtcaataaagtccacttcagagaaaaaattaatttttttttctggtatataaaataagtttgtttgtttatgtataaaattatgatgtcaaatagataaataacatcatgaaatcaataagaccatggtttcagtattttttttttgctatctgaaaaaaaaagaaagactccttgtatttgcaatgtcataacataaattgtataa

SEQ ID NO: 25921 - DNA, 332 bp, Glycine max
caaacatttcttctcttcccatatatatcccttcttaatttcttatagccagcgatggatcttttgttcttatgcctccttcccttcttattttactctttctttaccctctacaagttgattcttgaacgtagaggccaaccatgctacatgttggcctacgagtgcttcatgcccccggaagacacgaaactcgacacggactccgcagcaaaaatcgtgctacgaaacaaaaaaccgaggttggaggagttaaggtttctcctgaaaaccatcgtgagttctggtattggagagaacacttactgccccagaaccgttctcgaagggag

SEQ ID NO: 25922 - DNA, 476 bp, Glycine max
cttcaattctctaacaggtgacctccctcagactatgagatcactttcacgcataaccaccaacaatctgcaaaataaccagtttacaggcactattgatgtccttgctaatctgcctctggataatctgtgtgtctctgttgtatcatataacatagctggaatatcctattttcataaagaaaaactaaagccaattttatttactatcttaaattattctcaggaatgtggaaaacaataattttactgcctggataccacaacagttgaagaacataaacctacagaccggtggtaatgcatggagctcagggcctgcacgcccacctcctcctgggacacctccagcacctacaagcaaccagcaccacaactctggtggtggaagcaccaccccctcagatactgccactggcagcagctcaattgacgagggaagaaaatctggtagaggcagtggcgccatagccgga

SEQ ID NO: 25923 - DNA, 618 bp, Glycine max
cttaaggtcaaagagacgataagactgtttaataagtattaccttcatttagttcaggaagaagaaaagaggtgtgggaaggcagaggctgagcggaaagctgctaaaaaggcttcaaaatcgaagaaaggtgctccacctgaagaatcaaagaccactgctaaacgaccagatctaaaggccgtaagcaagatgaccgaacataatgagatattgtaccctgagaaaagaattggcaacattccaggtattgaggttggatatcagttctattctcgtgctgaaatggttgcagttggctttcatagccactggttaaatggcattgattatatgggccagagctatgccaaagcgtgcagctatgaacttccagttgctgttgccattgttatttcgggcatgtatgaggatgatctggataatgctgaggatgttgtgtacactggtcaaggtgggcataatctgactggtgataagcgtcaatttcgggatcaaaagttggagcgtggtaacctggctctcaagaactgtgctgagcaatgtgtgcctgttagagtcattcgtggtcacgaatcttcaagcagctacactggtaaagtatacacatatgatggc

SEQ ID NO: 25924 - DNA, 239 bp, Glycine max
gcccccagggatttggttggagatatgttatagttatactacacagatatactcaaattataaacattagtattgtctttataggttgtacagaactcgataatgttatcttttagtattttctgggacatgtatctacttgttatgttaatgatgtaaacaggaaaatttttgagatgataatgatcataaatatgtacacacataataaaacatccaaaaaaaaaaaaaaggggggc

SEQ ID NO: 25925 - DNA, 232 bp, Glycine max
aaaagataagtagtagatgatcataagaatctactcagatattagaaatggaacatagaattttctgttgtttgagcacatccctaatatctcttgtatggttgttcaattggctttgatggaagaatttatgtaatcctattgaaaacctatggccttttgaagaagggtcttcgactataaaggcccattgcattgctgatatatgaaatgctggtttgttggttggaaa

SEQ ID NO: 25926 - DNA, 499 bp, Glycine max
ctcttctgttcttttattctagggttacaaagttttccttccatacttgccggcagccgtgtggtcttgatagagcgacaccgtgccaccgcgccaccacccaaccttgcagccccaagtctgcgtttccgcagatccactgtccgcacataaaggtgtatactctgctcagttatatcatttgctaataattttcactatctttacgacgccgccaccgaccccaagctcgccgtctgcgccgcgcactccgacgccgcggcggcccatctgatcaagatcaacgggaggtttactcgttcgtgtcaagctcaaaggttgaaacaaacacgaaggcgctgaaacaaccctaagaagtaagaaccagattttatctccatacagtagaagtaaaacagtatattgtagccattcggttgagttcaaattgaaagagacaagatggccgggcaatcaaaccatgacctttcattgttttcagctgaggagcttgagttca

SEQ ID NO: 25927 - DNA, 377 bp, Glycine max
cttatgcaataggagccctttacaatcaccccattgagggtcttctacttgacactgtaggtggggcaatctcatatcttgtctcagggatgactgcaagaacagcagctgtattcttctgcttcgccgtcgtgaaaactgttgatgatcactgtggactgtggttgcctggcaacatcttccatacctttttccagaataacacagcttaccatgacattcatcatcaactgcaagggctgaagtacaattattctcagccattcttttccatatgggacaaacttctcgggacatacatgcctttcaatcttgtaaagcggcctgaaggggggttcgatgcaaggctagcaaaggaatagtcacactgtaggcat

SEQ ID NO: 25928 - DNA, 342 bp, Glycine max
gagagagcttccatctgatgatcctcgaagtttcaagcaacaagctgatatccattgtgcttactgtgatggtggctataaacaattagggttcccaactgagctagacttcaaagttcacttttcttggctgttcttccctttccaccgttggtacctctatttctatgagagaatcttggggagcttgattgatgacccaaccttcgctcttccatattggaactgggacaaccctgatggcggcatggtaatccctctcatttacagagatgaagactcccctctttatgaccctcgcaggaatccagacatcacacctgatactctcgtagacctaaa

SEQ ID NO: 25929 - DNA, 427 bp, Glycine max
aacatgtggtgggtatatgtgaaagcagcacttggccaaagaataaatttggagggcattctatgttcgactatggtgatcttaaaagacccgaaattggcaatgccccatatttctgttcctgatataaggtatgttgattgggctgagctgcgtagaaagggatttaagggtgttgtctttgacaaggataatactattacagcaccttactctttgaagtcctggcctccacttgagtcttcattggagtgttgtaaatcggagtttggtcatgatattgcagtatttagtaactctgcgggacttcatgaatatgaccatgacggttcaaaagctaggatgcttgaaggggcaattggaattaaagtcataagacatagggtgaagaagccagccggtacagctgaagaaattgaaaagcatt

SEQ ID NO: 25930 - DNA, 598 bp, Glycine max
catttggtgactcgccattcaaggcttttacttctactgaaactgctccatctcaaccccagacatatcagagtattgagccatcccaatcaaatggccttaatgcagaaacaaactctaactttgggtttggggactcattttctgttgtaccatactctgcacctgtttcctctgacgctcaacctttctctacaaactctcagtttccgtctcaagatatgtcatcttcacagccagaaacagatattcttgcagacattcttcctcaagcaccattatctgagatgcattcacagcagaacattccagttcctacagatcaattttctcaacaacccttttctgctcctaatggccaaccaggacaagtacaatcatccttttcatctccctccagtcaatatgcacaaccacccttttcatctcatgctggtcaacctagcttgcatgcattttcatctcctactggccaacatttgcagtcgccttttgcttctcaaggtggccaacctgcacaatcaggtggtatgtatggtggattgcactcccagggtggatatccaaccatgtctcctcaatcccaaaatggatataa

SEQ ID NO: 25931 - DNA, 407 bp, Glycine max
ccctcttcaggaggcacacatgtgacacctgattgttgttctaacaatccgaggaagattgttcgagaatagactagaaaggaaaaaacatggtggtgctgttgtcggaggaggatgaattcgacgaggagcccggcgaggtagtggattcagcgccgccgcagaaggtcggcgaagagagagaattcagtggtttcaagaagaagcttttcaaacccggacagggattggaattccccaaatcttaacaagcgttgtaactgttcgttgtgttggaattggaacattgctcgatggaacaacgtttgattccactagggagagggatcaacctaggacgtttgcttttggaaaagatgacattggtgctggtttggaccgtgccattatcactatgaagaaagggg

SEQ ID NO: 25932 - DNA, 1166 bp, Glycine max
gtgaaaactgcacacatagtcacatagaaacagcaaattcttgcttcatgtctctccacaataaatcccttaacaccctccctagccacattgcttttgtgtcaaaatttgaccaaagtttttcttctcctgtgatggaggaggaggatcacaaaatgtttggtcttgcctcagaaccagaggaatattgcaaagagttaggcgctgctgtcagagcagttcaggtggcatgcttcctctgtcagaaacttcaagactctttgatttccaagtctcggagcaacaataatctcaattctcccctcacagttgcaggttggagtgtcaaagcaattgtcagctggatattgtttgagtgtttagggaatgaaaatgtctcaattgtaaccgaaaaagaggttcggacactatccagtactgatgcatctgaactattggaagctgtggttaaaattgtgaatgaatgtctagctgaagtgcctcgatttggatttgaagaaccaaaatcagctcttggaacttcagaggttctcgaaatcattagtcgctgcaacgcaggtcctgccccttctggaagattctgggcacttagtcctcttgatggagggtcttcatgtggtgatcaacatgttgtagctttatcactcatagaggaaggagaagttgtgcttggagttcttggctgtcctaactaccctatgagaaaggactggtttagttatcatcacagctatcttaggatgatatctaagttggctcctccaacctctcaaacttggaataaaggttgtgtaatttatgctaaaaggggtagtggcaaggcttggatccaaccactgctccatgtcaatgataagtttgtgtggccaaaccatgcaaaacaagtttctgtctcttccattgacaacctagaaatggccactttctgccaacccagttgagaaggccaatttaagccactcttttgctgaagggctggctcacagtgttggtttcagtaatcagccactgagagtatacaacacgatgaaatatacggcaatagcatgtggggatgctgaggttttcataaaatttgcaagagctggttacaaggagaaaatatgggatcatgcagccggtgctatcatcatacaagagactggaggaatggtaacagatgctaa

SEQ ID NO: 25933 - DNA, 301 bp, Glycine max
tgcgcagacagtagagtggagaagagattatccagctggtaagtaagacaaggtattatgagactgaaaactgaaaaatagcgtacagtgatcaaagacaaacttaacaacgtaagacgatggcttcatcctcctcaggaaacccgaacaacccagaagtgagaaaagacatcgtgtggaaccgctgggtgatattctcacccgctcgtgcaaaacgaccctcggactttaagtccaagtcccccgccgacccgaacccgaaccagcaatgccccttctgcatcggccacgagcacgagtg

SEQ ID NO: 25934 - DNA, 449 bp, Glycine max
ccctttcgtccgcttctccacccaaagcttcgccatcgaccaaggccttgtttttggatctgcctctgtttccggctccagcgtcagctccagtggctcctacgatgatcaccctcagattaatgcctccagagggcaaggtgacatgaagttccttgtgaggtctaaaagcccgggtcctgggtcaagagggcccaccagcccaacatcacctctgcatccaaagttgcttggtttgagtcttgactcccctacaggcaggcaagaaggtgaatgtcatccattgcctcttccgccaggttctcctaccagtccttcttcttctcttcccagcatgagagcaaatggaatgacggaacacactaccagtaacctttccaagtggaagaaaggaaagcttcttggtcggagaacatttgggcatgtttacctgggattcaatagtgata

SEQ ID NO: 25935 - DNA, 460 bp, Glycine max
aagaggagagttagctggtgataaagttcaccgtgctccagagctagttgaattttatcaaacattgatgaaactggaggtccagaaggatacttcattaatatcatcaacaacttatccatttgatgctaggagcaacatgattgggagattgagaatagatcatcattcctcttagctgtgaaagccgatgtggaaacacagggtgactttgtcatctccttggcaactgaagttagagcagcctcgttctctaagattgaagatctggtggcttttgtgaactggctagatgaggaactttccttcttggtcgatgaacaagctgttctcaagcactttgattggcctgaagggaaaacagatgcaatgagggaggcggcttttgaatatctggatctgatgaaattagagaagcaagtctccaccttcactgatgatcccaaactcccatgtcaaa

SEQ ID NO: 25936 - DNA, 264 bp, Glycine max
aacaaacctttcttcgaacaccttctctgcatcgagcgcgccttttactttgaactcgggagtcgagggagcagagaacaccaacaccatgtttggctccgctcaaccttcttcttctcccttcggcaccccttcttctacccctgcttttggcaccccttcttcgacccctgcttttggcaccccttcttcgaccccagcattcggtaccccttccttcgctaccccttcttctacccctgcattcggtaccccttcttctac

SEQ ID NO: 25937 - DNA, 310 bp, Glycine max
cgaaacctccgtctccatgctcgtccacaccgagctctacaacctcgacgccgattccgaacactcccgcgactacctctccgccggccagacccatctccccactctcttctctctcttctccgtcgcctacttcgccttcctcgccctctggatttacatctgctactccaacaagctctccctccaccggatccacctcctcatggcggcgctcctcctcatgaaggccctcaacctcctctccgccgccgaggacaagcatacgtcaaggtcaccggaactccccatggctgggatgtcctcttct

SEQ ID NO: 25938 - DNA, 376 bp, Glycine max
aagagattaatatcctccgtcatgggatggcaatctaggtcggtgtaagaaagtatttccgatgatataaacttgtttgaattctccttggcagcagcaagaagcagagtataaatggcaggaaatgattggctgaacagctaccttgaagctatacttgacgtgggtcctggcctggacgatgccaagtcctctcttcttctccgagagagaggcaggttctgccctactcgctacttcgtccaagaggttattggcttcgatgagaccgatctctatcgctcttgggttcgggcttcctccaccaggagtccttcggagaggaacaccaggctcgagaacatgtgctggcggatttggaacctcgctcgccaaa

SEQ ID NO: 25939 - DNA, 426 bp, Glycine max
gaaactgaaactgaaactctcctttcaactttcaacattccttgttttctaaataacatgaacaaacattttgttatttcaaacactcttttaatgtatttttctgtttataaatcttatccgatctatatttatatttcctttttaggtgttaaaaagcacagcgagtgttcataacatttttcttccgttaaatgttctagtgagattcattcattcattcattcccattgtcttgtcccaacaacatggaaaaccaacagccagcgaacaagaccaccaatctcttgaaccacctcgggaaggagctcctctacgccatcctcgaccacctcgacgaaaacccttttgcccgaaagtccctcttccaatcctgcaagtccttgcacgcgctcgaagccacgcaccgtaccaacctcaagccac

SEQ ID NO: 25940 - DNA, 573 bp, Glycine max
caacaacaatgatgtccctgctgcagaattccccaacgcttcacaactcctctttccctcagaagcatgtcactcgttcatctagaagagatgctatttccttcattgtcaaagcagtccaagaaccctctgcttctttaacttctcaagatagacaaagaaggcgccaagtgattgccgttggaaccactgccccattagtttttttgttcaaccaacactcgaactcttttgctgcagaaaataagaaaggatttttgccggttttggacaagaaagatggatattcatttctctacccttttggttggcaggaagtagtaattgaaggtcaagataaggtgttcaaagatgtcattgaaccactggagaatgtcagtgtaaatgtgataccaactggcaaacaggatattacagaatttgggtcccctcaagaggttgccgaaactctaataaaaaaggttttggcccctccaaaccagaaaaccaagatagtagaagcaaaagagcaagatgttgaaggaaaaaagtactatcaatttgagttcattgctaaggctccaaactatactc

SEQ ID NO: 25941 - DNA, 229 bp, Glycine max
ggataagtgaaagttccaaaaactgagtcctccaccacacagaacaaaccactacaagtcactttgttctttgcattctcacacaacaacaatctcctccctgcagaattcaccaacgcttcaccgaactatgctccacagctctttccctcagaagcatgccactcgttcatctcggagagatgccatttgccttcattgtcaaagctgcccaagaaccctctgcttc

SEQ ID NO: 25942 - DNA, 259 bp, Glycine max
cgctcgcgatctagaactagtcgttggtgaaggagaaaagccgaagcacgtgataataggaggtagcatagcagggatatcaagtgcacatgctctcaccttagctggttgggatgtacttgtgcttgagaaaaccacctcacctccaactggaagccccactggtgcaggtcttggactcaattctttgtcccaacaaatcatccactcttggcttccaccacaccaaaaatccatccttcacaacaccactttaaca

SEQ ID NO: 25943 - DNA, 437 bp, Glycine max
gaaaacctcaggcagccgttgaccgtactttagacagtaaagctttcagaggatggacagaaatagacaatccatggacaaatgacgatgagactgacaatgatgagatgacatacgtgaatcttcaactgaatcccgaaagatatactggttacactggtccatctgcaagaaggatatgggatgctgtctactctgagaactgccccaaatatccgtctcaggagttatgccaagaggaaaagattttgtataaattgatatccggtcttcactcctccatatcaattcacatagcttctgattatctacttgaggaagccacaaatttgtggggccaaaatcttactttgatgtatgaccgagtcctaagataccctgatcgtgtcagaaatttgtatttcacttttctctttgttctgcgagcagtacccaaa

SEQ ID NO: 25944 - DNA, 244 bp, Glycine max
ctcagaactcttcaaagatatgttctcttgaggaagaactaaaccagacaaaactagaactgctagtggcaaaagatgccggttcggataaccattcagatataacaagagaacttcagcgactgagttttgaggcagagcatttcaagaacatgggagaagctgcaaaatcagaagtcatgaaagaaatgtctgagattgaacagacaaaagctatgataaaaactgctgaaaccaggttgat

SEQ ID NO: 25945 - DNA, 418 bp, Glycine max
cgagccgctcgagccgagggttctctccatcaaaacaaagccacttttcatggtcaccagaatctggtgattcacttagtggtgaaaatcttgcaagactagatacgagatcgccagatcggttggttggcgagctacattttcttgatgatacgataacattgacgcctgaggagctctcaagggccccctgctgaagttttaggaagaagttgtcacgggacttcctacaaggcaactctggagaatggtttgttgttgagagtgaagtggttgagagaaggagtggcaaaacagagaaaagaatttgtaaaggagacgaagaaatttgcaaacatcagacatccaaatgttgtaggattgagaggatattattggggtcctacacagcacgagaagcttatactttcagattaca

SEQ ID NO: 25946 - DNA, 294 bp, Glycine max
gcttggactaatggaaacattctctgcctttatgaggcatcaaatggcagatagggggcgaagcatgacatcagggtgcgaacagattcaaatcctgaacacagtgcaagttttgctcctctgttgatctttggtggccacataccttttagattgtccagacatggtggctttgaagctctatttaatggggctccaggaatcggtctgacacagggtaacacaggcgattattttatcggtcctggactagaagaactgtttgaacagctttcagctaacaacaggcaaggt

SEQ ID NO: 25947 - DNA, 258 bp, Glycine max
caagcttgcaatggccaaagactatggagaagttgagttgtttggtgtaggtggaagcccttttgccagaagggtgcagattgccctagaactgaagggagttcaatacacttactttgaagaagatcttaggaacaagagtgctcttcttctcaaatacaaccctgttcacaagaaggtgcctgtgcttgtccacaatggaagacccttggctgagtcccttgtgatccttgaatacattgatgagacatgggagac

SEQ ID NO: 25948 - DNA, 273 bp, Glycine max
aaaatataatcccagctctatgagaccttcaccattgcaaggtctaggagtagatttgttcatatttgtctgagccactttcttcaatacggacgtcaagtacatttaaaaaatcagctctattcgttgtggtattcgaaaaaggaggtttaagatcttcaaataaattgtgattagaacaaaaaatgcgaggcttaagatttagcattagaaccaaaaaaatgtgataggttttaaatctggtattgtggaacatataaaaagttatttaac

SEQ ID NO: 25949 - DNA, 703 bp, Glycine max
agattatatgtaattaatatattaccaattatcaatatttttttatcaaaattttatttcaggttcacactactccttttgctttgactagtgtttcgcaggtagtaaaaaaggatataaaaagatcccagagagaaaagaagaactaaatagctcaaacctcaggaaaaagaaaaaggggttcctaattactgtgcagagcttgtagccatggcattcatagagaaagctgtgtttttcttgatgatgatgatgacagctttccaagtttcacatgcagctgtgcacaaggttggggactctgctggttggaccatcattggtaatatagattacaagaagtgggctgctactaagaacttccaagttggtgacactatcatttttgaatataatgcgaagttccacaacgtgatgcgagtgacgcatgctatgtacaagtcatgcaatgcatcatcccctttgacgaccatgagcacaggcaatgacaccataaagataaccaactatggtcaccacttcttcttgtgtggcatccctggtcactgccaagcaggacagaaggttgatattaacgtggtgaatctatctgctgcagctgcaccgtcaccaacatcagcaatggcctctccagttccacctgccaatgcacctgcaccttctcctaacaatgcagccccattcattgtgtaaagggagctgg

SEQ ID NO: 25950 - DNA, 251 bp, Glycine max
ggaccctattaaaattggagaagttctgactcgtggattaggtacgggcgggaatccacttttgggggaacaagctgcagaggaatcaagagatgctattgctgatgctcttaaaggatcagatttggtgtttataacggctgggatgggtgggggaaccgggtctggtgctgccccagttgtagcccaaatatcaaaagaggcaggttacttgactgtaggtgttgtacctatcccttcagttttgagga

SEQ ID NO: 25951 - DNA, 548 bp, Glycine max
catttgcatatactaatatcattttttctaaaaataaaattctaagccattttcatttgcactctttttttctacattaatgtatccatcactcaacctccttccaagtccttttaattctccgtctcagttccttcttattccaacctcactcggtttgagagcacggaatcaatgaagaaaataattagaatattttttcagcgttagtaaaaccgtcacattaaaataataaaaaaggagcgtaaattaggaagaaatattttgtgaggaagagaaaaatgcgagtgaaagagatgcacccgctgtgctgtatctccctcgagagtcccggaatcggcaaacattcgccggagcgggagccggcggcgcttttccgaaccaggagcctcccggcggcgggatctcatggcaatgctgctcagggatcggagaccaccgtcgccggcgttctctacaaatggaccaactacggcaaaggctggagatcccgctggttcctcttgcggaatggcgttctctcctacgccaagatccgctgtccggag

SEQ ID NO: 25952 - DNA, 884 bp, Glycine max
attttatcaatgtagtgccatgttgccaagctgtttaaatagagatttgtgaatgttcattgatcaatgctttagaaaactttgttatgcttctagcagataatctggaggcaaatagattacggtgtggtaagcttggcaaagaccctactgttgaaactagctttctacctgacaggagtgctgaggattcttgttcagtgagcgagaggctgaggagcaagctgagcgtgaaaggctgcgcaaacagtggcttcgtgagcaggagcaaattcgaaatgagcctcttgaaatcacatacagctattgggatggaactggccacaggcgtgtgatccaggtacgcaagggtgacagcataggagagtttcttcgagcagttcaacagcaacttgctcctgaattccgagagattcgaacaacatcagtagaaaatttgttatacgtgaaagaagaccttatcattcctcatcaacatagcttctatgagctaattgtgaacaaagctagaggcaaaagtggaccgctttttcattttgatgtgcatgaggatgtacgaacaattgctgatgccactatagagaaggatgagtctcatgctgggaaggttgtagaaaggcattggtatgaaaagaacaagcatatatttcctgcttcaagatgggagatatatgatccaacgaagaaatgggaacgttatactatccacggggattgatttgaggctgccaaataatttgcattagcatttcctgtattgacatttaatttggtcatgcgtttgtacgccttggtgataattatgcttttgttagcatttcctgttattcattacagacaacatggacaattagtcagatctatattacagtggatttcgtgtc

SEQ ID NO: 25953 - DNA, 259 bp, Glycine max
ctagctttctacctgacaggtgtgtgtgtggcatctcatctcttattctttcttatcccccctttagtacccctgtcctttctttattggttgttgccctaacatttgggcataggagtgctgaggattcttgttcagtgagcgagaggctgaggagcaagctgagcgtgaaaggctgcggaaacagtggcttcgtgagcaggagcaaattcgaaatgagcctcttgaaatcacgtacagctactgggatggaactggc

SEQ ID NO: 25954 - DNA, 476 bp, Glycine max
gtgcgtttggcgtgagcagtgaggaagaagcctctccggcgatctgaggtttccgatggcggagcaacaccgcaagaccccgctggattcgggctgggtcgcagcgaggtccactgaggtccaattcaccggaatccagctcaccactactcaccctctcaccacgccccacttccccacggatgccagctctcgttcctggaactgttctagcgaccttggtgaagaacaaagccgttcccgatcctttctatggactgcaaaatgaacacatcattgacattgctgattctggaagagactattacaccttctggttctttacaacctttaattgcaagctttcaagcaatgagcattgtgatcttaactttcgtggaatcaattactctgctgatgtgtatttgaatggccacgaaatcatcctaccaaaagggatgtttcgaaggcactcccttgatgtcaccaatattctt

SEQ ID NO: 25955 - DNA, 245 bp, Glycine max
ctcccttcttcactctcagctcaaaacgaagcagcatggaatggaataaataggcgtgtgctttgacccttccaacaatggtggctcaacgcatcatcatcgtcatcgtcactctcttcacgctttttcacctaacctcggtcacagccactgcaccttgccaattctcttttctcgacgggaaaaagctctacaattacaccctctcttctcccattcgcaactttcctcacggcatcctcagc

SEQ ID NO: 25956 - DNA, 286 bp, Glycine max
gggtatcaaactgaaaatgtggatgggggtgagatgcataagaagaagaaaaagaagaagcaggaagttgagtccttgcacgacatagatagcaccgttaaatttggacgtcagggaagctgatggaaagctacctaatggatcccaaaatgaagttgagtcagccagagaacagggaaatgaaggcgacatcaagacggggatggaagagggaaggaaacagaaaagtggaaagaagcccaaagtaactactagtagtttttccagttataagggtgaggctgag

SEQ ID NO: 25957 - DNA, 324 bp, Glycine max
ctcgagccgctcgtcactctctctttctctctctctgaagcatgtgggttccatgcttttgcctctggaggaaatgtaaaacatcaccctgctgctgagtttttgttttttgatctccgggcctgactttttgagatgtggtttctgagcctcagaacaacaacacactgcagcagagcatgtctagtttagttctctgtttcatgtcagcatatccattcttattattatttcctgtttctttcaatgcttccccccttcttctagggttctcttccacctgattcatttcactctcggccaaggtggaagcacttcactggc

SEQ ID NO: 25958 - DNA, 408 bp, Glycine max
gcgtggtttcagaagaagccacgtttttgttggtgtttggtggattttggtttttcttgtctttggttggtgagaaggaaatggtggaccagaacttgttgttactcctcccttcgcttttgcttcggagaaagtccttcaagaaaacccaccgcttcgagcttctcccggcggaggaagagcgtgaggacgaggccgaaggtgttgtctccaaaccaaaaccatcctctactttctctgcttcggaggaactaatcatgctggttttgttgggcttggtcacgttttggtcgtgatcctcctcgttctcggcccactctaggggcgtgttgctccggagaggggacatggatctggttctcctgcgaaccgacttgtccctcagcctcagatctcttcctcggacaa

SEQ ID NO: 25959 - DNA, 579 bp, Glycine max
ctcgagccgctcgagccgttaatttttaaaattccaggaattcaaaagtttggtggttggattctgttttttgggcagcaatggcgaaagcacgcaagtcgcaagaagaaattgcgagtgaagccatcaagcatgctttgaaggctctgcggaagcgccatttgcttgaggaagctgctcatgctcccactgttctagctctttctagacccatcgtttctcagggctctgagtggaaagagaaagcagagaatcttcaaatggaacttcagcaatgctacaaagctcaatctcgcctgtctgagcaacttgttgtggaagtagctgagtccagagcttcgaaaacgtctcttcaagagaaagaaaatgcattggctgatctgcagaaggagttgactgaattgagggatgagtgctctcaattgaaggtggacttggaagaaaagattaaatctctggaactggttgtcagcgagaattctgaacttaaagcacaactggagcagatgactattaaagccaataaagctgaagcagaaaataagatgttgatagaccgctggatgttagaaaagatga

SEQ ID NO: 25960 - DNA, 262 bp, Glycine max
ctttccctttgttgtttcttgtggttttggagtctgcagcaatgtggggttggatggtcggggaagcgcgtagggcagcgtgcaactggaactgggtttcgctccgaagcatgggtggcggtcccagaacctttcccggcggcgtgaacaagtggaagtggaagcgcatgcacgagaagctcgccagagacaaacagaacagactcatccaacaagagaagcagctctacccagctcgcattcgctcccacatccgctcctc

SEQ ID NO: 25961 - DNA, 302 bp, Glycine max
aaaagacgaaaacgaaattcaggaaaccatcttcgtacgcactacgcagcatagctgttatcttcttccccttcccctctcgtggcaaacgcgccgcaaatgacagaacgagcaactccaaggatccatcgacacagataaaagagtattccctcgctccctccacagttctagggttcacttttgaacacacgttgccaaaccccggttcatccaaatccaaagtcataagaacaagaagatgggtgtgggcatatcatttctgatagcactaaaagcaacaatcctcttcttatgcttcg

SEQ ID NO: 25962 - DNA, 329 bp, Glycine max
tttacgtgttcgagagggcatggatttctttagccactcttaaagaaactgaacatactttgatgctcatgtgtgagcttgcaaaacattggaattcatggattaaggccataagaaatgtggatagacagcttagagagaagtgtatccatctgttagccttcattagcaggggatctcaacgccttggtgaattgtcaagcagaaatgcccctcttttatgcccacctactgtgaaagaggattttgaaatttgcttaaaaccttcttatgtcaatagcagaaatgggtggcttgctctttcaccactcggatgtgtgccaaaaccg

SEQ ID NO: 25963 - DNA, 275 bp, Glycine max
tctcctgacatcaggaggtagcattactaaggcagatcattaatgcattaatgagtgcaagttcatgagcttgtgtatctaaatatacataatgaaattgcttttgttgtaggagtggaatctttgcttttgttttctgtaaggatcaaagcatattgttagcttcaatatttctcttgcttattctgactgaaagtaaagttttgcagatcttgattgtatcctatctccaatgagtgggcataagtgagaagaggtatggatgggtggtgctt

SEQ ID NO: 25964 - DNA, 326 bp, Glycine max
cattcacagtcatatccactcttcaaattcttcacaacaatcttcccattaaacctcgcaaacaccatgaaaaccacgattggaaggaggattcttgggtgccagcttattatgctttggctgttctcaccatgttgtggtctgcggcagctatggttgaagctcaagtttatgtcatcagtgggactattgctgattggtatttctccaaggaacatcaaactcctaagcggagtattcgaactcctctcagaaatgtttttggtccttcttctggcacgatatgtttgtcaggattgcttgtctgtgttgttcgaatggtgcgt

SEQ ID NO: 25965 - DNA, 372 bp, Glycine max
tacccagttgccaagcatgcttctattgtgagagaccttagaccgggggattttgatcctaaggagaagttctggacgaggtttccgccggaagggtctaagtttacaccccagcaccattcagtggacttcaggtggaaagactactgtcccatggtgttcagacatctaagggaattatttgccatagatcctgcggattacatgcttgctatttgtggaagtgacacacttagggagatgtcttccccgggcaaaagtggaagcatcttttatctcactcaagacgaccgcttcataattaagactgtcaagaagtctgaagtcaaggtgctcataaggatgcttccaagttactaccaacatgtttgt

SEQ ID NO: 25966 - DNA, 233 bp, Glycine max
ctcgagccgtgctgacaagcagtgaggacggcactggagaagggacaggtgcacgtgcacacacatgtgcagcaacgcattggccatgacgaagaacatgaccgacagtgacatagctaactacgaatacaatatgagagttgaaaataatggacaaaatggtaatagcaataggaagttgttggtggagaatgatgttgagtggccggagtggatttcggcggcggatagga

SEQ ID NO: 25967 - DNA, 415 bp, Glycine max
gaaaaacaaacttatcagtgaattggagaattcttgggatgaagaagaaaaaagtaaaaaggcaatggaaagcttagcttctgcattacatgaagtatctgcagaagctagagaagccaaagaaaatctactaaacatccaagctgaacgtgaaagctatgatgcccagattgaagacttaaagttagtcttaaaagctactaatgaaaaatatgagtccatgcttaatgaggcacggcatgagattgatgttcttgtatgtagtattgaaaattctaagagtgcctttgagaactccaaggctgagtgggagcagagagagcttcaactagtcagctgcataaagaaaaatgaagaagacaaggtgtccctggacaaagaaatactaagattgctttatttgcttaaagaaact

SEQ ID NO: 25968 - DNA, 351 bp, Glycine max
tcggtgtgaagaagaaactacattgatagattatattgtttccagtacacaagaacatgtgaaagcatcacaaatgcttgagcgacttcagatcattttggatgaagaggctgaaatgttcgttctgaagatgtggaggatgcttatctttgaaataaagaaggtagagtcagggctagctttgaggtcaaaatcatgatttttttattatcattttatgttcttccttccctttgctgctggattgatattttagctttcatccttgacatgtccttaccctaaattgtaaaatggctgcataatcataaacggttgaatgtaatttttcagtatgtattgcttcagcat

SEQ ID NO: 25969 - DNA, 289 bp, Glycine max
ctactattcaaaccccggcggcaaagcacttgttgcctgagctagaaatctaactgttacctccttgtccttctttttctgatcgaccagaaaagatacgacgcggccaaagcttgttcctcagcaagcattgttcggctgaagagcctgaatagaagaactgtcgatgttattgcatccagactgtacttttattactcatatagctatgagcttacaggaaatcttgctgaaattcgaggcaacctccttgcattgcaccggattgctaccctgcgtcatgatgagc

SEQ ID NO: 25970 - DNA, 407 bp, Glycine max
ggggtcagtggaggctgctgagaggaacaagctggtgtttatggagggtggagtgtacggatttgggttggaggatttgttgagggcttcggcggaggtattgggaaaagggagcatggggacttcttacaaggccattctggaggacgggaccacggtcgtggtgaagaggttgaaggacgtggcggctgccaagagagagttcgaggcgcgaatggaggttgttgggaacgttaagcacgagaatgtggttcctcttagagcgttttactactccaaggatgagaagttgctcgtctacgattacatggccgccggcagcttgtctgcacttcttcacgggagcagagggtcagggcgaacgccgttggattgggacacccgaatgaaaatagcactgggagctg

SEQ ID NO: 25971 - DNA, 198 bp, Glycine max
ttcacgcatgcttatatcacagggagatctatctgcttttcaacgtataaatagtcgtgtggttcctgatcatagtcttcccaagcgcctctgtatccgttacactctgctttctatatagtttgtgctacattgtgaatatgataaccttctatcattaccaaggtgtttataaccatcatctgcctttacatttaa

SEQ ID NO: 25972 - DNA, 287 bp, Glycine max
tgtggtttttttttctttcttttctctctctctctctctgtgaaatggagccgtttgcttagagctgcttcttctgatctttgaatcttgatctagatatctagatacagaattggaaatggattcaaatgggagcctacgtgctaacacctgggcaaggtcgtcgtccttgacctctcctgcaagtggtttatcctcagatcctctttctttcccaggttttggtttgcagcataatcaacaaaaatgggatgttccctcaaattcagattttggaatcagggctg

SEQ ID NO: 25973 - DNA, 585 bp, Glycine max
tcgagcaatcatattctcattgcattttctcagtccaaatctgaaattcttttaaattaataacaccaccacactcgttccctcccttcccagaccataacatgaaaaaagtttgtcattgtcccatattcctggcactggccttgtgcttgtgcatcctctgtgttgctgcagaggctgcagggcaaaatgatacactcgctctcaccgaattccgtctccaaaccgacacccacggcaacctcctcaccaactggaccggcgccgacgcctgctccgccgcgtggcgcggcgtggaatgctccccaaacggcagagtagtgggcctcactctcccttccctcaacctccgcggcccaattgataccctctccacactaacctaccttcgctttctcgacctccacgaaaaccgcttaaacggcaccatttcacctctcttaaactgcacaagcctggaactactgtacctctcccgcaagaatttctccggcgagattccggcggagatatcctcgctccgccttctcctccgccttgacatctccgacacaacatccgcggcccaatccccacacaactagc

SEQ ID NO: 25974 - DNA, 173 bp, Glycine max
ctcgagccgattcggctcgagtccatcaacctctccaacttaatagatatccctttaccctattttctcgaatcttgtttgactatctcctgactccggctaaatccttgccttttcagccagttttcctccgtcttcccaacctcaatcacacttatccatcacaccccatg

SEQ ID NO: 25975 - DNA, 406 bp, Glycine max
ctgaaaagttgcaagagagaggttctattgatgaaaacagtgacatgagggagactagatgctatatgaatcccaacatagataggcagtgtatggatacccattatagagatggcaactatagggattcgcagcatagttatgtgcctaatttccagaggccactattgagaaagaatgtagctggacgtgtgtctgctcgcagcaggaggagttttgatgatagccaattatctcttggagagatgtcaaattatgcagatggcccagcatctcttcatgaagctctgagtgaaggacttagctcaggttctgactggtccgctagggttgctgcctttaattatcttcactctttgtttgagctcggtcaaaagggaattcaagaagtagtccagaattttga

SEQ ID NO: 25976 - DNA, 271 bp, Glycine max
agatgatcaagatattcgggaggtaacccttgagagtttgcggaagtccattggtgttgttccacaagatactgtacttttcaatgatacaatatttcataacattcactatggtcggctttctgcaacggaagaggaggtctatgaagctgctcagcaagcagcaattcataacactatcatgaagtttcccgataaatattcaactgttgtgggagagcgagggctaaagttaagtggtggtgagaagcaacgtgttgccctggctcgt

SEQ ID NO: 25977 - DNA, 492 bp, Glycine max
gttcaattgcagcaaaggataaaacaagaagccgaacagtttcggcagtggaaggcttcaagagagaaagagctgttgcaattaaagaaggagggaagaagaaatgagtatgaaagacacaagctgcaggctttaaatcagcggcagaaattggttcttcagagaaaaactgaagaagctgcaatggccaccaagaggttaaaggagttgttagaagcacgtaaaacttccagccgagaaactttagttacaatgaatggaagtggaacaaatggtcagagcactgagaaatctttacaacggtggcttgatcatgaactagaagtcatggtaaaagagcatgaagttcgttttgagtatgacacgcagagccaagtgcgagctgcccttgcagaggagttggccatgctaaagcaagtagacgggtttgctgccaagggtctcacacctgcaagaggcaacgatggatttgctagagcatcctccatgtca

SEQ ID NO: 25978 - DNA, 585 bp, Glycine max
  unsure (1)..(585): unsure at all n locations
gtgaagagtgaaagacagacaaaaacaccatgatcctaatctactacctctcggagcacccggctatcgtgggcttccggtggagccacgcccaatcatggggagccacctggtccttcctcttcacctcaatcgcctcctacctcttcctctcaatcctcctccacctctctctttctctcctcttccgccgccgtcaaatccctcttggcccattccccgccgtccacagcctctccatgtccctcgtctccgccacgatcttcgcaaaacccccttacagtggctcctctgcttccccctcggcacgcgcccctcggggcgcgtgttcttctggtcctacgtctactacctctcccacttcctccacatgttccgcactctcctcacaatcgtacgccaccgcaggctatccttttttcatctgcttagccactcaatctccgccttcgcctcctttctctggctcgagttctcgcagtccttccaggtaatgagtataaacatctactagaatatatntgatgatattctatactcanagattaatttgtattctcatggtatgacttattcatcattatc

SEQ ID NO: 25979 - DNA, 293 bp, Glycine max
tgagaaaagaaccaatggatcactcagtttcagtttcatccaataagcctcttcatgttgtaatgttcccatggctagccatgggtcacgtatacccctgcttcgaggtttccaagatccttgcacaaaagggtcactatgtcactcttgtttccacccctaagataatacctcgcttgcccaaactccctcaaaccttatccccatttgttaaactaaccaaattactcttatcgccccacatcgacaagaaccatctcccacaagatgctgactccactatggacattccc

SEQ ID NO: 25980 - DNA, 350 bp, Glycine max
tagagaaggacccttttgagtgtccctcacaagcttgaaacttgacctgtttcttccttggtggggttacaggttttgtccttggttccaattcctgagcctcatgttgttgttgttgttcttgcatcaaacacttcatgtgcaaccttgtttctctcagttcagcatatgcagtgtactttggtcctctctccaagatgaagctatctgcggaggtgagcctcaaagggaaagggtggtctgaattggaattctggttgaggatcagtgatatggggtcaagggcatgcaagagaggctcaagagtggagtttagttgatgggtctgtggcagtgacatgttactgttt

SEQ ID NO: 25981 - DNA, 271 bp, Glycine max
gtgcgagtaaatgtaaatttaatcagcaaacaataatatacaaatgctaaacattgtgtatttaatctcatttcaatttacaagtcataccaagttgatataaatcagtgcaattttatctactctaattttcaaatttgtccaaaacagaagttcatatttaaaccaaaaatcaaaatctcattagtataaataaagtgaacaaaagttgatgatgagccaccacgagctctttgaccgaacaagcagagtcatggcctagcaccaacaa

SEQ ID NO: 25982 - DNA, 240 bp, Glycine max
ccgtaatccagaggcgacaaggaacggacattgaattgcgacaggggcatttccgtcattccacagagcaacccgtcatagccccaaaccccacactttccatcataccacactttctaaccaaccaaccatcaatggcagatgtaaccacctacctccgccaccaccgcgaccccgaccccgaccccgacgacgacgaccaaaccctaattccattcccttattgggatttggactttg

SEQ ID NO: 25983 - DNA, 365 bp, Glycine max
gtttgacaggcagcagtatttctaccctgaccttccgaaagggtatcagatttctcagtttgatgtgccaattgccactgctggttttcttgatgtggatattcctgttgagtttggtgggggccacaagaggtttggcattacaagggttcacatggaagaggatgcagggaagctcctacatgcagagaatggaaattactcacaggttgatctaaatagggcaggggtacctttgcttgagatagtttctgagcctgacatgagaaatggtattgaagcagcagaatatgcggcagaattacagagttggtgcggtatttgggagtgagcaatggcaatatgcaagaaggttctcttcgttg

SEQ ID NO: 25984 - DNA, 392 bp, Glycine max
caggggaggccaaccagaggcagccatttagaggttgaagcagcggcttcttagtgagtgcttttctgagattcaatggcgttcattggtgcagtcaaattcttgctgcagtacttagttctattatgcctcctcaactatctacctctttctcaaggtaagcagaactggaatgaagggtacccatttataagaagagcaagttcattgggttataatgggaaaagtggagggtatgattatataatagtggggggtggaacagcagggtgtccattggctgcaaccctgtctcagaagttcaaagttctgctgcttgaaagaggaggagtccctttcaacaaccctaatgtgtcatttctgcacaactttcacattacattggcagacac

SEQ ID NO: 25985 - DNA, 226 bp, Glycine max
cctcctcgtgggctcagaggtggagccgtcgcgcggcttctgagtgagattctatggcgttcattggtgcagtcaaatccttgctgcagcacttacttctattatgcctcttcaactatctacctttttctcaaggtaagcagaactggtatgtagggtacccgtttatcagaagagcaagtccattgggttataatgggaaaagtggtgggtatgattatataat

SEQ ID NO: 25986 - DNA, 462 bp, Glycine max
tcgcggacgcgtgggcggacgcgtgggttttgatggtttttctttactgagggcgttttgttttgcaggtgtttgaagcttgtgcttggaaaaacgatatatgttgacatatatttgagttgttatgttctgtctctgttttcgtgagatttacgtttcactatgagaagttaacacaaactagttctgtcctagtttctcggaagattttctaagatggaatctgttaaaccatcagcagtgacgccaagcaagagcaaattggctcgcacttttgccaaagttcttcacgttagagcagtgactggaattgcaccagttgatggactgaagaatgttaaagtcgatgcggatctcaacaatgaagcaaataaatgtaagagtgcactaaacaatgaagaagacgaagagcttcaggatagacaggccacagaagctttgcttgcaaacccttttgctagc

SEQ ID NO: 25987 - DNA, 379 bp, Glycine max
aggaaaacatattggctgaagttatttttgacgcgtgaaataggcgccggcgttcatcgttgaaaagcgaaaatggatatacctcgtctgatacttggaacccaaggcctggaggtttccaagttgggatttggttgtgcggggcttagtggagtgtttgacggccctgttcctgacgaggttgtcatctctctaatcaagtatgcattcagtaatggaatcactttctttgatacttccgatttttacggtccctacactaatgaagttctcgtaggaaaggcactgaaggagttgccacgagatcaaattcagattgcctcaaaatttgggattgtgaaagttgagtccaatgatgccattgtaagaggtgatcctg

SEQ ID NO: 25988 - DNA, 343 bp, Glycine max
gacgacagaagggggaagaagagtggaagaacattgcacctgcaacttcaacttcacttctccgttctaacactcgccatgttccttatcaagacatggagacagacggctttcggtgtttttgggtacctgaatttcaccaaagctggcttccttgatcattctaagaaattcaacccagaggacatggaattacgaataccagggaagaattgcattgttactggagctaactctggaattggctatgcaacggctgagggtcttgcaaagcgtggcgcaactgtctatcttgtatgtcgtaataaggagagaggagaggctgctctttctgacattcaaa

SEQ ID NO: 25989 - DNA, 290 bp, Glycine max
acatttttgatcttccttcctctgaaacaagaaccaaaatggagaattcgaccgaagaatcccatctccgatcggaaaactccgtcacttacgagtccccttaccctatctacggcatgtcattctccccctcccacccccaccgcctcgccctcggcagcttcatcgaagaatacaacaaccgcgtcgacatcctctctttccaccctgacaccctttcggtaactccccacccttctctctccttcgaccacccttaccctcccaccaaactcatgttccacccccgc

SEQ ID NO: 25990 - DNA, 281 bp, Glycine max
ctcattttcctctctctctctctccaccatgccaccagccgcaggagccgtagccttacactcctccctctgcaacatctcttccgacaaaccctcttctccactaagatcaccccccatccacgtctccccaaagcccaagagcctcttccaaaaccaccccttatacaccccaacccacacaaaactctcccttgaattcaaagagaaaatcctctgccttgaggtaatgggcgttgatgcaggcaaagcactgtctcaaaaccctgacctccgcactg

SEQ ID NO: 25991 - DNA, 593 bp, Glycine max
attccctcaaatgtttcacaaccttagcatgaaagacatctacgatagtcaacataggcatgcttttacaacaatgtggcaaggaatggatggactaagaggtccaggtctttctggtagtggcaattacttaagtagaagtgcattaatctttccaagcccatatgaaaaagacggctatgaacataatgcccaaaacaaatttggcaactctaccatgtacattgaatcattaaaggccattcaaggacaacaaacttataaaacgagcatttcaagaaatgtgattttacaggaagcacaagcagtggcctcttgttcctatgagatagacacaaattggggtaatgaggtaggattctcatatgttatattactggagagtacagttactggctatcttcttcactgtagaggatggagatcaacttacctttaccccaaaagaccttgtttcttgggatgtgcccccactgactccatggaaggcatgcttcagttggtgaaatggagttctgaacttttcttgctaggaatatccaaatacagccctttcacttatgggatttcaagaattcctattctgcacaaca

SEQ ID NO: 25992 - DNA, 329 bp, Glycine max
cttatgacaggtaacgaggaaggaagagttgaaggctaaggaagaagccttggcactaattgaagaggagcgccgttctaaggaagcagctgaggctaatcataaaagaaatcttaaagctttacgcctgaagatagtgatagatttccagcgtcgtaaggatgatctccttaggctggagcaggagatttcacgccttaaagcacctgcacggtctactactttgcctacaagtgagtctgaggatgcagagccccagagagagacacttgctaagcttctgctagagttagataatgtgaaggatttttctggaaaagaaattaacg

SEQ ID NO: 25993 - DNA, 301 bp, Glycine max
gcgatgcactactagtatgtgcgtgatctcaggatgaattatgaggaactgtgatctttgatatgggggcttgttggtggtggtgctgtgtaatagtctaagagtaactgttgactgaaaatggacaagcattctgggaattcttcatcagctcatgctgctgcaggtccatctgggatttccccacataatgttccacaaaaagcgggaagcagtgcatggggaataccacgtgccagtgatgtgttccatgactcaagtgatgttagcttgttttctagttcactgcctgttcttccac

SEQ ID NO: 25994 - DNA, 501 bp, Glycine max
cgaattttctgcagttgcactcctaatcatatgttctgggggcccttgctgctctgcttcatgttcaccaacaattcaggctgctcaataagattgaagaaaaaaaagttttggtagccaggtgctggagttttgcttgcagctcttttctaaggtgtcaatgatatgaggtgtaaaaagcaatgttgatgtgggatatgctcaactcaatatcagtgttgtgacaaggcacatggaatgacatttgctggtgggataaggaaaggaagttgggatccattaggcctgcaattttgaaatagtaggtaccattatcttgtcatatttcttggttggtagcttctggaaggcctggcctttaagttctcgtggaatccaattaatttgacatattaaggcaattctatcatgtgtatataattatgatttttttttagctcccatagcaaaagatgtacttagattcattttttaatgaaaaaaactgcaattatttcttat

SEQ ID NO: 25995 - DNA, 283 bp, Glycine max
aattattatcatgtactactaattaaagggcagcaactgggagttcaatgaacctggctagaacactgggtccagcaattgctgcacacaactacaagggcatgtggatctatctcacagctccaatacttggatctctatgtggggcaggtgcctacactgtgctcaagctgcctgatcacatcaggaagagtgatagcaacactgcaagagtgatagcaagactttacccagaatgagtgatttttgcacatgcacttatcatgcatgcatcttctgtggc

SEQ ID NO: 25996 - DNA, 294 bp, Glycine max
aaaaaaattagaccgtcccttgaaagagtatccttaaactatgaatgataccaaaaagataaaactatgagcttgaggggttaaatataggttgtgaagggtttttgttttcactgggtgcccatttgttagattaacatgggtatgtttactgctgcgcgtgattgtatgagtgtttggggttgtccctttgtgtagtgttttattccccctgtgttgtggttaccaacttgatatttgcattgtgcatgacccctgttactatgctattgctattaagtttggcgaactatg

SEQ ID NO: 25997 - DNA, 247 bp, Glycine max
gctatgaagaagagcacgctttgttctagaaggtctggctctggcacttttccgagtcctggaacgcctaattatcttcacgccactgttgctatgcaaaagggttggagttcggagcgagttcctttgcacaccagtgctgcacgcaagcaggttggtgcggctctgttgcctttcaacaacggccgaactttgccgtccaaatgggaagatgctgagaggtggattcttagtcctgtttccggtg

SEQ ID NO: 25998 - DNA, 259 bp, Glycine max
gtgagaattgaaaggaagaagaagaagaaaggaatgtgaagtgtgtttgttggacttggttggtgtgaagaaagagagatgggtggtgtaacttcttctatggcggcgaagatggcgtttttttccgcctagcccgccgtcgtacgaggtggtggaggaagcggcgacgggggcgttggtgttggaggcatttcctcggcgcgagaacgtgagggtggtgaaattcgggactcgacgtggaagtgagattgtggggtgt

SEQ ID NO: 25999 - DNA, 543 bp, Glycine max
ataagaagctcaggtcaaagagacttgctcctgttatgatcaaggaggtcaccaggagggttcatttggagaatatttggcaggcggcctatacggctggagttgttcttccaacgccgatcacgacttgtcagtattggcaccgatcgttgaatccgaagaagctaattgatgttggattttcaaggcttggggctaggatgacgatgagccgcactataaaactttacaaattgcctgattcaacggttactcctggattcaggaaaatggagcttcgggatgtccctgctgttactcggctgcttaggaactacttgagccagtttgttgttgcacctgattttgatgaaaatgatgttgaacattggcttcttcccaatgagaatgtggtggatagtttcttggtggagagtccagagaatcatgagatcacagacttctgcagcttctatactcttccttcttccatccttggaaatcaaaattactcaattttgaaagctgcttattcttattataatgtttccaccaaaactccgc

SEQ ID NO: 26000 - DNA, 307 bp, Glycine max
caaaagtatatgaacgaatacaccctttggacaaagaaagcacgaagacagagagagagagagagagacacacactaagagagtgagagagagtctgagacccccccaccacccatatttcctcaacactaattattaaaagtattgaaaaaaagttaacgaatttggagaatttcgcgaaatggaattcgaggatcaagaggagcaggaggaggagctgtgtatgggtggtggagcgggctacgatccgacccagatgaagattccggtgcggcggagcgcgtgaggagcagcagcagcaacggcg

SEQ ID NO: 26001 - DNA, 335 bp, Glycine max
atgggccataaccttgttctctctctccaccctcccaaacactttggttatgggcatccctttgctcaaagggatgtatggtgacttctcagggagcctcatggtgcaaattgtggtcctccagtgcatcatttggtacaccttgatgctcttcttgtttgagtttagaggtgccagaatgctcatctctgagcagttccctgacactgctgcctccattgtctccatccatgtggactctgatgtcatgtcattggatggaaggcaaccacttgagactgaagctgagatcaaggaagatggtaaactccatgtcactgtgaggaaatccaatg

SEQ ID NO: 26002 - DNA, 408 bp, Glycine max
cgctaatatgcttcgtgctcaaagacagactactcagagacagttggaagctgagaaaaagaaaagaactgaggggcctcgagtggattcactatagacaaggtcttctgatactcatgatagaatacatttgttggaggagatgatgcgcaagatctttactgggttatttgtgcatcgctacagagacattgaccataatattagaatgtcatgcatcgaatcgttgggtgcatggatcctgtcatacccatcacttttcctgcaggatttgtacttgaaatatcttggatggacgctgaatgacaaaaatgctggtgtaagaaaggcttctataagtgctctgcaaaatctttatgaggtggatgataatgtgccaacccttggtttatttactgaaagattttc

SEQ ID NO: 26003 - DNA, 278 bp, Glycine max
ctcgagccgcctgacactgtgatcatgaactctggcttgcacgatggcgtccactggcgcaacataagagcattctctgttggagcagactatgcagcatccttttggggagatgttatgaagacagtgaagcaaagggggttggcatggccaagagtgtttttccggaatacagttgcaactggtggatatgcaaggtcactagcattcaatcctaacaagatggaggtgttcaatggtgtgttgttggagaaattgaagcaatcaggagttgtttc

SEQ ID NO: 26004 - DNA, 254 bp, Glycine max
ctgctcgagcatcaatgattctttattaactggattagagtttgttgatggctttcaaagctgtgtactttggggtaaggtgggctatgcatcaattgctagtggagtgtccatccttctatgagatgtgggcaaatccatatgatgaatggtagaagcaaccagaaattctagtttggcgaaagcatacccaggatggggacgatagccagctatttggaatcttatggaccaacccagagtatctctttatt

SEQ ID NO: 26005 - DNA, 354 bp, Glycine max
atcatttcgaaatttctttcacgttttctttttgttttgcgcaataaagagcacaagttcgaacatagagtaacgcagatgaagaaggccacaagaatcgtttcaatcttcgtgatctcgatgctctgtttccaagaactcatccacgtttcttcgtcacctttcttgtacgcacaccaggtctatgaggaatcttctggtggaagaaatcttaaacaggaacaggaacaggaacagaaacatgctcaagaagtgcattgctccagggagagaagtagggcagctcggaaagtgatagaggagtatttgacaccatttatggaacgagaaaactaccaactttcaagtaagtgc

SEQ ID NO: 26006 - DNA, 266 bp, Glycine max
gagaacgtgatttcagacacaatcctctacgatccctccaacatagggttccgttccctggtggacactctcctctccgacttggaccaaaccatgtcgttaccctcacactaccatctctcatcacaccttcccgctttcgccaccaccgtggaagaacactccgggatacgactcattcacacgctgatgacgtgtgccgattccctgcaacgtggccacttctcgttcgctgcctccctcatccagaacatgcaaggcttgtt

SEQ ID NO: 26007 - DNA, 558 bp, Glycine max
  unsure (1)..(558): unsure at all n locations
gttcgggaaaaaccgctactacatattcctataaattcaatccattgccttgctcaacaatggcctttggaaatgttggcatttccgatcccaactcctagaggacttgacaacacttcattcagatatctacatattgtaatagtgttcacagtataatctgtgacattaatttaaagcttgtgttagtataaatgaatgggtggtcattgttcatggttctgcatattcagagtcggtggctcgaaacagttttttttgtgaatattcaacagagatacataaggaaattacagaagttattatcttggaaatgaagcatacagaaaatgaatacagcattctacaggcattaatcttccctgggcaaacatctttgattggacacatggtttataagattttgtagttctttttttttctttttaattttattgatatttccttcttttgcctttctttacttgaatttgtttgaagaaataataatcatcttcaataaatggggtagattacagaatttcnnnnnnnnnnnnnnnnnnnnnnnnnnnnnnnnnn

SEQ ID NO: 26008 - DNA, 681 bp, Glycine max
cttgcctttacctttcaacttggaattgtttgaattgcagtgatcacttggttggaagcaaactcacaagcagataatgaaccaacacacttcacgccttcatcctccactggttgctggggcaaggaatttgtaccaggatcaaagctacgtatccaacctgacataaatccaaatgagaatgagagaaaacacacctagagaaacgacaagagttcagcctcctcttctatctggtcttcctgatgatcttgctattgcttgtttgattcgagtgccccggattgagcacaggaaactacatttagtttgcaagagatggcaccgccttctgtctgaagacttcttttattcactcaggaaaagtcttggaatggcagaagagtggctattacgtcatcaaagcggaccgtgctggaagaatttcagtccatgctttttgatcccatctaccaactatggcaaccccttccccctgttcctggagattttcctgaagcaatgtgggttggtagtgcggttcttagtggttgccatctatacttatttggcggagtagatctggaaggatctagatctattagacgtgttattttctacaatgtctgtacaaataaatggcatagggcaccggatatgctgcagaaacgtaatctgtttcgttcgtgtgtgataaataat

SEQ ID NO: 26009 - DNA, 266 bp, Glycine max
ctggttatcgaataaactatccctcacactttactccaacttggaattgtttgaattgcagtgaacacttggaagcagataatgaaccaacgcactccacgccttcaagtcttcaacctccactgtcaagcgagaaaactcacctagagaaatgacaagagttcagcctcctcttctacctggtcttcctgatgatcttgctgttacttgtttgattcgagtaccccggattgagcacaggaaactacatttagtatgcaagagtg

SEQ ID NO: 26010 - DNA, 266 bp, Glycine max
gcctccattgctcggtttcgcgtttcatattcttcgccccttgttctgcagtgcgtgaagaatatcttcatttctttcatgcactcagacttttaatccagacgcacgttttctgtgcacgagatctggcacgaattccctgtgaatcttgcaaagatggaatcttgtgcgcaattcgggttctgggtggtcttcatcttgttcttggcatttcaaattcctcccaattacgggttctaccttccaggtagttacccccacaacta

SEQ ID NO: 26011 - DNA, 455 bp, Glycine max
gtggaacctgttattgacagcagcagatactttgttcttcgcatagacgagaacataggtggtcgccttcgacatgctttcattggcataggattccgagaaagaacagaggcatatgacttccaagctgccttacatgatcatatgaaatatctaaacaacaagaaaactgctgaagagatggctcaacattaccaacaaacttcctcagttgattacagtctgaaagaaggagagactcttgtacttcaaattaagaccaataaaagtggcagcagtgtgaagtccaagttttttgagctgggtctgaacaaatcccccgaggaaaagatggagggaaagaatctatacctagtattaagttaccaccacctcctccagcaccactctcacctgttttcgccgcgcagaagtctccaacaaactcacctacaaaactcagccttgagaaaact

SEQ ID NO: 26012 - DNA, 508 bp, Glycine max
acttgcatcaatgatcaaaggaatgggtcagtaaacttgcttcaaagggaatgtaaaacctgatagtggagaatctgagaaggattgctctgcggaggataaactgaactcaacatggcgggcagctttcatgaaggcatacaaggctatggacaaagagctcaggtctcatccgaatctggattgcttctgtagtgggagcactgctgtgactatagtgaagcagggttcaaatctgttcatgggctatatcggggattctcgagcaatcatgggatccaaggatagcaatgactccatggtggctattcagttgactgttgatttgaagcctgatttgccaagggaagcagagagaattaagaagtgcaaaggtagggtatttgctttgcaagatgagcctgaagtgcctagggtgtggttgccctttgatgatgcaccaggattagccatggctagagcatttggagatttctgcttgaaggagtatggtgtgatttctatacct

SEQ ID NO: 26013 - DNA, 270 bp, Glycine max
cctcgttattccaacccctctagattagaatcaccaagcttcctcattcccttctctcgcttttttgtactgtacccaaaaaagcgcttcacaaagttgaaagttgaaacctcttcaatcttcacgatggcggagaagctgcacttacgagagttcctacaggaggatcaagaacccttccttctgaaacactacatttcggagagacgcagccagctcaaaagggtaacaccttccccaaacagcactttaccacaacaactcaaaaag

SEQ ID NO: 26014 - DNA, 624 bp, Glycine max
gttccttcccctcctcatattttccaataccatttttcactgttaacaccaacacacccaaaatctcaatcttgttcagatccctcatacccctttttccattcaaactaagggggtgacaagatgagtgaggtcttcgaagggtacgagcgccagtactgtgagctctctgctaatctctctcgcaaatgcagttctgcctctcttgtttctggccaggaacagaagccgcagaagttgtctgagatcaaagcggggctagatgatgctgatgttctgattcggaaaatggaccttgaggcgagaagtttgcagccaagtgtaaaagcaatgcttcttgcaaagttgagggaatacaaatctgatctaaccaatttgaaaaaggaatttaaaaggctaacatcacctaatgctgacgaggttgcccgtgaagaattgttggagactggaatggcaaatacacatttggcttctgctgatcagagagaacgattaacaatgtctgtggagagaataaaccagtcgggtgagagaattagggagagccatagaaccttgctggagactgaagaactaggtgtcaacatcctccaagatttgcacagtcagagagagactctactg

SEQ ID NO: 26015 - DNA, 391 bp, Glycine max
tataaatcatccttttatcaacatgcatgaggacttgaacgtggatctttcagcttatttcttcaactcaggatgtacacttgcaaccatatagaacacagtatgttccgatcctggactttattcaaagtgaaagatatggcattctatgtcaactgggcaaatggcaagtactgctgtcacttcatatgtaactgcaatttgtactccttgaagaggattcctagttgcctatgaccagaatttgtagaatggagccaaggaaaccagcttctaaaatttatgcctgctcatttgacaatgactaataatgcaattcaatagttgttgttttgattacttgagtggacaacttgaaacttttacaccaataaaaaatattttaactttc

SEQ ID NO: 26016 - DNA, 419 bp, Glycine max
tggcccgcgaaggatatgtgaaggaagatgatcgattccaacttaaaccaaaccgggtgaaccttccgttgggcaatcaatctactacccctaataatgctgtagttgaaatgcaacaatatggcgaagccattcctggtcaatcatccaatgaagttgcaaaaccagctagtggcagtaatgcacctgtaaacctctctcagaatcttgtaacaaatccaaggatgctgccacctggaaacccccaagccttacagatgtcccaaggacttctctctggtgtttcgatggcttcaagaccacaccatattgactccccaccagccattcagcagcagcagcagcagcagcagcaacaacaacaacagcagcagctgcaacaaaatcaacacacactcattcaacagcagaatccccag

SEQ ID NO: 26017 - DNA, 425 bp, Glycine max
attcattctggcagagtattttctcaatgttcatgttgaactgaacagggatgaattgagggttgacctttcatcacagcacaacacaataagagagtgaaattggaaaaatgccaatctgaaaggactctctctctctctctgatttgttcttcgttcgatggcgtgtgaggaagtggctcattcgaggcctctgttcctcacgatctacactattgtcatcgttggcatcgtcttttcctcactctacgtcttatacgccattcgccacccctccgccattccttctacttggtccctttcaaatgaggatgttcgtcttacagaacaaacactcaacggttctcagtcggaaactgtgcatattgtgccttctgttcctcaggaggcacgaaaaatgaggacaaggcctattttgagtgttc

SEQ ID NO: 26018 - DNA, 287 bp, Glycine max
attaaacctacacactctcttttacagtgaaagtgtgagacaaacccgtgtctctctctcgggttcgcaacgaggagacaacaccggagctctccgatcttccagaacattctagagtggcaacgggattcattcttcgcttcaaactttaaacacccaaacactaacccatctccatggccttgtacggtcggagccctgccagacatggacccaacccggtgaaccaacccgaatggcgctcaccgggcaccgagaatgatctcgaagaatcgatgtggcatttg

SEQ ID NO: 26019 - DNA, 249 bp, Glycine max
gtgtttttccttgggagaagtcatgtaatcttgcaatgtcatcaaattagatgttgcaacaaagagtaggaaatattggttcagcagaaaaatgaaaaattagcagtatattgatttccttctctttgtatgttttgtcaattcaatgtaatatagcgggggatatgcatatagtgtactgagttgtgtattatgtataaaaaatattctcttaatggaaagaagcaaagaaaatttaaccgagtacaa

SEQ ID NO: 26020 - DNA, 392 bp, Glycine max
gtaaatgattctctcttatagatatgatgatgatgaacgtatgatgttttgagacacttggtgattagtaattataattcactttgttattaaatggatgagatgagatatcagcatatggatttgtctagataatatgttgtgttcttttacaggttatgttgtataggataggctggccagattaagaaagtcatagtctgtgcgccggtcatgtcccaagagtgggccatgacactaatccttactatttgatgatgaacagataaagtaacttgattggaaaataagcattatttatggaatagcaggaggcctattataccttcatgaggactcttggctcagagtaaatcatagagatctcaaagctagcaatgttctattagacc

SEQ ID NO: 26021 - DNA, 303 bp, Glycine max
gcagagagagaaaaagaagaaaaacaaaacataaaaggaaaacccttgcttgcattgcattgcactgcagcacctcctccctaccaaacccctcttgccttgtctccgacccgccctgactcgttgagctcgccggaaactttggccaaaagggtctccgaattcgcccatggcccttgatttccgaccttagagacccttcaagttttcgcctttttcttattcgcttttcccctttttttgggtcctcaatttctgaaacctgcaactgagaaaaagattgctctgataactcgtgcctcg

SEQ ID NO: 26022 - DNA, 404 bp, Glycine max
  unsure (1)..(404): unsure at all n locations
agcaaggctttgaaaagaaatgaatggctcctctgattcggtgtggtttgggtgttccttttcacttcatgtcacgccctccctcctccaacaccaccaccacctatngcgattttacncctcctcgcactcgcactccagccgcatctcctccgtcttctcctgggtccgacccctcaaacgctccaaaaccgccgacaaactctacaaaaaatacgtcctctcctacaaactcaaataatacatccccatgcatccaataaccaatttcattgcctgattcattgatatatacctatagaaattggaaaaaatgtctcagatcttggcaccgttccagttactggaactgaacgtgatttccgcccaggacctggctcctctgggtcgcaacatgcgtacct

SEQ ID NO: 26023 - DNA, 224 bp, Glycine max
aaagtttcatcaaatgtacgcgcaattaagagaaatttgatcaaatgtcaaatagtttattacgtaattgagtttaaattttctgggtgctttagcaagctatgataatttgggcgggaggggctaatgcaacgtcattttgttctgtccatcagcagtcttagaggtcaattattccaacattgttttatgcaatgattatataaggacgttaatgtttgttt

SEQ ID NO: 26024 - DNA, 543 bp, Glycine max
tatttattaaactttggtgtgcagtactgcatctgtaacagtgaaggaaaggaaaagaatgcaatgactcaactctagatactagatagtgagtgagtgaagctaaagctacaaaaaacaaccaaacaaaacactcaattctcttctcttctcttctgggtttttgctttttcctcattctctcattctcaaacaccacaaaaaaatgggccttgtttcccaggatgccctcaaccaactccaagctctcatggatcaagtgctacttgaggaggagccactgcagagaacgtttcagaatgttcatcaaggatgtgtcaccgaaaccttaacacggtttctaaaagcaagggagtggaatgctaccaaggcccataaaatgatagtcgattgtttgaagtggagagtgcaaaatgagattgacaacatattatctaaaccaataatccctactgatttatacagaggcattcgcgattcacaacttataggattgtcagggtactccagagagggtctgccagtctttgcaattggtgttgg

SEQ ID NO: 26025 - DNA, 659 bp, Glycine max
aatcacagcaccagcaacctaaaggcagcagcatctgcaacctttctcttgaaattcaaaactctatctattctgctgcgaactacatacaattctcaaatcaaatccaaacacataatagcagtatcagggcattagcacttcaactcacaaaccttacacattttttttataaagaaaatgaagctctcggcgttgcagcagagttacctcacgcgccgggcgaacagcttcagaggatcggcgcagttggattcgtccgccgacggcgcggtgaagtcgccggcggcgattttctggcttgtaatccacggcgtctgctgcctcatcagcttggttctcggcttccgcttctcgcgcctcgtcttcttcttcctcttctcgacaagcctctacaccgcgccgttccggagcggttcggaaatcgcggctccgcatgacgttcctccggcggcgaaccggacggcgatgtcggtggcgagcaccgcgagccgcgtggtggtcgggcggcacggggatccgaatccgcccgtggccgcatccggatcccgtggaggtgatgaaggcgcaccgcataatcgagagagtccagagagagcagagggcgctgttcggagtgaaaaaccctaggacggtgatcgcggtgacgccgacgcacg

SEQ ID NO: 26026 - DNA, 268 bp, Glycine max
ggcaaagacaacctgggaagtacttttctgagattgctgccaggttttatgtggcagaagttctccttgctttggaatacttgcacatgcttggggtcatctacagagaccgtaagccggaaaatgtgttggtgagggaagatggtcatataatgctatcagatttcgatctctctctaaggtgtgctgtcagtccaactctcgtgaagtcatcaaactctagcttggagacaaaaagctcaggatactgcattcagcctgcttgcat

SEQ ID NO: 26027 - DNA, 355 bp, Glycine max
cttaaatctgcttgtgaagggaagtatgatgccataattgttgattcctcagatcccgtgggtcctgcccaggaacttgttgagaaacctttttttgatacaatagctagggcactaaggcctggcggagttctttgtaatatggcagaaagtatgtggcttcatacacaccttattcaagatatgatctctatttgccgagaaacattcaaaggttctgtatgttatgcttgggccagtgtaccaacatatcctagtggtgtgataggcttcttctctgtgcaacagaagggccgcctgttgattttgtgaatcctatcaatcccattgaaaagttggaaggtgctaatgagca

SEQ ID NO: 26028 - DNA, 245 bp, Glycine max
tcttcttccactgtctgtctacactacggacagagcttttttcacaccacagctaaaatcgctgcaatagagcccttcttctcccttcttcttctctacccacacccaaacccaaaccaagttctttctgtctcattcccttgataatgtagaatcacagacaaacagagcaagctactcaaaacttggctccaattagcctttcttgccatggtttgcggtgaaacagattagcgtcacaccat

SEQ ID NO: 26029 - DNA, 429 bp, Glycine max
ataaaagtgaagtgaccatgctgacatctgacaatcccaagagtgaagatccattggacatattggatgatatgttagctggggtaggatggacgatgcaggactacctgaaatatggagagaatgactattatccacctcttccaaatggtcatagactttttctccatgacattaggagggtagctgtgcgagctgcagttgcaatgggtgaggagggcgatgtggttgtaagttaatggagctctattctacacttcaccttctaatatagaattgagccaagttgtgataactcagaagtcaattaattgaaagcattttggtgcttggtactgcataagggatttatagtttttggttttctgaaaaatttgaaggatattaagatgtatgtcaaagtgatatgtcaacaaaaatatgttgatc

SEQ ID NO: 26030 - DNA, 635 bp, Glycine max
gagagaatgactattatccacctcttccaaatggtcatagactttttctccatgacattaggagggtagctgtgcgagctgcagttgcaatgggtgaggagggcgatgtggttgtggttgctggcaaaggccatgaaacatatcaagtagaaggtgataaaaaggaattctttgatgatcgagaagagtgccgagaggcattgcagtatgttgatgagcttcaccaagctggaatagatacaagtgaatttccatggcggttaccagagagtcattgatacaaaaggctgttgtgataaatattggattattctaagtacaattcgagccagtatgaagaaaagggcctttccgtggtggggagggcttttctttgcaggagcttggaaagcgcatgcccggaaaaattaggcttcagattccggccaaaaattggacggtcggcttagtgcagtttatccaaccgtttatttttgtttatacaaatgtagtcataagttttcttctccctttctctgctgtccttttccactgtaattctacgtgtcagcttcctctttctttgctttgtagaactaattcagtctttattcttataatatggataaaaaataacaaattcagtctatattctt

SEQ ID NO: 26031 - DNA, 292 bp, Glycine max
gatgtttgggtgatgaatgttgtacctcgtgatggacctaacacactaaagcttatatatgacagaggcctcatagggtctatccatgactggtgtgaagcatattcaacatacccccggacttatgatttactccatgcatggactgtgttttctgacattgaaacgagagggtgcagtccagaggatctactgattgagatagaccgtttgcttaggcctacaggtttcatcatcataagagataaacagcatgtgactgattttgtcaagaagtacctaacagcaatgc

SEQ ID NO: 26032 - DNA, 575 bp, Glycine max
caaagcgcacccattttctcattcaaaaactcttattatttttcactccttcctacacaaattcccatggcggccctcggtggatcctccgccgccgccaccacctccccctccctcttctcctccgcccgattccgccgctccctccgcccaccgccttcccaactctccttcccgcgcgcgcgcttttccgtcaacgccacgtgccccttcttctccgataacaatggcaataagatttcccttccccaagacgtcgtcgcttccaaaccctcccctctcgagttgctcaaaacttccgccgccgacagatatacgaaggaaaagagtagcattatttgcatagggctgaacattcacactgctcccgttgagatgcgtgagaagcttgccattccagaatcccattgggctcaggccatcaaggacctttgcgctttgaaccacatcgaagaagccgcggttctcagcacgtgtaaccgcatggagatctatgttgtggctctttcccagcaccgtggtgttaaggaagttactgattggatgtctaaggtgagcgggatttcaatacctga

SEQ ID NO: 26033 - DNA, 485 bp, Glycine max
cggctcgagggcttattgggatggacttctgaccttcgagccatatgtgcaagatctttgaggcagcaagactctacatcttttaggaaggtgccttttcttctaactgatgttggacggcggccaaatgctgagtatgttgttgtcaacatggatggatcaagacatccattacctctgacaaccgtttatcataaattgcaaccaataaatgcttctccttatactttcttgcaagcactttttgggcatgaatatccggttggactactagatgaagagaaaattcttccattggggaaggatatcactgctgttggccattgcagtttaaaaaatggaattgctgaaattaagtcctgcaaagatataccatattttttgtctgacttgagtaaagatcagatgatagtggatctttccatcaaggcgaaaatactgttttggggtggtattgctcttggttcgatgtcagttggggtact

SEQ ID NO: 26034 - DNA, 255 bp, Glycine max
tagcaaggcgatgatgacattggttgacgagctggagacattggttgacgagctggatgcattggacttggggtcgtcggtggtgccggtgaagaaggtcccatacggcgacgtgttcgaggcgtcccgcgctggcgacgtcgagcggctccggtaccttctggaggcaggcgtgaacgtgaacgctcgtgaccagtgggactccgttgccctctactacgcctgcctcgccggccacctcgacgccgcccgcac

SEQ ID NO: 26035 - DNA, 355 bp, Glycine max
cgagtaattaatgtgaaaggaatgaatgatttttgtattgcaaaataaattagtgtacttcacatgacggattttcacgagcaacaataagcatagagagaaatttggcattgcagtgcatcatcgcattgattgagctggaagatgggtagcaaaggcaaacgcaaagagcaagaatcaataataacgagggttatggctcacggaggtagatacgtgcaatacaacgtgtacggaaacttgttcgaggtctcctccaagtatgtccctcccattcgccctgtcggtagacgcgcatacggcatcgtttgtgctgctgtcaattgcgatacgcacgatgaagttgccataaaga

SEQ ID NO: 26036 - DNA, 256 bp, Glycine max
tgtaattccacccctaatttgttctggtctcctagggttctattctaacaaagatggcagcgatactcagtgaggacctgatagtggaaattctaacatgggttccagtgaaatctctgatgcgtttcaggtgcgtttccaagtcttggaattccctcatcttccatcccgcattcgtcaaattgcaccttcaacatcaaagggcttccaaaaacacccacctcctattaaggtgccgccgagatagcatgcttaa

SEQ ID NO: 26037 - DNA, 463 bp, Glycine max
tatgagaaaattccaatcaagcagggacatggggagcaggagatcatcactcctgttaggcgttcaagtagaattagaaaccaagccacttctccttcataacctgattttgggattagtttgtgtttggtttttagttcgtgttccaaaggatgttcaaacttaaacccaatccgtgggtgtagtttcattgaactgaataacgtttgaatcttctgaatggaaaaccaaacatcccttagttttcaagtaggaatacctagccaaattttatccgttgtaatctgacctgacccagcataactgttaatgtaagcagaagtatcctatcttctgaatccccttgatcttctgtagcagaagaaatttattgttgagtgaatctgattggttattaagttgtattaatccaatgacctactgcattttccttcttattttgctctgtaagcttttgaaatga

SEQ ID NO: 26038 - DNA, 677 bp, Glycine max
gccctttcaaaccattactagctgagatacctgattacgcaagtatagtccctcttgccgaggaaactctccaagcatcgaacgggcgacgaaaggtgcgaagagactaatgaggatgtacaatgtgagggtgtgtggatattgccctgaaattcatgttggtgcccagggtctcaaagctaaaaactgtggagcccataaacaccaacaacgcaatgggcagcatggttggcagtctgcagttctgaatgatttgatccctccaagatttgtgtggcatgttcctgatgtaaatgcaccgctagaacgagagcttaggaatttttatggccaggcgcctgcagtagtagaaatgtgcattcaggctggtgctggtttaccagaacaatataaatcgaccatgcggctggacgtggggatcccatcaactttgaaagaagctgacatggtagtttgagattaatttctcttatagacaaatcccaacttttgaatatagtgtaaattgtgtcaaactggatgcaatgataatttactgatttatttagggactggaatgaaccctttggatagttctttatgggggtatttatgccatctagacaaacgctgtcgttttctatcctatacatacaggcaaaaaatatataaaattgttagtgtcagactgatggtgt

SEQ ID NO: 26039 - DNA, 270 bp, Glycine max
tttcacagcctttggaagaaaaaagcttgcattttttgtcccccccaaaggaatatacttgctctccaatctcttctttccctccaacttcactctcttgaactcttccttttcatgctttaagttaaatattctgcaacccttttagttgccattgtgtgtttctgttggcaatgtgccaaagaagcatgagtggtggtggcatgaagctgctgaggatgtttgtgtttgtggggttggtgattgtgaaatgggtggaaggctttgagg

SEQ ID NO: 26040 - DNA, 295 bp, Glycine max
cccaaacccaaacccaccaattcagatcacaatgaagcccaacgacaacatggcaatgctggccaagaccgactccgaggttagcagcctcacgcagtcctcgccgacgcgatccccgcgacgggcagtgtactatgtgcagagcccgtcccgagactcatcgcacgacggggacaagactacgaactccgtttcactcgagtccgctgcagagcccattgggctccccgccccactcccactccaactcctccttgggccatcactcgcgcgagtccgcctccacgcgcttctc

SEQ ID NO: 26041 - DNA, 454 bp, Glycine max
tgcaagtgaaaccaccccttctcagaaattggctagagggcgccctcctggctctggaaggaagcaacagctagctgctttaggtgaatggatgaatagttcagcagggttggccttttcacctcatgttatcactattggagttggggaggacattgtggcaaaattattgtcattatcacagcagagaccaagggctctgtgtatcatgtcgggcactgggacagtatcttcagtcactctgcggcagcctgcttctaccaatgccagtgtaacttttgagggacgattccaaatactatgcttgtctggttcttacttggttgccgaagacggtggaccctccaatagaactggtggcattagtgtttcgctctctagccctgatggccatgttattggtggtggtgttgctgtgcttattgctggaggccccgtgcaggtgatgttgtgc

SEQ ID NO: 26042 - DNA, 1024 bp, Glycine max
gtttcggatgaagtttcgccacctgctaaatcgcaatcttcttccaaagagaatgcaagtgatgggcgctatccccaagtctctcacaattcatgtagtcctcgttcagtgatggccaatttgcggaggaaatctactcctttcagcagattcagtccagcagatagttcttctgctagcaatgctaagaattcgagtgcttcaagtagtaacaagagaatgagttcttctgtttcccgaaaattgaaccataagaattgggatgctcaaattgccgtggctgatcagggagatcttcaggagagggatggaattgtttcggaaaggagcaaaatggataaaagcggagtttcaaagccagaaacgaaaagggcactgctaaacaaaagttctgaggataaaatacaaaagtatggtgggtccaaagctggatctcgtgtggttccatatcaagaagatgagagccaagactcagttcctgtcagtatcgtctctaaagatctccaaaggaatgacaaagagagtgaagatttatcgctgatccgtgctcagttacttcagattgagaaccagcagtctagtctgcttgatcttctgcagaaattcatggggcgctctcaaaatggaatgcgttctttagagactcgtgtgcatggccttgagttggcattggatgagatctcttatgatttggctgtatcaagtggaaggataactaagtttgatgctcctaagcatacttgttgcatgctgcctggtgctgaatttttaagctccaaattctggaagaaaacacagggccggtattcatcgtaccggttctctagaactggtagcactccattactaccttccagtcattacagagctaacaggaatgccgaatctaataggttggcaagccacagacttggggtccacggtgatggaggcttcaccactaatcctctggcagagattaaaattaattcaagggagatttcaggctctgcaagatcagagctagcttgaaaagcagatgaaa

SEQ ID NO: 26043 - DNA, 236 bp, Glycine max
tgggaaaaagaccaaatttgctgatgacgagtagggtggcaagtcttgcagatacttaaaaatttaatatttattttctaaactttcctgtagtgttggctccccagttttgttttggtaatccgtaattgttagtatgaattcgtagaaattctgttatatggttgatgatacattgttttatcgcatgaattattataatataatatttgtggctctcttcagaattgcggttc

SEQ ID NO: 26044 - DNA, 349 bp, Glycine max
cgcgcacatctatttgaagtggcgtcagggcttgactcacttgttcttggggaaggtcaaattcttgctcaggtgaagcaggttgtgaaagctggacagggagtgcctggttttgataagaaaatcagtggtttgttcaagcaggcgatatcggttgggaagcgggttagaaccgagactaacatttcatctggatcagtttctgtaagctcggctgctgtggagcttgcactgatgaagctaccggattcctcctttgctgattctggagtgttggtggttggtgctgggaagatggggaagcttgtgattaagcatttggctgccaaaggttgcagaaagatggttg

SEQ ID NO: 26045 - DNA, 387 bp, Glycine max
tcagaaaccatctaacattttaaatgataatttgggacctaattactctgccaaccttgtgcaaagagactgcatacaaaataacattattttctccaaaagcttcctaatagagagggcattcacttaactacatgagttctcggcttctagctaccaaagttacttgcatttcttgttaatcttgttctctttgtgaatacaagttttattgcatcccctgtcaaaaagcattttttgaggtccagaataacattttgaaacattaagtacctgtctggtgacaagactgaaattgggggttaaaagaatgttttgattttgtttcggtccctttgctggttctaataaattggagttcccctattcctatctctctcagctttg

SEQ ID NO: 26046 - DNA, 592 bp, Glycine max
ggctgttttggttcatcggttgctgatactgggactctccttcatgcaattgctggccatgatagatttgatgccacctcaagtaagcaggatgtgcctgactttcaatctcattttgtcgctgtgagctccttggaaagtaagcccttgaagggactgagagttggtttgatccgtgaaactattgatgatggtgttgatgctggagtaatttctgcaattcgggcagctgctttgcattttgaggaattaggatgctctgtgaatgaggtttcactgccatccttttcccttgggttgccagcatattatatccttgctgtatctgaatcatcttccaacttgtctcgttatgatggtatcagatatggaaaccaagtttatgctgatgagctagattctctttatggaggttcccgggctcaagggtttggttctgaggttaaaatgagaattttgatgggaacatatgccctttcagctggttactatgatgcatattacaaaacgtgcacagcaggtaaggaccataattaggaatagctttaaggaggccctcagtcaaaatgacatcttgatttcccctgcagct

SEQ ID NO: 26047 - DNA, 470 bp, Glycine max
aatttgacaagtgggagttatctggtaatgagtcacggggttgttcaacaaaggctctgatgaatgcaaaggttgatgtaccagatgagtatacctggatgcacttacatcatacttggttggacgacgtagcaggacaggatgatgtgtcttggttgtcatagtttcgaatcacttctgttaaaaagtactctttgctgtcaaactattcagccaaggcatgaggcacggcaatatgcactcaaaccttacatagcaataaggatttttcattttataacagttttcactttaatgaagagagaagccatgaaccgaaacactttgcaaggaaagtaaacctagatgtgcaaatgtggcaatggagagaagaaatagctgctcaaaggttgtgtttggtttctagatagaaaaaatacgtttgtcattccaaggcagcatgaacccataatacaaagataatttatatc

SEQ ID NO: 26048 - DNA, 577 bp, Glycine max
aaagagcgtagttcccacacagcacacaagagacagaacagagtgacaacactacaattgattgcatccatactgcgttctccccgggtcccaccatgccagctgccactgcttcttcttcttcttcttcttgtacattttctcactcttctctttttgtcttctgaagtgggtggaatgaatagcaataccaccggcgctgcagcaatgaacgaccagctctccaacaccacctccatcttcggcctccgcctatgggtggttctcggggtgtgcgtgggcgccgccatcgtcctcatcctcttcctcatctctgtctggctcgccttcaagcgctcttccaaaaccaaccctgtttccatccccgacgtctccaaagagatccaagaaatcaggctcgacaccaaccccactctccaacccgaaccttaccccgaacctgaccccgttcctcccaccgaagaggaaaccaactccctcggctaccacagaatccagttcgagattgggaagaaccaccgaatctcgtacccggagcgtgccttgcttcgctccagctccaatgaccccagcagcg

SEQ ID NO: 26049 - DNA, 263 bp, Glycine max
ggtttgactattttcgctcctaacgatgaagcgtttaaggcgaaaggcgtacctgatttgagcaagctcacgaacgctgaagtggtttcgctcttacagtatcacgccgccgctaagtatcttcccgttggatctctgaaaacgacgaaggattcaattaacacgttggcctccaacggcgccggaaagttcgatttgaccgtttccgtcgccggagattcccttacgctccacaccggagtcgattcctcgaggatagcgga

SEQ ID NO: 26050 - DNA, 327 bp, Glycine max
ctgattgcaagaatggaactccgttgcttactgttctccatttctgttcttttcgctcttggtcttgcaagagaaagccatgcccaatcatcaataccagacgaagatttttggcatgctgtttggccaaacacttccattcccagtgcattgcgagagcttctaaagcatggccgtgaaggtgttgaaattgataatctccccatgcaaattgatgatacgcagtacccaaaaaccttcttctatgaacaagaccttcatcctggcaaaacaatgaatgtacaattcagcaaaagtccctttacacaaccttttacaatattgaca

SEQ ID NO: 26051 - DNA, 317 bp, Glycine max
atagaagagaagagagaagtgtaaggctctgcatagtttgagcgccgtcgttaatggcggaattccggtgacgcgccgtcgttggtattaaaagtggttttgattgcatgagataagaaagaagaagatcatggattgaaccagagaatccagaagatcatccatggccacctccaccaacggatttccctgacgcagacatcgatctattgctctcagagactcttccgaggaaggtgctgtgtagttgagagaaggtgcgagtaagagaggaaggaatcgagatagggatagggattcggcgaacaggagcaaga

SEQ ID NO: 26052 - DNA, 251 bp, Glycine max
agcatttcgtcatcttccattaaacactttctatcgcagttctcattatctctgtctctaactcacacatagtagccaccttgcaatctgtagcagaggataattagtcaccccacctcacaaccaagcaaagctagctagtactacttttagctaaagctctttcatttattgactgtgcttacttagaacaactaccatcccaaaaaatccctcttgtgcttacttagaacaactaccatgacttggca

SEQ ID NO: 26053 - DNA, 396 bp, Glycine max
accaggcgcaacgcgcgtgagctcgaggaagagatcgagaacatgggaggacacctcaacgcctacacctccagggagcagaccacctattatgccaaggtcaccgacaaggatgtcccccaggcccttgacatcctcgccgacatcctccagaactcccgattcgaggaaaaccgcatcagccgcgagcgcgatgtcattctccgggagatggaggaggttgagggtcaaactgaggaagtgatctttgaccacctacacgccaccgcattccagtacactcctcttggaagaaccattcttggacctgctcagaacattaagacgatcaccaaagcccatctgcagagctacattcagacacattacacagctcctaggatggtgatagctgca

SEQ ID NO: 26054 - DNA, 373 bp, Glycine max
tgatgatctcactgcatctatcctcgtaaaacaaaacaacctaagttaaaccttcacacgttctttcaccatgtcctggttcagacacctctccaccaagttttccgccatcaccaccacatgcacgcaccgctcaagtcttctgccccggtttagcacctcgaccgctccggttcggcatgcgggcctggagcccactcaggcccacgagaagcccagggtggtggttctgggctccgggtgggccgggtgccgcctcatgaaggggctcgacactcaaatctacgacgtcgtttgcgtgtccccgcgcaatcacatggtcttcacgcctctcttggcttccacgtgcgtcggaactctcgagtttagaacc

SEQ ID NO: 26055 - DNA, 436 bp, Glycine max
ctctccgccacttcctgcacaaaccctcccctctccatgggacagtcaccgtccaccaccgccgcgcctccgccagacctcaaccgccaccaaattcctcagatacatccaaacaccgattccgatttcaccgattacaccctccgtctctccgacgattgcctggccgcaatctttcatttcctgagcaccgccgatcggaaacgttgctctctggtctgccgccggtggctccgcgtcgacggccagaggcggcaccgtctctccctcaacgcacagccggaattactagacttcgtcccttccctattcaaccgcttcgactcggtgacgaaactcgctctacgatgcgaccgaaagtgcgcgagcataaacgacgacgctttggttctgatctctctgcggtgcaggaatctcacgcgcctgaagctgcgcg

SEQ ID NO: 26056 - DNA, 272 bp, Glycine max
atgcatcatagaagtatgaatgctgccgttgaccaatctcgcatgggttcttcagctggccaaactatggagagcaatgctagaaaatctcaggaactagatgttaaaatagaatctcaaggattgcaaccaagccaattgacatcttccagttccaacaaaattgctcaagaaacagaaagaacatcagttcacatacaagggcttaataagcagcagcaacaacatctacatttcccatcagcatatggaaatagtggtggtaactataa

SEQ ID NO: 26057 - DNA, 500 bp, Glycine max
  unsure (1)..(500): unsure at all n locations
tactaaaacaaatggctcctgagcatcttctagcaacctttgccaagttatgtgcagaaattctagccgcagcttctgatggtatgctcaatatagaagatgcaactggacagtctgttctacaggatgcttttcaaattctcggctgtaaagagatacgcatttcatccactcgtgcatcatctgagtcagcagatgtagaggaggacgggggagaaagtggatctgcagctagaggaaaggctataactcaggcagtcaagaagggccttatccaaaatacagtccccatcttcatagagttgaaacgtctgttggaaaccaagaatagtcccctcataggttctctcatggagtgcctccgcattattctaaaggactacaagaatgagattgatgacatattggtagctgataagcagctgcagaaagagcttatntatgatattcanaaatatgaagcagcaaaagctaaagcaacagttgctgaggctgtgggc

SEQ ID NO: 26058 - DNA, 294 bp, Glycine max
atgataataatagtaatgagaaggaaccgtctcagacagtttcttcaaatcctagctccttccctgagaccagcataatcgcccgtccagggagggagcagcagcgcaagggcttgagtcctggtgccattgtggccatcgtgatcgcgaattgcgtggcactgctcgtggtagtgtcgttcgcggtggcgcattgttgtgctagagggaggggttcgagtttggtggggagtggggagagctacgggaagaggaagattgagagcagctacaatgggagtgatgagaagaagg

SEQ ID NO: 26059 - DNA, 299 bp, Glycine max
gagagatgaagatgtctttacgttctggatccgatctgtgaactgtgatccatcgtcaatctttcagtaacaaacatgatcggactgttcttgttgctgtggctgctgctatcggcaacttgctgcaaggatgggataatgccaccattgcaggatctattttgtacataaagagggagtttaatttacaaagtgaacccacaatagaaggtctaattgtggccatgtcacttattggagccactgtcgttcacgacatgctctggacccttatcagacttgctaggccggcgtcctat

SEQ ID NO: 26060 - DNA, 546 bp, Glycine max
ttgtcgcgtggggataaacttgacagaaggtatgtatctcctcgaaggtactcaccagctccagatacaagaggccgccagatcatccgtgaatacagtcctacaatgtctttggagaaaaaaagtgacaggagacataggagaaaacaggatactaatggccaaagtgatatttctggaaatttgaaagtctcagatagagttcaaggtcaagttaaagaaggaaaattgctttcctctggttctaggaataatcttgaggagcagctgaagaaagtagattcagatatcagcactcttcagaaccgaaaattccagctagaggtctatcttgatgagagtgttcaagaagtggatagccttaattctagaattcgggaacttgaagctcaactatgcaaagaggatgaggagtgcaaaagaattacttcaagaataaggaaatttgtaagagtgcacaatcatatgtcagagttacaagatgaactgaagagatcacaagtccgacttcaaaggtttggagatcagcttttctcagacatttct

SEQ ID NO: 26061 - DNA, 293 bp, Glycine max
ggctgaatctctgaaagattacgaggaggattttgaaaatcctgaaaagaagcccagaaggaacaagtacgctttcgcatgtgctattttggcttcaatgacttccatcctactaggttacgatattggagtgatgagtggagcagcactgtacatacaaagagatctcaaggtatcggacgtgcaaatcgaaatcctgaacggtatcataaacctctactctcccgtcggttctttcatcgccggcagaacctccgactggataggtcgccgttacaccatcgtcctcgccg

SEQ ID NO: 26062 - DNA, 436 bp, Glycine max
gcaaatgcgcacatagaatttcagaattctttgccagcaccatttctgtcgttctccgcccttcatcgtcgactccggccgattcccgaagttccaatggcgtcttctaagaggcctaatgcggggccgaatgggagagggaaacgccggagatcttctggcggtttttcgccgttgggtgtttctccggggagcgttgtgttccgtttgctctgtcatgcttctagaattggcggtgttattggcaaaggtggttccatcatatcgcaaattcgccaagaaactggcgtgaaacttaggatcgaggaagctgttcccgggtgtgatgaaagggttatcactatctcaggttctgaaaaagagactgaagaagataacactgaacagggaaaggaggttaatgataatgatgatggtggaagcgaggggaaggatc

SEQ ID NO: 26063 - DNA, 266 bp, Glycine max
gcttcttggaaatggaaacaagtcctataagagcattgaaagatgaggataaagggtaccctcctgtgtaccctgttggaccaattgtccaaagtggtgatgatgatgcaaaagggttggacttggagtgtttaacatggttggacaaacaacaagttggttcagttttgtatgtttcttttgggagtggtggaacactttcgcaagagcaaataactgagcttgcttttggtttggaattgagtaatcacaagttcttatgggtt

SEQ ID NO: 26064 - DNA, 386 bp, Glycine max
ctgactgctgcggctgccacagctttgcgtggggctgcgacattgaaagcgagggccctgaaggaagtgtggaatattgcagcagtgattcctgtggagaaaaatttggcagtagctggtggacataataacaacaataacgcaagtaatggaaattctaagagtagcttcagcggtgaacttgtccctgaagaaaatttcttgggtatatgcagtagagaattattagccagaggttgtgaactcctcaaacgcacacgcaaaggtgatcttcattggaaggttgtatctgtgtatgtaaacaggatgaatcaggttatattgaaaatgaagagcaggcacgttgctgggaccatcacaaaaaagacaaagaatgtggtgcttga

SEQ ID NO: 26065 - DNA, 282 bp, Glycine max
cactcccactacatcctcctcctcttcaccttccgcgacctctcccctccccccgttgcctccttcaaccgctcctaccccgtcacctcccccaaccaatactccctcttcttcgccaactgcgcccccgaaacctccgtcaccatgtccgtccacaccgaagcctacaatctcgacgctgacggttcacgcgactacctctccgccggccaaaccctcctcccttccctctactttctcttctttttaacctacctctccttcttctccttctggctctac

SEQ ID NO: 26066 - DNA, 399 bp, Glycine max
gtaaaagaggataaggaagtgcatggtgtgtcatgtgtgaaagaagttgaggaggatggggaagttgatggtgtgaaaaaagtagaagataacaaaggtgatgagttgaaagaaatagaagaggataagacagatgatcatatatctgaaaatgataaaatggatgaagacgctgagattaagccaacaatggaaggtgagccagaaaatggaaaagaggaatctgagaaaccagtagtagatgctatggaagtggagggtggtattaaggagaaggaggagagcaaagaaaatgagaaagttgaagtggtgatggaggaggatgagaaggatgaagatgaggataaggataatattgataagtcaaaagaagagaaggcagaagatagtaagggtgag

SEQ ID NO: 26067 - DNA, 274 bp, Glycine max
gccaccacttgccggaaaatcttcgccggtaactttttccgatcattactctctttgtttggccttttcgcttcccttctttcaaacgctttaacttctctcttccgttccgttccgttctcgcatcatcttaaactagggttcccggaaaccctagccttggttggttgccatatctgctccatgagtttgggagaaaccttactggagctattcagattcagctggttcagataaacgaaggcgtctcgctctgcgatttgggtgtctaatg

SEQ ID NO: 26068 - DNA, 646 bp, Glycine max
gattcggcttgggatctttgccatttcacaaagttgcagtggtgtggcagctcgagcttgtggtcttgttagtttagaacctacaaagattgcagagatccttaaagatcgtccatcttggttccgtgactgtcggagcctagaagtttttactatgtttcctgctggaaatggaggaaccattgaacttgtttacacacagacatatgctccaacaacactggctcctgctcgggatttctggactctgagatataccacaagtttggaaaatggcagtcttgtggtttgtgagaggtccctgtctggttctggaactggccctaatccagctgctgctgctcagtttgtaagggctgaaacactccctagtggctacttgatccgaccatgtgaaggtggagggtcaatcattcacatagtagaccacctaaatctcgaggcatggagtgtgccagaagtgttgcggccactttatgaatcatccaaggtggttgctcagaaaatgacaattgcagcgcttcgctatatcaggcaaatagctcaggaaacaagtggtgaggttgtttatggattgggtaggcagcctgctgttctgcggactttcagccagagattgagcagaggcttcatgacgctgtaaatg

SEQ ID NO: 26069 - DNA, 539 bp, Glycine max
cacttttaatcgtttcccttcattcactcccctttcactttttcccttccaacaacacaaattttttgttcatttcatactaattgtcattaattttgagacccaaaaacatggacagccaacgaagtcctcttcttagttgggctttctactgccacggcaagtcgatggaggagctgaagcagtctctgatgtacactacccttgagctggaacaaacaagagcaactgtccaagaagagctaagaaaaagagacgatcagcttctcaccctaaaggagcttctcaacaaagtcataagagaaagagatgaagctcaagagaaatgccagagactagtgttggagaaaatggtttttcagcaccaaaccgcacctgcttctggagtttccagcattgaggacgagccaagaaggggaattaatgactcctccaacaatggcctctcttcatcagattgtgaagaaagcattgtttcctctccagttatggagcatttgccaccacaacagcaacagttgacagagtcaatgattgag

SEQ ID NO: 26070 - DNA, 566 bp, Glycine max
acaaggaacccttcctttttccatcactactaagtactaacactgaaacttgtgcttactcttgcagcaaagcgaataatggcttcactttccaccttcctcacactcactctcttcttcctctcacacgttaacgccaaagaaatcgtcatcaccgaagagggttacaccgtgaccaccgtattcgacggccacaagcctcacatcttccctttcaccgttctccagcgacccttttcctccgatctcatccttctcgattccgtcaacagcactttctacacggcgcaattccccattactgaagaaagcgttttcacgaggctttctggcgatgggtctgtggggtattctgatggggacgtgggttctgctcggttcgccaaacccagaagctttgcttttgatatgagagggaatgtgtatgttgctgataagtccaaccgtgcaataaggaaaattagtgccaagggtatgtttgtaaataattccttaatttggttgcaattaaagtttgtctttggcttcgtttaattgtcttggattgcatgatgttgattgaaaat

SEQ ID NO: 26071 - DNA, 478 bp, Glycine max
attcggctcgagctcgagccgttcatataccttgtgtttgtatagcatatattcctagttgatattatctatagatggagccaattgaacaaggaagccaacctgaaaaggaaaaatggaagggcaaggccacaacagaagtaaaaggagccaaagcagaacaagtttggcctcttttggaggatttctttggccttgacaagtggttccccaccctctctacatgcattccagttgaaggtatctctggccaacctgggtgtgttcgcttctgcgctggtttcaagacccctgtggatgatggcaaacaaactgtgaattggactaagcagaaactgctatccattgacccaactcaacgggtttttagctattcgatcgtggatgggaatgtaggatttcactcctacgtttcaactttgaaggtgctgccaatggctgacgggtgtgagattgagtggctatatgaagttgaacc

SEQ ID NO: 26072 - DNA, 426 bp, Glycine max
gaccacaagagattcaagggctggcagaagaatgccataacaggattccttgcggagcaaatcattaaaattggaaaacccaataacttctattgagtggatgctatgtgaacaacatagcttctgcagagtcaggaatgagtcaggctgaagattttggtagatcatactagcaatttaattcagttttcttgagatcacagtgatagttaatgaataactgaagtttgagataaactgatatatacataaatccaattctgatgaaaaacaatatttgcaattacatcaattaaaaccatatatagcaataatactttatagaatgtttgtttttatgtaatgtttccaatgtttttaatgttagacctgtcattaaactgaaaaaaaaaaaaaaaaaaaaaaactcgagactagttctctcgt

SEQ ID NO: 26073 - DNA, 545 bp, Glycine max
gacagaccattctttcaaaccgatttagtggaccaagggcatagtaagtcttcttcgattattgaagcgtataaacggtccaagtcggatgctcccgtgatatctatattgggtgccaaggtagaagttggtagaagagaatatattcctcaaactttatctttgccaaatggcaaggcaattgagcctgcaatggatcttccattgtcaggagcaggtagcattttaggaatgggccccacactatcctacaatcattcaactgcttttgggtacaacggactgacatcagtgcctgctttgtctttttcaccagccatgtatggatcacctggtggcccaattccatacatggtagactccagaggaactcctgtcgtgcctcaggttgggggatcttcctcaactgccctgtcatcttattctcaacctccatttatcgtgagcatgaccggtacacaacttggtttaaatggggttggatcttcacgtcccaactttgatttgaactctggcttcacaattgatggagggaacagagacat

SEQ ID NO: 26074 - DNA, 320 bp, Glycine max
ctaatccggagggatcaacgaaaaggttcttcttggtgttaccattccagtttgtgtcttatttattgggatgattggtgttggaatactactttgccggtggcccccaaaaaagcatcttgatgaagaatccaaaagcattgaaaaaagtgatcagcctattagcatggtgtgggcaaaagatggaaaattcacattttctgatcttgttaaggccaccgatgacttcaatgacaagtactgcaccggaaaaggaggatttggaagtgtctatagagcacaattactcacaggccaagttgttgctgttaaaaggctca

SEQ ID NO: 26075 - DNA, 920 bp, Glycine max
attggttgctgttgattccctctctatatgcatgaatatcaatgggtgggaagccatgctcttcattggagtaaatgcagctgtcagtgtcagagtttccaatgaacttgggcttggacatccaagagctgccaagtactctgtctatgtgatagtctttcagtcacttttcttgggaatctttttcatggctattattttggcgactagagattattatgccattatttttacaaacagtgaggttttgcataaggccgttgcgaaactaggatacctcctttctgtgacaatggttctaaacagtgttcaaccagtggtttcaggtgttgctattggaggtgggtggcaagccctggtggcctacatcaacataggttgttattacttatttgggcttccactggggttcgttcttggttatacagcaaatttgggggttgagggactttggggtggtatgatatgtggaattgttctccagaccttgctgctcttgttgatactttacaaaaccaattggaagaaagaggtggaacaaacagctgaacgcatgcggatatggagtggacaagacattggagttgataagatagtggcttctgcataatcttgtatatcttccacctccactcgagtcaagttctcaaagtctttttttcatgtgttcctagtctgtccattttacatgtaatgttgctctcttccaattaggtacagaacatagtttagctgtggtgtctgatgagatggtgaagataaaaaaacttcgttatttttccaatttagttttcattttttagttattgaatatctcagtgaaaaatgaaaaacatcaatcttttcttttactttggcctagagatgagttgatatatctctatgcaggactagattagttaataaaaattatttatagc

SEQ ID NO: 26076 - DNA, 244 bp, Glycine max
caatatttgatattgttgttggtgatgttataccccttaaaataggagatcaggttcctgctgatggagtattaatcacgggccattcacttgcaattgatgaatccagtatgactggtgaaagcaagattgttcacattggatcacaaaacaccattttttatgtctggttgcaaagtagcagatggagttggtgttatgctggtaactggtgttgctataaatactgaatggggattgttga

SEQ ID NO: 26077 - DNA, 541 bp, Glycine max
gcaaaatccactttcttcgttccaaatttggagcttgcaggcattgctttgagcatctcgttttgttggtcccaatattaaaaacaaatcattgctcccttgtgatttgtttcatccagaatcttcacaaaaacaccatttatatatatatttgtaggcaaaatttgagttccttgttaggaaaatggtgtattcgaaggcacccacagcgtactactcgaccctgcacgactcaatatcttctctgtgcaagaccattttacccttcggcctcaagaaacatcggtgtctcgtttccgcagagcagaagctgtggcagcttctatccgacaacctcaaatggcagcgagattctctctatcagatgctgaatttggtggctctccacagagatgacatcctttctgaagctgaggtctcggctttcaggacccatttgctcgcgaaacccttcttgcttttccccctgcgcaccaggatcacgccctcatcatcaaagatcagctcatgtttgtgcacgatctccttaatgcaaagtgca

SEQ ID NO: 26078 - DNA, 586 bp, Glycine max
ctcctccgaggagttttgacactggttgtagccctcaagatgcgggtttcaaggagtcactaccaagtcaagtgcgtgcaccagcagtgttcaagtgtgttcgtgtaacatcagtggatgatggtggggaagatgagtatgcgtatcaagcagttgtgaagattggtggccatgtcttcaaagggtttctctatgatcaaggggttgaggacaaagaagggtaccctaatttatctgaattacatttgagtggtggtgttggtgaaaatgttacaagtgaaagtgatggtggtagaaatggaatttcatcttcatctccaatggtggatcgttctcatgatgtctatgcagcttcaggtggagggttgctacttggaggttcatcaaactatggtaatcatccaataaattaaaaatcattttttccaagtgtaacgtagatgatgatggatgggcttggaaagcttgacttattattgtagggtaacttttcttatttttccaacattgggggtgggttggagggtatagattaattaatattaatattcttctaagtttgtatcttattataaccaaaaaaaaa

SEQ ID NO: 26079 - DNA, 477 bp, Glycine max
  unsure (1)..(477): unsure at all n locations
gtcaacatcaacaggaattactattacttaaggaatgcaaacccttcactgtaggatttcccaacttggatggaactgctttagagtatcaccaatttgatatcaataaggatatggatgacagcttctatgctggtacaggtttttgtgaggaaggtcgtgttcctcacatatctagctatctgccaagtgtgtgccctcctccttctgctttcttaggcccaaaatgcgcactttgggactgtccaagaccagttcaaggcttggactggtgtcaagactattgcagtagctttcacgccgctctagctttaaacgaaggaccaccagggatgaccccagttctaagacctgngggaattggactcaaggataatttactttttgctgctcttagtgcaaaggcacaaggaaaagttgttggaatcccagaatgtgagggagcagcaaccgcataatctccatggaatgcacctg

SEQ ID NO: 26080 - DNA, 327 bp, Glycine max
actacttcactcatcttagttagttagcctcttcatttcatgttcttctttcctcaaaaagactcaacccacccccgttttatgctctctttctgtcacttgtgtttatccaagcacaccaaaaacagagaaaatgaggatggattatttgaagcaaaagtttcccttcaaccacagaaacctcttcctcaaattgctcctcacaatcttcttcataggcctcgctttccgcatcctcttcttccactccctgtcccctcagatttcccctgttttggaatccccatttcctgagaaagtgacattaccagaacctcagacttcaat

SEQ ID NO: 26081 - DNA, 293 bp, Glycine max
cacaacaacaacaacacaaacctatgcttaaaacttaaaattatccatcttcaacttcacaatggtgcgtgtcaaagaagctctcgttgtcaccccttccgagcccacaccgaataccgttctctcactctcagctcttgactcccaactcttcttgcgcttcaccatcgagtatctttttatttacaggcccggcccgggcctggacccaacttccaccgcggctcgtttaaaagctgcattagccaaagcgcttgttccttattatccattcgccggcaaggttcgctcca

SEQ ID NO: 26082 - DNA, 593 bp, Glycine max
attatatttgggaacggtttgaacattatatttgggaaagtatttgaatcaaatgtgcttttgtgttgcatggttctgtgaaaatctggtttatatgatctacgaattgatgagaggagctaagtgttactgtgtgcgttggtatatatactctgatgaattcccttgtttgattatttgcagtttttttcttagggtgtgtttggtttagaggatggaaatagagaagatagaaatagacgagaaattttttaattaaagtaagtgtaaaaggtgagtctcacaaaaaaagtacaaaatttctctcctctctaccaaacacaccattagagtttcttcccattatgaataaaatctaatgttacttgataacagcagtgatacattgttgagatgatttattttggattgaaatctgtaagaaagatgactctagcttcaccttattcttctgcaaaaaaattgtccaaagacacatcctaacgattatggatacttctcacaatctcctcagcagggtagagctataaatttcttgttggaaagtccaaacgcaaaattatacaaggaatttttgataaattttagaaaaa

SEQ ID NO: 26083 - DNA, 634 bp, Glycine max
gatgaggttcaaactactggtaagcactcttcaggattgattgttttgcccctgtattcaggactttcacgcgctgaacaggatttagtgttctctcaagcccctcgaggaaagagaaaagtgatcatttctactaatatagcagaaacatcactgacgttgggaggaattgtctatgttgttgacagtggattctctaaacagcggttctacaatccgatttctgatattgaaaatctggttgtggcaccaatctctagagcttctgctagacaaagagctggtagggctggacgagttcgaccaggaaagtgttacaggctatatacagaagaatattttcttaaccacatgtctaatgaggggattccagagatacagagatcaagtatggtctcctgcgttatccagttaaaggccttggggattgataatatcttgggctttgactggccagcgtctccatctactgaagcaatgatccgagcattagaaattctctactcacttagggttttggatgatgatgctaagctgacttcaccaactggatttcaagttgcagagattccacttgatccgatggtctcaaaaatgataattgcttccagtcaacttgggtgttcagaggaga

SEQ ID NO: 26084 - DNA, 410 bp, Glycine max
agctctatacatcacagcgtttggagctgcagggataaggccatgcgtgtcttcttttggagcagaccagtttgatgagagaagcaaaaactagtttgcacaccttgacagattcttcaacatcttctatctgtcgtgaccataggtgcaattgtggccttcacagtggtggtgtacgtgtagatgaaatttggatggggatctgcatttgggtcactggcaattgcaatgggaatatctaacatggtcttcttcataggcactccattgtacaggcacaggttgccaggaggtagccctcttactcgtgttgctcaagtcttggttgctgcatttagaaagagaaatgcctctcttggtagcagtgagttcataggcttgtatgaggttcctggcagacagtctgctat

SEQ ID NO: 26085 - DNA, 510 bp, Glycine max
gggtttcgcacctgacttgatataaagacggagagggtttctagttaggtttaagcgtcgagcctctgttctgttcatttgcatttccatttttcacactctctctgctttcaccatgtggacacttcgtcgagcttctcttcgtctcagtacgagccaaggacttaacgcgggagctacccgtgcttcggctgtcaaattagtgccaatcactgttgaagaaaatgaggctggtatccctcagtctcgtcaaatcactcacagtagatttctgtccgctgacacattttgccgcacgggtcgggtgtccctgaaatttgctgtgggcacgcgtgaactttcctcacaagctggtgctagcagcacgaaagtggatgatgatgatttggagggtgggttgtctgagctggagatacagggaagtaatgatgaatctgatgctgacctgtctgatgaagacgaggatggtggaaaaccagttgatgagatggacttatcagatgctgaccc

SEQ ID NO: 26086 - DNA, 658 bp, Glycine max
  unsure (1)..(658): unsure at all n locations
tggcgttagaagaaggaaaagcttttgagcgtatgggttctaggcggcttgctggcttgcttgtatctctttgggtaagaaagaatcttagaacacatgttggggacattgatgctggggccgtcccgtgtggtttggacgtgcaattggtaataagggaggagtgggtttgagaatcagagtgtatgacaggataatttgctttgtgaattgtcacttggccgcacacttggaagcagttaatcggcggaatgctgattttgatcacatttatcgaaatatggtgttcacccgatcgtccaacctacttaatactgcagctggtatggtaccatacctgttcttgctttgctctcttgccttctccacatatttattttggctactttactcttctggcttgccattggtcctctctgttacagctggcgtctctacttctgttcatgtgcttcgtggtaccaatgttatgggtgtcatctctgaagaaccaaaacctgatttatctgaagcagatatggtggtattttttggtgatttcaactatcgcctttttggtatatcttatgatgaagcccgggactttgtttcccaaagatgctttgattggcttagagaaaaggatcagctcanggcggagatgaaagctggaaaagtt

SEQ ID NO: 26087 - DNA, 789 bp, Glycine max
ggcacgaggaagtcaaaaaggccgtagcctgtcttctgtttggagggtcaagaaagaatttgcctgatggagtccggttaagaggtgatatcaatgtattgcttctgggtgatccatctacagcaaagtcacagtttctgaagtttgttgaaaagactgcccctattgctgtttatacttctggaaaaggctcatcagcggctggcctgaccgcttctgtaatccaagatagcggcactcgtgagttctatcttgaaggaggggccatggtcttggctgacggaggtgttgtctgcattgatgagtttgataagatgaggccagaagatagagttgctattcacgaggccatggaacaacaaactatatctatagccaaagctggaataacaactgttcttaattcaaggacttcagttcttgctgctgccaaccctccatcaggccgatacgatgatcttaagactgcacaggataacattgacttgcagacaactattctttctaggtttgatttaattttcatcgtgaaagacgtcagaatgtacagtcaagacaagataatagctaatcatatcataaaggtccataaatcagctggtggaaggatgggagagagcagaactttgaaagaagagaattggctgaagaggtatttacaatattgtcgaactcaatgccaccctcgtctatctgaatcagcaacaacattattgcagaatcattatgtgaaaatcagacaggatatgagacaacaagcgaatgaaactggagaagctgcagcaatac

SEQ ID NO: 26088 - DNA, 460 bp, Glycine max
gtgtacctggtttagggttcgaacctcagaaacctcgcatctccaaaaattttaaattcatagaagaaaatgggagacgcagaagaggagaacgcttgcatagctgaagtatttgatttcaaggagaagaagaaaaagaacaagaagaagacggcgaagaagagagtaacatttgctgagaacgaagcaaattctccaacggtagtaaacaatgatggcaatgaagatagtgctgctgctgccagcggcgttaggatttctctgttcgatttctcggtcgagaatttcttccgagacatggacaccattgccagactctgcgggaaagaaaacggtgctgctttggaccagagcgaggttcagagattgtcttcctcagtcactttcttaagagaatggagagattttaaatatccctcaagaagcattaagtttgcttatggacttgagagctctgatt

SEQ ID NO: 26089 - DNA, 465 bp, Glycine max
agtggaatgccacaccagggacagcttctttaagttcactgaattatctttaataattcataatgaaagccgatcggttgagtagtgacttataaaaagcattatctatctccaggaatgggtgacagcccacttcatgcattggtgatttctttgcaatcctcccaattttcgtacaaggtcgctgttgtgcctgttgtgctaaaagtggatttcttgttctgtacttttgtatacttttagttttcggctgtcacattttgctagtgtcttttcgaagcctgaatttttatgttaaagatataagatactctgatatcgtatggagttgtcatctttattatggctgagttacctgagtaaatgagtaatcagggaagggaactatttcccttaacccgtatatggaagtgcaagcttgagtgcctagttcacataatgttttgataatctaatcttttgtgc

SEQ ID NO: 26090 - DNA, 271 bp, Glycine max
tggaactctgtactcgaaccttcacaagtttccttcttttcaatccttctttctctccaaactctgtttttcttcgtgctaatcccaacgctacaacacccttaaaattcaattcccttaaactctcatcgttttcgcctcatgttcacctctttcaaccctttctctctcctcacatttcgtctcccttcacactctcagctgctgcttctgcttcttcttcttcagtcgcagttggcactgaacaggaccgtcttccagctgaattgaa

SEQ ID NO: 26091 - DNA, 447 bp, Glycine max
caacagcactgaagactgcaggtctgacctcatttcctgattacctggtgttacatatgcggagatttgttatggaggcagattgggtaccaaaaaagcttgatgtgcacattgatgttcctgatatcatagatatcagtcacatgcgcagcaaaggtcagcagtctggggaagagctattacctgatggtgttcctggagagcaagattctaacaaaatttcggccaacgatgaaattgttgcccagctggtttccatgggctttaaccatctccattgtcagaaagctgctataaatacatcaaatgttggagtagaagaggcaatgaattggttgttatctcacatggatgatccagacattgacaatcctatttccaaaggccatggctctgagacaattgttgaccaatcaaaagttgatattctaatttcttttggatttg

SEQ ID NO: 26092 - DNA, 294 bp, Glycine max
tggggatcagaggattgccatatatgactacatggagaatggaaacttgcaaaatttgctttatgacttgccacttggagtactacaaaggccagatgattggagcacagatacatgggaagaagaagatgacagtaacgggattcggaatgcaggatcggaaagagtgctcacaacttggagatttcgccataaaatcgcactcgggactgcccgagcattggcatttctgcatcatggatgctccccaccgatcattcacagagatgttaaggccagcagtgtttatttgga

SEQ ID NO: 26093 - DNA, 417 bp, Glycine max
cagcaatgtaaggatctcaacatatcttctgattcaatcaagaagagcccaattcaggccaggaagaaaaggtctggggtgggtgaatcttttgaaaagaatgctgggaagctcagaaagaacaaatcagatttaattaagaatgtcggtgatggagatgcgggaaatgcaattcagcctaggaagggcaaatcagagttggatcatgttttggatgaatcaaggaatgatggattggctggtgggtctgcaagagttgtaattctcaatgggaagaatgattgtgatgaaaattgcaatgattttggtgtgtgcttagagatggtcatttctagcatttcaggtaatgttggcatgatcaagtgttcaccagtgcatgttgatgatgatgatgaagatgatgtggtagaggaagag

SEQ ID NO: 26094 - DNA, 251 bp, Glycine max
gaatctcaacccatcatggttcatcgggtcatgaaacaaatcctttctgattacatccaagggtcgctcctaaatttggttgtaagatcaatccactaaatgttttacaagaagacgacgctcctaagtattggtgtggcactgtagcagataaagataatgagggacgtacaatgatttcaaagaaaaatgatatgctacaatatccagcaaaaaaactgaaactttttgagccaaggtgttctgatgga

SEQ ID NO: 26095 - DNA, 271 bp, Glycine max
ctagtataactagaggcattagacatgaggaacagatgaatatgaagaccccaaatacaaactaatctattagtgcgcctttaataatcccatgacttaattgggtttcaattcagtgacaccatgggacccgaagtgtgtagcatacggagttgaattggtttcaactttgaaaatggtgctcaactatactcggggaaattccatgatttgaagacccttcatccatctgctatggtcaagctgttgtcaaggctcaacagaaaagctt

SEQ ID NO: 26096 - DNA, 467 bp, Glycine max
actggtctggagggacctggactcactgttgctcagaagctttggtattgtgttgccactgttggtggccagtatatatgggctcgcttacaatccttctctgcttttcgtagatggggtgatactgagcagagaccgttggctcgacgcttatggatcttgatacagcggatacaaggaatatatagagctgcttcgtttggaaacctgttgatatttctttgcacgggaagatatcgagatcttattgaaagagcattacgagctaggcttgtatatggaagcccaaatatgaatcgtgctgttagctttcactatatgaaccgccaattagtttggaatgaattttcggaaatgttattgttgcttctccccctacttaattcatcatctgtgaaaaatcttcttcgacctttctctaaagataaatcatcgggttcagccgaggatggcacagcatgtcccat

SEQ ID NO: 26097 - DNA, 323 bp, Glycine max
gtagccaatagtagcttgcctactcaagacaattcacaagttgatttgaattctgaaacagctacgtcattggtaggtatcaattcttctaatgagacagatagtattagaatggaggaacccacttcagtggcttcgatcaatccgtccactgctgtaagtacagcaccaaatgagacctctatctcttccggtgattccacttcaactgctgtagaagcatcagtagagaagccaaataacacaccctctgctggctgtgatctgtaccgtggaaattggatacatgatccattgggaccgttatacacaaacaattcgtg

SEQ ID NO: 26098 - DNA, 477 bp, Glycine max
gtgttgcaaatggcttttcggatcgtgattttgagtattatgtgaaggtgattaggtggttagagtgtgaaggtcacatagaaaagaacttcaggcagaaatttctgacttggtacagcttaagagccacccctcaagaagttaggattgtgaaaatatacattgatacatttcttgaagatcctgcatctcttgcagagcaacttgtggacaccttctcggaatgtttgtccagcaagagaacatcagttgtgccagcggggttctgcatgaagctttggcattgaccagattttgtaggtccagctactagccgcaagcttgccatgcagtaattctttagatttttaatatattcttcatttagacagttcaaatacatatatttatttcaacattatcattcatatgatgatgtaagaattttagattcacttttattatacaattactatttaaattgataattttttttcc

SEQ ID NO: 26099 - DNA, 353 bp, Glycine max
cggggttctcgggtgcttgtgaaattttaccgggagaaggcaaaggtgaatgaaaggaagtacacagatagaattgagcaccctgtttgttattcaccacactatgtagatatcgacgctgaacttaactcaattccaagaagttttgggagccatggatccattaggagacacctacaactaattgaacaggaagagcaggagcaagctcttgaacgtcagagaagtcttgcacagctgcattttgcccaaaaatctttcttcagttcacctcattttggcttctccatggatgagtcaaggatttcagatgatcacttcaatttccagccagcagaagaatctttcagttt

SEQ ID NO: 26100 - DNA, 635 bp, Glycine max
aaggaagaattgttaatgtttcctcagaggctcaccgatttgcatattctgaaggaatccgttttaacaaaattaatgatgaatcaagtcacaacaactggcgtgcatatgggcagtcaaagctcgccaacattttacatgcaaatgaacttacaagacgtctcaaggaagatggggtagatatttctgcaaattctcttcatccaggagtaattgccaccaatctttcccgtcatatcagtccagtgaacggtctaactaaagctattgcaagactcgtgcttaaaaatgtccagcagggagcagcaacaacatgctatgtagcattgcacccacaagtgaagggaactagtggcaagtatttttcagccagtaatgtggccaaaacaacctcacaggggactgatgctgatttggcaaaaaacctatgggatttcagcatggatttgaccaagtaaaaaacccaattgttatttgtcagcagagatagcatcatgcactcttattaaatgaaaaacatcagttatatgacttcctctgtaatatatttatagtgagattctgattcctacattgcatatacatgaatttcaggcttaaaaaaaaaaaaaaaaagggcggccaccgagtaggtc

SEQ ID NO: 26101 - DNA, 262 bp, Glycine max
agaaacctaccatgatatgatatgatatctctgctgctgccttctatagccatactccaatcaatgttgtttcttctactccataccatacacactacctaacgcaatttgcaacttgcaacaaaccatgctactcacgtgttaccaccatcccttccctcattcactttcttcaacctcaacccactcgctcttcaccacaaacagaaactgcaacctctctctctctttctccatcgtaacctcgcgccctctccacctc

SEQ ID NO: 26102 - DNA, 547 bp, Glycine max
attttaatttgaacgatgcttgttggtgaagcaaatgcacaatagtggttttctgaatcagaaatatactcggagaaagaaactgaatcgcttacgcacgcgttaacattaccactttcttacttacagcacagcacttctgctaacctttcgtcttcaatttccctttggatttcattcattagatggattcgagttcggggcatcaagaattcgattatttgtttaagttgttgatgattggagactctggggttggcaagagtagtcttcttctcagtttcacctccgatgcttttgaagatctctcccccactatcggtgttgattttaaggtcaaatatgtgacgatggggggtaaaaagctgaagcttgcaatttgggatactgctggccaggagaggttcagaacactgacgaattcttattaccgaggggcacaaggaatcatcatgggcgagtttctgttctccattttttgacttgccatcttccccaattgtacatttattggattaggtgaaatgccttgaatgacaacctggac

SEQ ID NO: 26103 - DNA, 373 bp, Glycine max
cagaaagagatactcggaaaaagaaactgcatcgctcacgcacgcgttaacattaccacgttcttagttacagcacttctgctatcctttcgtcttcaatttccctttggatttcattcattaggtgagtacgtacgattacgatggattcgagttcggggcatcaagaattcgattatttgtttaagttgttgatgattggagactctggggttggcaagagtagtcttcttctcagtttcacctccgatgcttttgaagatctctcccccactattggtgttgattttaaggtcaaatatgtgacgatggggggtaaaaagctgaagcttgcaatttgggatactgctggccaggagaggttcagaacact

SEQ ID NO: 26104 - DNA, 394 bp, Glycine max
gaataaatcttatcagaaaaatattcatttgtctgcagttacggtctccatgacctcaaaattagatctctttactagtgattttgacttttggttctattattaccgacagtcctgtgtctccgacaacacaactaagtctttacgactcaatttcattagcattagcgtctcgcaatacgcaggtcgcaaaccggactcgctgcctagtactagcgcactttcattttgccgcttctctgttttcaacaaacgacaacaacctacattgccgtttcaaatcactatctatccccgaggcacaaagagagggagacatcatggtttcttctaatggactagctactacacaacctcttttttcttttggattgatttctgatgttcaatatgc

SEQ ID NO: 26105 - DNA, 200 bp, Glycine max
ctcgttctcgaaaacatcgacctagaaggttccattcaccccttaacctctctgactcagctccgagttctgagtctcaaaggaaaccgtttctccggtcccgtgccaaacctctccatcctcaccgctctaaaacttctcttcctatctcgcaatgccttctccggcgagtttccggcgaccgtcaagtcgctcttccg

SEQ ID NO: 26106 - DNA, 260 bp, Glycine max
cacgattgatgtcttgtatgaatctggtattgatagagctcaacctgatgcatttttggaagttggggattctagagaataccctgttagtctttcagtgtttgatgaacttgaaaagaggtactctgattggactaattgttcaaggtctgaaaggagattgctttttgatcgtataaatttgggaattatcagtatatacgagcaattcacgagtgtacaaccatgggtaagctctactacatccttaaatctttgtt

SEQ ID NO: 26107 - DNA, 540 bp, Glycine max
aacccctaacctcaaaacccccacttcgcgttacagggagggacaggctaaaacaatcatggcggcgcagtggtggcgctccgccgccggccaccttcgaacggtggcggcgggccgtggttccttgtcgggattccagcgcagcacttatcacacgatccaagccatcccaagggagtgcagcggcagcaaagtctcggcgagagaccgaacgcaaggtcgaataccttgcgtcgttttcctccagaaccttctggaaaaaaaccccgacgcgcgttcggaatcgaagaagcacttgctcaccgtcgagaagaagcagattaaggccattctcgactccgccgacgcgcctttcttctgttccacgcgcttccctctccagatccgcgccggttccggatcctcgcatttgctcgaatcgggaaccgttttacctatcaagattcatagggatgaagagagtgggaagattttgaatttggtgtttgtttgggctgaggatggaatgaaattgaaggtggatgtgcctgttgttttcga

SEQ ID NO: 26108 - DNA, 318 bp, Glycine max
gatgaatatcaaccttcagttcattttacgtataattccctaacaagagctagatagacagaagcttcaggaacttctacagtaatggtcagcatggcatgctaaacatgtttcgtcatccagtgatgctagcgaagtgttggaatccggtgaggagacattttttcctgcttgcatgttggacttgaaaagacttctgccgtgtcattctggatggagaaccaaacaagaaatgataagaacaaagatttcattcctttagctgataatactgtgcctctatatgattgcggatatgctttgggattgacttcagct

SEQ ID NO: 26109 - DNA, 252 bp, Glycine max
ctttggggtgataatatgggagctctgcaccttgaataggccttgggaaggcgtacctccggagagggtggtttataccgttgctaatgagggtgctcgattggatattcctgatggcccgctaggcaggctgatttcagagtgttgggcggaaccacatgaacggccaagttgtgaggagattctctctcgattggtggacatcgagtactcaatgtgttgatgccagtgtttttatcttttgtacatagt

SEQ ID NO: 26110 - DNA, 401 bp, Glycine max
ctcgagccgctcgagccggttctcttgaggttgaagattttaaagatgtcaaatcaggctactcaatagcctttaatttcaatgccaatccctatttcgaggatacaaaacttgtaaagacttatacctttcttgaggaaggaacaactaaggttactgctacacccataaaatggaaagagggcaagggcatacccaatggagttaatcatgagaaaaaaaggaacaagcgtgctcctactgatgtcagcttcttcagttggtttagtgacaccgagcagaaagatgatatagatgacattcatgatgagcaggttgcagaattgatcaaggatgatttatggccaaatccacttacttatttcaacaatgaagaacctgacgaagaggaaggtgatgag

SEQ ID NO: 26111 - DNA, 481 bp, Glycine max
gatttggtaagcaatgggtgaaattacaaagtcaatgtgctgggatctggtcctaattgcaaaggacaaattgaatggagtggcagcagcaatatatagaaaaccaactgacaatgagtgctataacaacagaataaaacatgagccaccaatgtgcagcgaatctgatgatccaaatacagcctggaatgtatcactacaggcttgtatgcacaaagtgcccgtagatgcatcagagcgtggatcaatctggcctgagcaatggccactgaggttggagaaaccaccttactggatagactctcaggctggtgtttatggaagagctgcatcagtggaattcactgctgattacaagcattggaaaaatgttatttcccactcgtatttgaatggaatgggtatcaattggtcttcagtaagaaatgtcatggacatgaaagctgtctatggaggctttgctgcagcactcagagccctg

SEQ ID NO: 26112 - DNA, 500 bp, Glycine max
ctcgtgagttcgagcccgaagtctccacaagacctcccagttctagtgcaactgtttttggagtttcaacacactccatgcagttatcatatcacacgagagggaacagtgtgccaaccatactgctactaatgcaaaggcacttgtacgcgctcgcagccttgcaggcagaggggattttcagaattaatgcagataatagtcaagaggagtctgttagggatcaattaaataggggattggtcccagaagatgttgatatacattgtttggcaggacaaattaaggcttggtttagggaactgcctactggtgttctggcttctttatcaccagagcatgtaatgcaatgccagactgaagaggattgcgctgaactggccggccagctacctcacactgaagcttcccttttggactgggctattaatctaatggctgatgttgcccaagaggaagacttgaataagatgaatgcacggaacatcgtcatggttttt

SEQ ID NO: 26113 - DNA, 258 bp, Glycine max
tttttatctcgctctctttcatgcgttcatcatcacttccataaattgcaacaacaaaacacagaacaagcaaatcaaaatgtcagcgaaatgcagccaaatccgacacattgtacgtctccggcagatgctgcggcggtggcgcaacaaggcccgcatgtcggcgaacagagcaccaccgtccgatgtgccagcgggacacgtggcggtgtgcgtgggcagcaacctcaccagattcgtggtgcgcccacgtattta

SEQ ID NO: 26114 - DNA, 325 bp, Glycine max
cgagatttgccaaaaccctaccaaaagcctaacggcataactcgccggcgaagagaatcagaagcaatcagcgacgacaacaatgggtggtggcgggagaggaggcagatcccgaactcagagaaagcacttccgccagagcagagagaacgtgtggaagcgttccaaatcggatcccgatccttcttccaccgaaaacaatcccccgtggactcccttcgccactgagaacgccgctttcgatttctactacaaagagcagggcatagtggacctgcaatactgggaccaattcgtcctacttctcagaactccattgcccgca

SEQ ID NO: 26115 - DNA, 432 bp, Glycine max
ggaatttgttgtgatgatgttgtggtttttggatttgggtgttgtttgatattgttaaggtggttgtgttttatgtgtgtagactatggagtgaatgcattggcatcatcgtggtggagggaggatgttgggggaatgcttgtgcaatggattgaagcaaattgagggtagtggctgctttaagctagggtttcatgtgtttaagtgattggttgatataaatactagtgtagtgtgtctttgtgtaaagggagaaaaacaaaagaaggtaaagcttgatgatatgaagctttcaacatcagggttggggcagcagggacatgaaggaggggagaagaagtgtctgaattctgagctatggcatgcatgtgcggggcccctggtgtccctaccaactgcagggactcgtgtggtttacttccctcagggtca

SEQ ID NO: 26116 - DNA, 311 bp, Glycine max
cattactatttcaagtgcacaaagatgttggacatttggtaaagaagtgttggttgttaaagacattatagagtggtggattggtagaaagacgcttgagcagcttcctcttgtggctttgggtgcttcctctggagggtatttcgtgtctgtgcttgccaccgccatgaagtttagtagtactgtgctcatgattgctgaggggatgcttgagcacattgatgttaaaggggactacccgccgcacctttttgttcacatgcccaaagatctttataggcagcagacaatagatgaatatgtggaggttt

SEQ ID NO: 26117 - DNA, 483 bp, Glycine max
agaaatagccaagaagaattttatttgaaaaaaaacatagacatgtttagaagcagcataaatagaagcaatagccttgcaatcaacgagttcccccgaagatggttccgtgagaggagtgaatgtggtattggttgatggaagattggagagtgttccagcaggagaagggaagaagaaaccggtgcggtggagataacgaatggcttgaaggatgtaacgacagcgcgtggcgtcgtccgaggaggttcttgaacggaggctggtggtgttgaggggacatggattcagatctgaatgtcgagcagatctcaaacttcgtcgatcgtccagccttctccgccaactacggttggtgggctccacgaaccttggcagcagccagcagcttcatcggatatggatttggagcttctgcgcttcaaaacgacgtcgtcatcgaagtgtcgtaggtaggcatgttcgctttggttctatttttca

SEQ ID NO: 26118 - DNA, 386 bp, Glycine max
ctaattcggggttggtgaatttgagcgtgaatctaccgaatgggaccagtttgtacagaagggcgttgtttgttactgcttctgcgccttcaaagtatgcggaggaggttatgtgggagacaatcactagcatttgtgggaatctcgtgcaacagtgtgttgggatagttgcggacaggttcaaggccaaggccttgaaaaatctcgagaatcagaatcattggatggttaatctcacttgtcagtatcagggcttcaacactttgatcaaggacttcgccaaggagctcccactgttcaggaccgtcgttcagaattgtctcaagctcgccaatttgttcaattacacctctcaggtgaggaacagtttccacaagtaccagctg

SEQ ID NO: 26119 - DNA, 268 bp, Glycine max
tgcaagtacacacgacacaatccaaatcaagcatcaccatgttccgccaccgcttcctcctcatactgtaccccgcacaaggccacatacaccccgcattccaactcgctaagagactcgttagtttaggcgcacacgtcactgtttccaccaccgtccacatgcaccgtcgcatcaccaacaaacccaccctccctcacctctcctttctccccttctccgacggctacgacgacggtttcacctcctccgatttctccctccacgc

SEQ ID NO: 26120 - DNA, 513 bp, Glycine max
gtttctgtacgccgcagcccacccaacagggaaggaagttgatgccataaggcgagagctcggatattaccggccaaattcaaggggaagtcaatgggccgggtgggcaatgcccgaaacgctaccgctgagccctgatgaagggcccaacgtcgtttcaagagctaaaggcatcacagtgattggtgcacgcccttgggtcacactctacaacgttccaatcctgtgcactgatgtgtcagtagcaagaaggattgcaaggaaggtgagtgctcgtggcggtggcctccccactgtgcaaacgattgcgcttgtccatgaggactcaactgagatagcctgcatgcttttgtgactccaagcaaggttggagcggatagggttcaaaaattagggttggagatggctggcccgcacaagaagggacttggacaatagaacaagggttattttcacttgacattttctccagaaaatgaattcgttagagaaatacatgaaaattaatcaata

SEQ ID NO: 26121 - DNA, 344 bp, Glycine max
gttacatctctctctttctctctctacgctttctgcaacaaccattcacatttttcattctcagttcaatcctttgcaaacatcaaacatcaacaacaacaatgggtgacacaaaagacacccacatagtagaaatccctgtagaccaagagcatcacaataatcaccacaagaccgtgctgtgttccatgacaagcaacatgattgacgccatagaggaccaccctctaaccgaaatctccgagagcccgggtcacctcttgctcctgacgctatggcaaagagaggaagaactctttgccaaacgcattgctcacaaggcgactagaatggacaccatcaaa

SEQ ID NO: 26122 - DNA, 385 bp, Glycine max
tgatatgttatgcaggttgtcggttcataaaatatgctactttagaagaagctgatcaggcaattagagcattgcacaatcagcatactcttcctggaggtgttggtccaatccaagtgcgatatgctgatggtgaacgggaacgcctcggtgctgttgagtacaaattatttgtgggctctctgaacaaacaggctaccgtaaaggaagttgaggaaattttctcaaaatatggccgggttgaagatgtttatcttatgcgtgatgagaagaaacaaagtcgtggatgtggttttgttaaatactcacacagagatatggctctggcagcaattaatgcgcttaatggaatctacacaatgagaggttgtgagcagccactaat

SEQ ID NO: 26123 - DNA, 396 bp, Glycine max
cttcctggggttcttgggtcaactatttcatggagtttatattgcgtcttctatgacagagccaaacagagatatgcaaggaacagggaggggaagttgagcccaggtctgcatcttgcctcagcagctgaagcaggagctatagtttccttcttcacaaatccagtatggctggtaaagacaagattgcagcttcaaactcctcttcatcagacacgaccatactctggggtttatgatgcatttaggaccataatgagggaagaaggatttagtgcactttacagaggaattgttcctggtctatttctgcaggtctctcatggtgctattcagtttacagcatatgaggagctacgcaaagttattgttgattttaagagtaagggaagtaca

SEQ ID NO: 26124 - DNA, 519 bp, Glycine max
gcaatcacacacacacccaagcgaagaaggtaagttcccgttacagagatagaaaaaacagaacaaaacaaaagaaaaagaagaaaagaatgggttatgtttctatgaaagtggttctaatctccaccggggttttatccatggcaatgggtttgaaactcacactccctttgctctcgcatttcctcctcaaccaagcccctcacgtgtggaccttcctcctcacgtgcttcactcccccttacctctacatccttctcaacttcatcatcctcaccatcgtcgcttcctccaaactcaacaaccaccaccactctccgccggataccaccgtcctcctcccctccgaccccgtcatctacgccctaccacccgccgcagtccagatcctcgctccggaaaccgtcaacatctctgccgctgtacaaacggactacaacgccgtcgcctctgagaaatacctctacgaaacgaaaccgactctcagctacgacaccgttacggaaggtaacggctctg

SEQ ID NO: 26125 - DNA, 480 bp, Glycine max
gtttttgacgagagtgatgggtcaagacaatgctgaagcagccaacaatgtgagcaagtggacagggacagtttacctcttctctcttcttggagccttccttagtgactcttactggggaaggtacatgacctgtgccatcttccaggtcatatttgttattggtttggtttcattatcattgtcatctcacatatccctattgaagccgagtggttgtggtgataaagaattacaatgtggatcacactcatcatcccaaacggctttgttctatctttccatatacctagtagctttgggaaatggaggataccaacctaacatagccacatttggtagtgatcaatttgatgaaggggaccctaaggaacgactttcgaaagtagcattttttagctacttttatttggctttgaatcttggctcactcttctcaaacaccatattggattattttgaggataagggacaatggac

SEQ ID NO: 26126 - DNA, 544 bp, Glycine max
gaatgatcagtggtgtctcaactcctggacgaggaaactgacgtagcttgtatcgacctttgtgaattgatggagattccattttcttcacgacaaactttcacaaaccttattaaacatcactttctcccttcccttccttcccttgtttcccagctttgatttagagaaagagagcgaaagatgttgcagtgcatatttcttctgtcagattccggagaggtaatgctagagaaacagcttagtgggcaccgcgtagatcgctccatatgtgcctggttctgggaccaagccatttctcaacctgattccttcaagcaacaaccagttattgcttctcctacccattatctattccaagtttttcgcgagggaatcacctttttggcctgcactcaagtcgaaatgccgccattgatggccattgagttcctttgtagggtagctgatgttctcaacgattatcttggggggttgaatgaagacttgatcaaagacaactatatcattgtatatgagctgctggatgagatgatagacaatg

SEQ ID NO: 26127 - DNA, 415 bp, Glycine max
agcagaagaaacacctcgttccttgctgctgtttggaactggaaggaaaaattgtgaaatggaatttctacccattttgtcttccatttcccttttgttgtgtttggttttgtggcaaggaagtggtgaacctgttgaagataaggaggctttgcttgactttgtgaacaagttccctccttcaaggcctttgaattggaatgagagttcccccttgtgtgattcttggactggagtgacttgcaatgtagacaagtccaaagtaatagcaattaggttgccaggggttggatttcatggcagtattccacctgatactattagccgcctctcggcactgcaaactttgagccttagatccaatgtaataactggccattttccttctgattttttcaatctcaagaacttgtct

SEQ ID NO: 26128 - DNA, 411 bp, Glycine max
ccaattaacctcactctccttcttctcattctctctcactccctgtacggtgccattgctctttgcttatgctcgccatcgccattcaccaaacaacaatgctatcccaggtgtgggcataatctgagtgttgaaaatggcttagaataatgttttggtggcattgttggtgaaggactcagagtaagagttattgaagccgcagtgagtcagtgatctttcgctctagcctttgtcctcaaacactgaccgtggagtagtgaagaggcaagaaattgaaggggatgttgatgatgagaaaaagactagcatgctgcacaagggaaaggaaatttagcatcgatcatgatgagcaagagaggattatgacatataatggccttgagagttgcatgctgaacaaccagtctt

SEQ ID NO: 26129 - DNA, 254 bp, Glycine max
ctacaatcagcgccgatgatctcgacgcgtttctcgctgagattaccgcttcgtatgaatcgcagcaagatattatgctgatgcggtttgctgactacttcggtcgcgcgttctcgtcggtgagtgcagctcaattcccgtggctgaagacgttcaaagagtccaccgttgcgaagattgttgatatccctcttttgcatatatctgaggatatttacaaaatatcaacggattggatcagtcatcgatcatat

SEQ ID NO: 26130 - DNA, 212 bp, Glycine max
cttcaactataagaatgagaaccgattatggtatccaccacctgaaggattaacaccttggtgttgtcaacctgttgtacggactggtatttggagtgttgcttctgtcctgcttcacttgttaaatgaaatatctggacttgataaaactgcaaaattagatctgtataatcatttagaagccctagctgaagttctagtcgaggcatatt

SEQ ID NO: 26131 - DNA, 259 bp, Glycine max
aggacgacaacgaacccgacgatttcgacgacgacgaagctgaaaacggttacgacgacgaaaacaacatcgccgcgtatcctcggatcccgaagaagcgcaaggtagtcggcactgcagcggcaggaggttcttacgagttcgcgccacgtgtcaatttctcctacggaaactcccgcggttcgggttcgggcgaggagtggaacgagcacgagactttcgtactgttagaagtttggggagacaagttcctccagct

SEQ ID NO: 26132 - DNA, 390 bp, Glycine max
tcgagaatctccacaatgatggcttcaactgaccagtttagctttcacttttaatttaaaatcagaaagaattgtaggttcctatacaagaatatgaaattgttgtaaccaaaaccaacacaacttcaacaaaggttagggttcatgcatgcaaaaaatgatgaagccaccttcttcttcttccttcccctctcttctcagagtcaagcctcgtctctcttcttatctcttcaccctcttagctttcattctcttcgccgccatcctatatggccatgactttgtcttcatcttccgtccacgcctccactccaacgatcacaccacacaaacactcttctccacacccgtcgatgtgagatcttcaacatcatagaaagaaaataccga

SEQ ID NO: 26133 - DNA, 295 bp, Glycine max
cttcaatgttggtaagtatcgtcgccttaagcatggttctagtcagtctgctgatttctttcgagctgacaatcctgaaggtgtggaggcacgtaacgaggtagcaaagatggcatttgaagatatgatatcttggatgcaagaaggtggccaggttgggatatttgatgccacaaacagtagcaagcagcgaagaaacatgctgatgaaattggctgaaggtagatgcaagatcatttttctggaaacaatatgcaatgatgtagacataattgagaggaatattcgctttaaa

SEQ ID NO: 26134 - DNA, 257 bp, Glycine max
tgagaatgatacctttgttgtttgaatttgataatgagatgagattttataatttataatgagaatgatacctctgttgttgatgaatttgatggttttgaggttgattatttatacatactacatagtgtttatgaggtggaaagtgaatgggggcattggggtatttagatttgaggagttattgttgttcttcgccctcttgttctttggataaatgatgagtctgagtctggttctcgaatgtaatattataa

SEQ ID NO: 26135 - DNA, 256 bp, Glycine max
aaaccattgaagaactcatcaaaacagcacgtgccgaaaaagaccacctcgctcctttccccgactttcgacgtttccacgtaaacggtctctctgtgtgtttgaagtcaggacatggcaataaactttcctcacctgttaagcattatattcagagtctccttaagctaaacatggaaggaccatatggatctgagtggccagaggaagaaaaggtgaagcgcaaagaaatggttttgcccgaagcacattatgt

SEQ ID NO: 26136 - DNA, 494 bp, Glycine max
attataaatttggtggcaaaatcttcaaagttcatacatgcacttaattggttaaggttggatgaaagtgttcaacagtttgcagttctcatgatgtctcaagttgaccttgcaagggaagctgctcatttgagccgcttcatttacaatttccgtcgatcgagggatgtctctgttcctaagcctgtctatccacttgtgcatcctgcagttgtggtggaaacctatgaaaatggagaaagtgtatcacattatgtagatgaacttcaaggacatgaaaggattaaaagtgctcttgctcacattggtactaatgcacttttgaagatgcttctgttttgagggcaaaaatgagatttcagatatcctctgttagcagctctacagtgctgcaaaaccatgctttcttggctgcaaaaacaactgtgacaccggcaagtgaaaaatgcactgatatacatgcttgtggccgccgatgactgctccaccatgta

SEQ ID NO: 26137 - DNA, 332 bp, Glycine max
cttacatctgcaaattcctcctgactcctaagattcggcgagttgttttgttccacttgagagtgaggaatgaagaagctgatcttgcattcgcatctctcactgcttctcatttattgtcaggttttaggttccacaacaatagcttctccttccatctgtctttagcacaaatggctgcaatcttagctcggaaatcacttcttggctcttcgaacactccaactggctgtaagtggtcaagggctacacaacttccaaaactatggcctgccattaagtgcacagtcctactctaccaaaaaagaggatgaagcaagggagcaacttgc

SEQ ID NO: 26138 - DNA, 319 bp, Glycine max
ggaaactctaagtgagggaggagaggatgagactccactgcaggtgaaattgaatggagttgctacagttattggtaaaattggtttgactttttctgtgctgacatttgtggtgttgacaataaggtttgttgttgaaaaagcagttcgtggggactttgctagttggtcttcaaatgatgcattgaagctgctgggtctactttgctattgcggtaaccataatagttgttgcaattcctgaaggattgccatcagctgtgacacttagtcttgcttttgcgatgaaaaagttaatgaaggataaagcacttgtgag

SEQ ID NO: 26139 - DNA, 284 bp, Glycine max
cggatcacataaattcttgcaaaccagtgagccgtttagacccttcttacacggagacattaaacttcttgcagaaattaaaagcatgccatgcctgaactcgtttgtttcagcggaagatatgtaaatacctctagaagagctagataggtgtttggattggcagttatatgtcaaaggcatgggaagtccatagatcatgtgagttcgacttgatacagcaactaaaaccttgtcttattaggtgaaatcaactacatggatagaagttttaaatttttaat

SEQ ID NO: 26140 - DNA, 252 bp, Glycine max
ctctatttctctgaatggctcctcttgttctctctccagcttccttgtcagggcttcgaggatgaggatggcgctggagaatacagactatgctgctggcatggtcgcggcgcagagcacttgggatccctggcccactacaacacaggatacacctcagccagcccagaatgctccttcctcacctatgatgagcccacaccggcataggatgactaaagacaaggctttatttatttatattctgctttt

SEQ ID NO: 26141 - DNA, 226 bp, Glycine max
ttttcctctaatctcccaagttcttgtagcaaatgatttgtcaaaatatagtgagggaatattttaagagcctgaagtgctttatacaaatgccgaatcctagatttctaccagttcttcatatagtctcagaacatgtatgacagtagtgtaactcacaaaattctctcggaaatatagaagctttttggattactttcaaaaaaaaaaaaaagggggggccgcc

SEQ ID NO: 26142 - DNA, 336 bp, Glycine max
caaggctggtatccctcgccttccctctaatgctaaaaacaggatggttgccattcctttggaagaactgccaagcaagctcagggggcaggtcaagaatgttaagaaattggaagctgaaatagtcgctttgaagatttcatatctcaagaaaatcaacaaaggcaccaatgttgtgatcttggactcgtactcggacgtagcaaaaacagttggaagaacgctaaccagccttggctttaagaacacatggattgttgctgatggattctctgggaacaaagggtggttgcagagtagattaggaacagattcgtataacttctcgtttgcaga

SEQ ID NO: 26143 - DNA, 1030 bp, Glycine max
accagccctttcctccaaacccaaatgctgatggcaattctctcattccatggctcaaaaacctttcatcaggatcatcatcggcatcctcttccaagcttccgcagctgtacattccgaatggctccatcagtgctccagtcactcctccaatcagctctccatcatcccgaaagccccagatcagagctgattgggaggatcagtccaattgtccgacagcgtggggcggaccggcatacacctttgtgccctcttcaactcctccaagccccggccgccaggttgccgaaacagattggttttccaagatcaggattcctcagggaggactagcaccaacttctccaaccttcagcctggtctcttccaacccatttggcctcaaggaagatgctatggttggcagcggttcccggatgtggacgacaccaggggcaagtggaacatgttctccagccgtagctgcaggctccgaaaacacttctgacattccaatggctgaagcagtttcagatgaatttgcctttggaagcagctcatcaggtttagtgaatgcctggaaaggagagaggatccatgaagcttcttttggaacagatgatcttgagctcactcttgggagctccaagaccaggttgctccataagtgaatagtcaatggtcccttcaacaacatgaactttgactctgtttattctgtagaaaggctagaggagggaattaagatgagcagcaagtagttgttcttattacataccagaaaaaaaaaatagcagtttattttattcttttattttctcttagtttttattggttcctaagttatatatacagctttagctaggtgtcgggtggttttcaaccctttcatttggtcaatgttgttaaaacctttattactctgggaaagatcatcatatacctgtatggattggcttggtttgatattgaaaggaaaaaattactcgatttcaactgtaactgaatgatcaagaaagttatgcaaattccaactgaatgggcctac

SEQ ID NO: 26144 - DNA, 666 bp, Glycine max
gtaaagtagaagaaaatctctccattcttcaaaagtgataattccattgttatccttatcaacatgctccacaaagtgagcaagctcctcatcattcatttcaataccagctttaagaagagcttcgtagagctcttcaggaagaatggtgccgtcgtgttcaacatcaatggattggaagatgcggtaaagctccaactccttgtcgtccatgtagcggcgaaactcgtggtactcgactctgccgtcgctgttggcgtcgcaaacctcgcagagttccctcgcgtacttgtactccggcggaatctgcagcgccgacagcccagccctctatctgggcgtagtccaagtaaccgttgttcgcggcgtcgaagaagttgaacaggctccgaatacgaacctccctctcctccttcgtctcccccagcgccacaagcacgtgatccatcgaaacgacgccggtcccgctcatgcgaccattgcaatttcagatctgacgaaacgcggtgtcgtaaacgcggagagagggaaattagtcagaagctggtttggttggagttggaacagtggagaactgtggagatcgagaaacgacagatggatggaactggaagttgttgtaccagtaattgtgatttgtgacggtttttcgggtttttgcttcgg

SEQ ID NO: 26145 - DNA, 301 bp, Glycine max
tagccccgcctctatctgagcgtagtccaagtaaccgttgttggcggcgtcgaagaagttgaacaggctccgaatacgaacctccctctcctccttcgtctcccccagcgccaccagcacgtgatccatttcaatttcagatctgacgaaacgcggtgtcgtatatgcggagagagactagtcagaagctggtttggttggagttggagttggaacagtggagaactggagatcgagaaacgacagatggatgaaacttgaagttgctgaaccagtaattgtgatttgtgacggtttttcg

SEQ ID NO: 26146 - DNA, 834 bp, Glycine max
caacagtggtgtaaatttttacaatttacaaacccccaccaacagtattttggcagaatctccgccaagtatcccaaattttcccccaatctcttcagacattcatccactgtccctctatagaaccattcataatccgaatcccaaaaccaaaacctagggttcccaattcacaaaatccacaatgaaagcctctttgaagttccgagaagaacacaagaaacccctcttccgtgcaaaagtcccactgagcatcctcggcaagcccttccaatccggcatagtcgctggcgaatccaaagaactcacactcaacctttctaccttcttcgaatcgggtccttctctcaaagttgcgtatcgacccaacgactcaaagaaccctttttccttcatagtgaaaacgggaaccggacccttcggttcccctctcaagagctccatgctcatgagctgcgagtttaaccttcccggtacaaccggtaccccgttgtttatgcttcacttcaaaccccgcttcggcgactttactttcaagaagacgcagtcttcgatttttgatgggaaagggtttgggtcttttaacacgcaaaacgacgccgttgagaatgggaataatgctgaaacgccgttgatggaatcggccaaggtttcgattcttgactccggcgcctcgatgttctccggcatggaggtggctgcgcggacgactctgccggtgcggggacgtgctgccgtgaagttccggtggggagttaggattccggcggagttcaaggggaacaacgcgtttcagaagattccgtttctcgtaatggataagatcggcgtgga

SEQ ID NO: 26147 - DNA, 353 bp, Glycine max
  unsure (1)..(353): unsure at all n locations
agnccctacactcgacagtctcttcttctcttctctgcagcttctctcccctcaacagtgagtaattttggcagaatctccgccaagtatcccaaaatttcctccaatctcttcagagttctgcagacattcatccactttccctctataaaaccattcacaatcccaatccaacttgcaaaaccaaaacctagggttcccaaatcctaattgcactaaaacccagaatgaaagcctctttgaagttccgcgaggaacagcaaaaacccctcttgagagcaaaagtcccactcggcatcctcggcatgcccttccaatccggcatagtcgctggcgaatccaaagaactcact

SEQ ID NO: 26148 - DNA, 407 bp, Glycine max
gcgcattccaacgaaaacgacgacgttgcaagcatccctctctgctgggacgcgcttcaattagaagaaaacaacaacaacaacaacacctacgaggatttcgagtgggaggaagtgatggacgagagagacgttatcagcatgctagatgacaccgtttccgtttccctcggaattgaggaggaaacagaagcagcagcagcagaagaagatgcagaatctgaagtcagcattttggagtggcaagttttattgaactccaccaatttggaaggaccgaattcggagccttatttcggagatagcgaggatttcgtttacaccgcggagtacgaaatgatgttcgggcaattcaacgacaatgcatttaatgggaaacctccggcctccgcctccatcgtgaggag

SEQ ID NO: 26149 - DNA, 174 bp, Glycine max
ttcggctcgaggctgcttatagaagggaaaatattttaggttatggagttgtattatactagcttttcccttggtcgtatatataagttatagatgtgtggaacacattacagataaataaattttgtagtatatgggcatatattaaacaaagaactaccccagctttaggtt

SEQ ID NO: 26150 - DNA, 180 bp, Glycine max
attgattcaatggcttactcccactctcgtatcatgattctgttgtttctgctctccttgggcacagcatcagaagaaaagaagacaacatacatagtgcaagtccagcaagaagccaagccttccattttcccaacgcacaggcactggtaccagtcttcccttgcccttgccgacagc

SEQ ID NO: 26151 - DNA, 486 bp, Glycine max
tgcggcgaatccgctgtgcgcgactcttactctgaattccattaatcaaactattgggtggttggattgggctaaagccgcaattgttcctggcttggcgtcgttggtgttggtgccgttgattttgtatgttatatatccgccgacattgaagagtagtcctgatgctcctaagcttgcgaaggagaagttggagaagatggggcccatgacgaccaatgagaagatcatgactgccactctgtttctcacggtgggactttgggtatttggagggcttcttaacgttgatgctgtatctgctgcaattcttggattatctgtacttcttgtcactggggttgtaacatggaaggagtgcttagctgaaggagttgcctgggataccctcacatggtttgctgctctcatagcaatggctgggtatttgaacaaatatggtctcatttcttggttcagtcaaactgtagtcaagtttgtcggtgg

SEQ ID NO: 26152 - DNA, 258 bp, Glycine max
gcaaagtgttttcaagaattgattttaaaagatcaaaaccatcctgcagccttggtcaattatgctgctcttcttttgtgtaaatatgcttcggttgtagcaggtcctggtgcaagtgctgctgaaggtgccatgactgatcagatcatgtctgctaatgttgctaaggaatgtttgctggctgcagttaaagcagatagcaaatcagcccatgtctgggccaaatcttgcctgtgcattttctattagtggtgatca

SEQ ID NO: 26153 - DNA, 699 bp, Glycine max
  unsure (1)..(699): unsure at all n locations
catggaacgtggacaagaaagaaaacgacaaagtggaaaaagaagtaaacgtcaactttaaagtaactatagtggctgagtgatagcatcaaaatctaggtatttacaccgcacaatattatgagattgcagtagcagtgtttgctttgctcaagtctcagcgatatgatggcagacccagcaagtttcatagcaagctggttaactccttcttacctcttcatcttggtcaacctcgtcataggcaccatagccatcacttctcgcttcagttccacgcccaaaaaccaacaagcccaccacccccaaccactcagctccttcaatacccatcatcaccaacccaactgcactcagccccaactccttccaataccctcactgttgcagcgagtcacgtccttcaacctctccctccacaaacaccaacccacacctccagaaacacaacatctgcatcccgaaccccaaccccaacctgaaaagccgccggaactgcttcggactccctcactcttggagcgactcaggtccttccataatctttctctccacaaacatgtccaacccgagccagagccagagccagaacctgaacctgaaaagccggaactggttcggagtccctcgctcttgcagcggattcagtccatanacttctcccatctctacagatccgacttcagtcaccgagatgat

SEQ ID NO: 26154 - DNA, 449 bp, Glycine max
caaaaactcacccccaccacctccaaggtcacctctactgggtaatctgcatcaacttcgtttgttcccacaccgcacactccctactttggctcaaaactatggccctctaatgctacttcattttggtaaggtaccagtgcttgtggtctcatctgctgatgcagcgtgcgaggtgatgaaaactcatgacctgatcttctcagacaggccacaacgtaagatgaacgacatcctcatgtacggttccaaagaccttgcaagttccacgtacggagaatactggaggcaaatgaggagtctaactgtgtcacagcttctgaacaccaaaagggttcaatcctttcgcggttcgagagaggaggaaattgctagaatgatggaagacattaaacggtgttgtagtgattcgttgcatgtgaatttgactgatatgtttgctgcactta

SEQ ID NO: 26155 - DNA, 421 bp, Glycine max
atcttcattcaacatcaatttcaagcattctctgattttatatttttattatcaagtggctctttttctagattctgattcccttcaaaatgcttctggatttatccttagacttggtattgtggtaaaacctttcacttctgttatcattttctctcttctgccttatcttcctcagtttccactcatcaagtttcaatcttcctttgatataagcccaaatttgattgtatgaaccagcagctttttgctggtgcaaaatcgaatcgttgaactgggaaagtataaccctgtgttatcctacaccttgcactccaaactccaacaccaattggttggtgatggaggataataatagcaggagcacaaaatggacctctgtagagaacaagctgtttgaaaatgctcttgcagtgcatga

SEQ ID NO: 26156 - DNA, 694 bp, Glycine max
ctcctcaactcaacaacaaaacttccaactaagttccttccacgctggtagagtttccaacaccacaccagccacagaaataagtttgtggaaaataagaaaacaacattttactgttgttaccgttctacctaagaagaacaatctcaaactaatacacaacacaaaaagagttacttaagaagcatagtgtggaattattgacttaagaaatttgaaaaccactttgtcccatcccacttggacttccacctcacccctttttctcaacgccatgaaaatagatatcagcaattgatcaaaggtcattttgtttttgtggctctgagaggggagtgattctaaactaaaatatatgggggctggggaagagagtacagctaaatcttctaaagtatcttcggcagctcaggagacaccaacagcacttgcatatcctgactggtcaagctccatgcaggcctattatgctcctggaggcactccacctcccttttttgcctcaactgttgcttccccaactccccatccctatttatggggaagccagcatcctttgatgccgccatatgggactccagtcccatatccagctatatatcctcctgggagtatctatgctcatcctagcatggcagtgaatccaagtattgtccagcaaagtacagagattgaagggaagggagctgatgga

SEQ ID NO: 26157 - DNA, 640 bp, Glycine max
gttatattttgcaattggtgattggtctcctttaggggctgttgctagcagaagatatgcacttcttaacagggttcctttactgcctcatgaagaacttctatgcaaagaagcaatgcttcttcgtacatgcttggaacttgaagattctgattttccttcctctgacttgttttctcataatagcattaagatttcatttgttaacttgatgcgtttccaacattgtgctcgatggttccttacgaaatcaagggcgggtataagtgtttcttttcattcccatggcacgattctctgtagcctctgcaaacgtgactgttacatagcttatgttggctgcaactgtcacaagcatcatgtatgcctacgtcatgatgctgattctcttgacttcaactgtgggagcaaacacacactttatttgagggaggatattatggatatggaagctgcagccaagatgtttgagcaggaagatgggatattggatgagataaggaagcaaactaaaagtgaccagaacatgtatgcatatcctttgtcaaatatgtttcagggagccgaggcaaatggatacacgccttattgtgagctaaaacttgattctgttgctgaattttatgcaactccagagcac

SEQ ID NO: 26158 - DNA, 541 bp, Glycine max
ccaaattccaaatgtggtcgcttgcagttactctctagttatagcttcccttccaaattccatttgattccgtcggagagcttgcgatggacgcttcttccttcaagattatattgggctcatcctccgtcgcgcgccgcaagatattatccgaaatgggatacctattcacgataatgactgcagatattgatgaaaagagcatccgaaaggaaactccagaagacttagttatggctctcgccggagccaaggccaatgccttcatatctaaacttcagaccaccactaatcaacagagggttgatgaacccactattttaattgcagctgacccagtggtggtgtacgaaggtgtgattagggaaaaaccaacaagcaaagaagaagctcgacaattcttgaaagattattctggaaggcatgctgcaactgtgggatctgtactagttcactaacctcaaaacaggattgagaaaaggagattcggatcgtgtggagatatatttcaatgaaataccggatgagatcattgagaaac

SEQ ID NO: 26159 - DNA, 661 bp, Glycine max
acgagcacaaatgggaagctacttgatacaatcaagcacagggtcgcttccgtcgagccacgcttccaatacggcggcgttttggatggtggccgttcacggcaaccaagccatgagtggtggtggtggcagcgatggtagcagcgataatcccatttgggcaattccctctgttgggaatagcggtgtgtatagaggagctatgtctgccccaggtggcattcatttcatgaattttgcttctccgatgaaccttatccccggagctcaactaggttccgccatggttgggggcggaagtggtggcggcaacagtggttctcaacttctaagtgaaagtaacttaggcatgcttgcagcccttaatgcctacaggcagattccggctaacggcgtctcggagtctccggccagcgccgggcaacctcacggcggagacgatggacgtgattcctccggtcaacattcctgagggtaaaaataatcacaagtgtatgatctgatgctagcttcttaatttttcttttaattactagtatattattactagtgctactattactactattagttctacaactaattagtggtttctataatatatatatatatatatatatatatatatatatatatatatatatatatatatatatatata

SEQ ID NO: 26160 - DNA, 703 bp, Glycine max
tcgatcacacatgggaagctatttgatacgatcaagcacagggtcgcttccggcgagccacgcttccaatacggtggcgttttggatggtggcgggtcacggcaaccaagccatgagtggtggtggcagcggcggcggtggcaacaatggtagcagcgataataatcccatttgggcaattccctctgttgggaatagtggcgtgcatagaggagctatgtctgctccagggggcattcatttcatgaatttcgcttctccgatgaaccttatgcccggaggtcaactaggttccggtatcgttggtgacggtgacgccggtggtggcaacggcggtgctcaacttctaagtgaaagtaacttaggcatgcttgcagcccttaatgcctacaggcagattccggcgaacggcgtctcggagcctccgggcagtgccgggcaacatcacggcggagacgatggacgtgattccaccagtcaacattcctgagggtcaaaataatcacaagtgtatgatctgatgctagcttcttaatttttcttttaattactatattattcctagtgctattattactactattagctctactactaattagtgatttgcataatatatattaaatacgtaattatatatgttatgtccatttgcaaaaatatgcaagaagcgcaagtttgattgctttggtatattgagttc

SEQ ID NO: 26161 - DNA, 457 bp, Glycine max
attataatgaaataaaaatattgaagaaagatttcaacttgggttgcttgagcttttaatttgcttgcgtgacaaaaaggggttggtccctcttgttgcctagtcccaccctttaatttcgggaggttattctttcattcttttagtttcagtttcagactttcagatccaaaggccaaatcttagggtcatgattttggtgttggtgagtcttggatatgtcatgtgatagtccaaccaaaccaaacaacaaacaaaagaacagcacccttctgactcaaaggtagcaacttgagacagtttctcaggtttgaacatcaaagagcacacaagggtccaattggattcctaagcagagagatggggttccaagaaaacgggaatggggaaatggggttgtctggaatccccttgggagtaaagaacaagtacaagaggatgaactctgagcttcctg

SEQ ID NO: 26162 - DNA, 890 bp, Glycine max
gtaattgtgcattcaagaggaagcatcaagcatatcattttacaacacaaaaaacagacaaaacaaaacccccaaaccccaaactcatcattcatcataattgtttgttgctcgaaagaacaatgctccacatcacctgcattcttttaatgtgccttctaagttccttctcacccccaatcaacgctcttctcaacctcactttaccccaccaacaccctcaccccgaatccgtcgtccacgatctccaacggaaggtgaatgcctcactatggagaagggaaatgctgtcaaaggaggaccaacaagaaggcatgtcgtcgtcgtcgtgtctgaccggaaaccccatcgacgactgctggcggtgcgatccgaactgggcggcggaccggcagaagctggcggagtgcggcctagggttcggcaaatacgcgatgggcggcaaaggcgggcagatctacatcgtgacggactcctccgaccgcgacccggccaaccccgttcccggcaccctccgccacgccgtcatccaggacgagcctctctggatcgtcttcgccgccgacatgaccataaacctaaaacacgagctcatcttcaacagctacaaaaccctggacggccgcggcgccaacgtccacgtcaccggccacggctgcatcacgctccagtacgtctcgaacatcatcatccacaacatccacgtccaccactgcactccctccgggaacaccaacatacgggccagtccaacgcacgtagggtggaggggcaaatcggacggtgacgggatttcgatcttcggctcacggaagatctggatcgaccattgctcgctgtcgtactgcacggacggattgatcgatgctattatgggatccactggatta

SEQ ID NO: 26163 - DNA, 478 bp, Glycine max
gcgaggccaattataccagtttagcacccggcatctcttctcgtctgttttgaaaatctcgttcattcaacgcttaatttgggtattggatcggaaccctgacaattctaggtatgaagccaaggttctctctcttttactttttcttgtttttttcaagcgaattgcattttcgacagatctgggcttcgctttctctttcgaaatttaaccgacaaccttgggatttttttaaaccctaattttacccccaattgaacttcttattctattctgcaccgactgtatggctaattttgctcgctctattcatcccaactgttaaagaacatagccttcgtttttgtgtgatagaaaatttgttatctgtgctgatgattcaactttcaagtgttgtttctgctttgagtgtaaattaaaaaaagttcacatattatttataggaatgcatacttgtgttgagggaagtaaacgtcag

SEQ ID NO: 26164 - DNA, 279 bp, Glycine max
caagaccttcatcctggcaaaacaatgaatgtacaattcagcaaaagtccctttacacaaccttttacaatattgacatggttaaagggcttgaaaattaaagacattgataaagaaggatatacttttgatgagctatgcatcaagacaaaacctaatggagcagagcacaagttttgtgcaaaatccttggaaacattaatcggttttgcaatttcaaagctgggaaagaacattcaagtactttcaagttcctttgtgaataagcaagagctatac

SEQ ID NO: 26165 - DNA, 280 bp, Glycine max
ctttttcagttctctctctctgccttgtttcagttctttctttggtcactgctctctaacctagttccacattttcactcaccaagtctcatctttaagctcatatttctcttcattcacatcacttctctgatctgtctcttcacactctttgaccccgatcaaaattttgacccttttttctctctctgttaatgctttgcatcaagccattcacagaaaaacccctgtttccatctgggtctaccctctttctggatttttgttatctgattttgta

SEQ ID NO: 26166 - DNA, 401 bp, Glycine max
cttctccaactgtgcttctcattttatcaggaagcatagacatcatgagagcttagtctctgctagctgcgaaggggtcatctctattctatgaggcaaaccaggaattgtaaacttgtgctcgagccgctcgagccggtttgaagcaattcgattgcattgagacaacctggcttcgatcggtgctgttttgggacaacatagacattgcaaccccagttgagattttgcttgaaagacaacctcagtcttttaagtacttgaaaagaaaatctgactatgtgaagaagccaatttccaaggagggttgggaggggatttggaccaagatgattgaattggagaaggcaataatgtacttcaatccttatggtggaagaatggctgagattccatcaaca

SEQ ID NO: 26167 - DNA, 428 bp, Glycine max
gctaatttggaaggcctcaacgtacggggttatcagtttgctgacaagatcaaggagagattgaagttaattgttgcagggggtgatggaacagcaggctggctacttggagttgtttgtgatctcaaattatctcatccgccacccattgccacggttccgttgggcacagggaataatctaccgtttgcatttggttgggggaagaagaacccagggacggatgaacaggcggtcaagtcagttctagatcaagtaatgaaagctaaggaaatgaaaatagacaactggcacattcttatgcggatgagagctccaaaacatggtccatgtgatccaattcctcctcttgagttaccacattctttgcatgccttccatcatatatctgaggcagatgaacttaatgtggggctgttgttgttcct

SEQ ID NO: 26168 - DNA, 447 bp, Glycine max
caaaggcaaactaaaagtatgttgttgtgtttgcacccatgtcactgcaaattccttgcaagtcagaagcgattatagagggtcagaatctgcagtgttaattttcatctcagttgcattcattcttaactggaattataatgaaagaggttcttcactacactacatggtagtagttgttgtggttctccgtcacatgtcatcattggacatgttcatacatttcttcgtctttgtgaatggagttgcatgtgttactcgatcggtggtcttcctcgtgtttatttttcctctattttttttctctctctctttctctttgctagcattgtaatctttgttacatttgttcactccaatttaagtgtatatgaatgtgtacaagttcaggtgacccactcttgcaagtgattcttgttatttattttggtaatatatgtcccataa

SEQ ID NO: 26169 - DNA, 930 bp, Glycine max
ccttacttgatttcgctactttcgtaacaacagtgtgggttatatatatgattcgttttaagctcaaggctagctacatggaggagaaggataactttgcaatatactatgtggtggcaccatgtgctatgttagccttatctcattcatccatcaacttctcatcatttattaaacaggatttcctgggcattctgtgtatatctagaagctgtctcagtcctgccccaactgcgggtcatgcagaacaccaagattgttgagccattcacagctcactacgtatttgcactgggtgttgcaagattcttgagctgtgctcattgggttcttcaggtgttagatagccgtgggcatttgttggtggccttggggtatggtttatggccatcaatggttcttatctcggaaattgtccagaccttcatcttagcagatttctgttactattatgtcaaaagtgtcttcgggggacaacttgttctacgtcttccctctggagtggtgtgattgaagatctgctttggtgtgtactgtcacatttgattttaacttaatcaggctttatggttggttacccttgttcgagtacattttgtgttgacacacttgtttggttccttggtggaatgtaaagttggggatgaaagaaactaaagatatttatgtttacggtactgttatatatggttggaagtgctttacacgtaaagtctctatttgcttggactcttggaatttagttattgttatataactattccttgtgctcaagttctacagtaagtcttggattgaaccctgcctacgtaaaaatgcgtggactgtgcgcggttttgatctattccatgcagttggaatactgcgagttttatgtatggtgcattgcacaaagcaaatctgaattgttgagtccagagatgttatctt

SEQ ID NO: 26170 - DNA, 648 bp, Glycine max
caattctcccactccttccctaagctgccgaatcagcacttcgtcatcgattccaatacggcgccgttttccttcgccatcaagcgcaacgcataacaatcgtcagcgccaccatttcccttcggttcccaagaatcaatggcgactcgtgcgttgctcggagcaatcaagaaacgcaccgtttcgttccccgcattccgcggccattccatttatcgacacggtagcacgcttgtggtggcggaacacgaaggtggttttatcaaacccccttctctctcagcactggctgctgccacgtgtcttcccgatcctgactcttccgtttctgtgctcttggccggttcgggtccttctcttcatcaagctgcttcacatgctgcttcgtgccacccttcaatctccaaggtgcttgtggcagattcagataaattcaagaaccctctggcagagccctgggctaaattagtccatttggttcaccagagtggcggttactctcatataattgctgctgcaagttcttttgggaaaaatgtcgtgccacgtgcggctgcccttttagatgtttctccaattactgacgttactggaatttctgattccaatacttttgtgaggccaatatatgctggaaatgcactctgt

SEQ ID NO: 26171 - DNA, 288 bp, Glycine max
gagatcgaagagtttttcgcgatggcggaaaagtacgagcgaaaacggttcacagagaagtacaactttgatattgttagagatttgccgttggagggtcgctaccagtgggttcgtttacattgaatgccttcaatgaaagagagagagagagagagagagtttgcattttttagttttagagagagaaatggaggttgatgagagggtgagtttgtagtgtatgtttagtcatttgagtacactggtaaggaagctaacctgacacgaggtaaaacgaaaacgagc

SEQ ID NO: 26172 - DNA, 284 bp, Glycine max
gaaacctatcttctggatacatacacaggcacatagaattcgtgttacttctctcttgttctgctggcttccctcagatacttacaacagcaacttgcataaaagaaattctggagggattttccaaacagaaaaataatcaataaatctatcaacaagtatctggtttctgttactctgctggagcggttacccctgtcatagaggttcaaatgggaagatgctccttccagagaggaaaagtgaggattgaaggggaagagtgaatggaggttggggaaatg

SEQ ID NO: 26173 - DNA, 533 bp, Glycine max
gtttctcacccaacacctgtaattttctcttcctccattgattttgctcataaaaatctgattttttttttatctggggtttgaatattttttacttgatctgttggaacatagagggggtgattttgtaaaatcccggattctctgaggagaaaatattagtgggttttggttggatcgagggaaagactcgaactttgcagattgcaaaacgagggtctttgggggggagaaaatgtggatcttgtaaaaggtgttgttgatttgatcgagaaagaaaaagagaaacatttttttcagcttcaggtgattcaactttttcctctggcattggagaaggtttagaagaagcttaaaagatacataatacgcattggtaaccagtcatcaaagcggaatatgaaggtttcttgtgacggtgcataggttgataaagttctggtggatctgagtggattggttgtcattttcaaatattttcagtaaaggaacatcgttgaaagtggaaggggtttttcattacttgaagtttg

SEQ ID NO: 26174 - DNA, 271 bp, Glycine max
cttttagcttctatcattcatcatcagcatcttcttattattcttctgcttctcacacagatcttcacttcacctttgagtttctcacccaacacctatacataatacgcattggtaaccagtcatcaaagcggaatatgaaggtttcttgtgacggtgcataggttgataaagttctggtggatctgagtggattggttgtcattttcaaatattttcagtaaaggaacatcgttgaaagtggaaggggtttttcattacttgaagtttg

SEQ ID NO: 26175 - DNA, 448 bp, Glycine max
gcaagagcagaataaccccacaaaggtagaggaatccggtgtagaaactcatacaactgaagcattggaaaatgaagataactccaaggtagaggactccaatgcgcggagtacgacacaaaaaactgaagattcttcttctaactcagatgcctcggaagagaaggctgagacacatgacagcaatgcaacgaacggtgaagacaagaacaaggacacctcgactaattctgctcaggacgaaaacaccagcaacaattatgtccaagaaggaaatgttgcgtcatccaacaatgacaataaagatgctagccaagatgttcaactcacttcctctgatacttcctcagaacaaaagaaatatgaatccttgaatctagaaagtaacactgactctgctcagaatgacaatgtaaactctgatcaaagcaacaaaaacagtgatgga

SEQ ID NO: 26176 - DNA, 441 bp, Glycine max
gctttctaccatgaaggctttggataacctcggattggatgtacagcaggctgttattagctgttttaatggctttgctttagatgtgttcaaagctgagcaatgcagagaaggccaggatgtcctccctgagcaaattaaagcggtgctctcggattctgctggcttccatggtatgatgtgattggaatgcttgataaatgcttccccctgatagaggagccaaccgtagttgctgtagcttgcagtttgtaaatgcattgcttcttcttctcctttgaactgtttaggcccagatcaaataggttagttaaatctgtagttttaggagttagctttgatattttgttcaattctgcttctgacgaaagcgaacttatgctgttgtatttattcttaacagatgtaataaatcgttttatttcaaaaacgtatcttttt

SEQ ID NO: 26177 - DNA, 581 bp, Glycine max
aaaccctttcaacagttacaaatgtatgcaactccacaaaggctctctttttgcatgagacatcctctctcttaaaacctccctccttcagtcaaagctcccccaatcatactattcccatttcaccactcacacttttttcctctcgctcttataataacttcctcatatatacacttactctccttcaatagggtaacttttgaatttggtgccccccccaatctttttttttctctattttgttttggagtttggaacatatatagtattgaagcctaaaagattttgaagaaaaaagcgatgagaaactctgaagcaccaacacatggtggcatggagatagaagcaacaacggccttcagctgggaatggttcaacaataaccctaccagggttgagtcctctgagtgagaccctttggagggaaaaggccaacactgcagagatcattggtgatgtctcagcaaggctcacatggaaggatctgactgtgatggtaactctcagcaacggtgagacacagaatgttttggagggtctaactggttatgctgaaccaggaaccttcactgctctca

SEQ ID NO: 26178 - DNA, 296 bp, Glycine max
ctctgccatgggcctcattgatagggtactgcgaatgggagtgcttctaactgaggtttatatagatacagttggagatgcagggaaatatgaaatgaagctctctaatagttttccatctatcaaatttgtggttgcaaagaaggctgatagcctttaccccgttgtcagtggtgcaagcatagttgcaaaggtcacaagggaccgtgctttaagagaatgggtgcttgatgagactgctgaaaacatgcagaggaattttggatccggatatcctggagatccccaaaccaagt

SEQ ID NO: 26179 - DNA, 285 bp, Glycine max
cgcttagcaaagaattaaatggtcaaagattgtcaagagacgaggcagaagcaataatgcaacaattgatgactttggttcagtttacagctgaattgtaccatgaattacatgctttggatagatttgaacaagatattcagcgcaagggtgaggaggaggagggggatcaaagaggtgatggccttgcattcttgagggcagaaattaaaagtcaaaagaagcaaatcaggcatttaaagaaaaaatcactctggtctagaagtttggaggaggttatggaga

SEQ ID NO: 26180 - DNA, 293 bp, Glycine max
tttgctttcaaatacaaacctaagaggatactactctcagattggatcaccatccatggcacaactgtccaatggaacttcaagtaccactttgatctcaaagagtggcactacttcaatcccacatcgagcaacgtttgcccaacccatttgatcttaccgatgatcagatccttgacattgtttatctggctcacctcaatgatgatgaaacttgcgacaccgataaactttacaaccttgtctccaacattgtcctgcggagtcaatccccgatttccgcagccagtttc

SEQ ID NO: 26181 - DNA, 293 bp, Glycine max
cagatgtggcgcaccactttagacagcagcaccatgagagccctgcgccttcgttccttcctcttctcttcatcttcttcctcttcctcttcttgttgttcactcatcaacattttctgcccatcctcctcctcctcttcgtttacgactttgactacaatcatctctcactcttttcttccttttcccccaacgacgcgcgtcttgttcaccgactcgcgccgcttcggctcccctgttccgcgctgcgtttcgtccctccccaccctcgactggaacgacgccgtttcctg

SEQ ID NO: 26182 - DNA, 551 bp, Glycine max
ctctgatcattcatcaatccaaaaacacaatcaaatttccccacttgccattcttttccggtccttcacttctattctcttctctctccctcaaattcgcatctcattctgaatctcgcgccgtttcgctctcccactcgccagtgatttgattttgattttgattatatgcgagagtgttgcggaattttcgagaagtttgaatgttcgttcatgcatgagtggttctgaaagtttccttgggaattttcgattgcgatattgacactgtgatggcctcagccgtcgtgaatttcttgaacgcgacgttggattggatgacgttcgcgtcggatggtccttctgcgcgagctgtagttttcggagtccatatcggtggacatttgtttatcgaagtgtttttgctagttgtcatacttttcttgctttcacagaaaagctacaagcctcctaaaaggcctttaacaaataaggaaattgatgagttatgtgacgaatgggttccagaaccccttattccttctgttaataaagagttgcagtatgaacca

SEQ ID NO: 26183 - DNA, 396 bp, Glycine max
ccctcgcgttcgctcattctgaatcttgcgccgtttccctctcccactcgccagtgaggtgatttgatttgatttgtgagtgctgcggatttttttttttccatttccagcacaatcgattcgtcggtacaacttgtcgtttagcacgttcatgttcatgtttgattcgtgtgttgcattggtttgatagtgttgcggaattttttagaagtgtgaatgttcgttcatgcatgagcggctcttaaagttgccttgcggattcgattgcgatatattgagactgcgatggcctcagccgtcgtgaatttcttgaacgcgacgttggattgggtgacgtttgcgtcggatggtccttctgcgcgagctgtagttttcggagtccatatcggtggacat

SEQ ID NO: 26184 - DNA, 989 bp, Glycine max
ctcttccagctggaactcttcagtgggatttctttggtctctttcaccccattgaccatcaattttcttttcaagatgggaagggtatgcatcaagatatagggaatgctgatgacatacaaagactaagggaggaggagggaattcctgagttggaagacgacgaagagaaggcttcatctcatggaagggaacactctagggactctgaagacgaatttgatgaagagcctgccgcagaaactctagtccaaagatttgaaaatctaaatagatctaacagtcatgttcaagccaattttgaacctgccacaactaagcctctcagagggcattcagcttctgaagttgaattagtgaatggagaaaaggggaactctgcttatttatctccattaaagacagcacctatgccagctttgcctccacctgaaacaaataaaccaatggagaaggaaagtcgtaatgaaaataaagtcacccctaagaatttcttttcaagcgtgagagatattgaattgctctttattaaagcttcagaatctggccaagaggttccaaagatgcttgaagcaaacaaagttcactttcgtccaatattccaaggaaaagaaaatggttctgtggtgtcctcgtttttgaaggtatgtttctcatgtggggaagacccaagccaagttccagaagaacctgctcaaaactcggttaagtacttaacttggcataggacggcatcatctcgatcctcctcatccagaaaccctttaggagcaaactcaattgacaatgctcgaggaccatgcaaataatctctttgataattcttgtatgatctccggaagtcatgcatcaaccttggataggctatatgcttgggaaaggaaactctatgatgaagtgaaggctagtgagatagtcagaaaggaatatgacatgaagtgtaaattcttaaggcaactggaatcaaaaggagaaaagacctctacagt

SEQ ID NO: 26185 - DNA, 411 bp, Glycine max
cgaactgagcgagatcatcaagttgccgaggctggaaacaacgagttacgagctggggaacgagtttgtgttcatggactcgcaggacgcgtggatgtatcagccaccgataccgtggttgcatactacctacgacggttctgatgcagatgagtttgtagtgccagcgagtggggttgtgactagttttgagagttttctgtgggactactgagatttcttttcttttcttttctctgtttctgtttctgtttctgttttttttccttttatggatgcttttgtgatttgacaaaatttaagtggagtatttccaagtgttttggtgctggtggtttttaattaaaattagagttttatcataatgattattagtgataaaactcaagttttgattaaagattcacatca

SEQ ID NO: 26186 - DNA, 763 bp, Glycine max
ggcacaaggtgggtgggaaaacaccgacaacccaaacaaacactcacagcagcaagcacgcgacaaactttaaacgggttttctttgaccgtccgcaaccttctactaaaatcctccttcacttcaatctttttccactttccaccgaatccaagtcaagtctagaatttccaacgaaccgaacaaaggaaaatcccctcttagatccaatccaaattaatatttgtacatctagtcaagacccaagtccaacgcgtggtcgatcgaatttctcatttggggttctcttttttatttttgatcagctcattaggggttctcaatggatgcttcatcttcctcgtcgagtcaacctgaattcgattacttgttcaagcttctcttgattggggattctggggttggcaaaagcaccctgcttttgagcttcacctccgataccttcgaggatctttctcccacatcggtgtagatttcaaagttaaatatgttacaattggagggaaaaagttaaaacttgctatttgggacacagctgggcaggaaaggtttagaacacttactagttcatattacagaggagcacaaggaataattatggtatatgatgtaacaaggcgggaaacctttacaaatctatctgatatatgggctaaagaaattgacttatactcaacaaatcaagattgcatcaagatgcttgttggaaacaaagttgataaggaaagtgaaagggttgtcagcaaaaaggaaggaatagact

SEQ ID NO: 26187 - DNA, 409 bp, Glycine max
cgttgctaaagcacaccgacatccaggacagtcactcaccgcagcatgcacgcgacaaacttgaaacgggctttactttcacccgtccgcaaccttctactaaatcctcgttctcttcaatctctttccttttccttctgcttccactttccaccgaatccaagtcaagtctagaatttccaataagcttaagaaaaggaaacaaaaccacctcttagatctaatccaaaacaataccctatctataaagtcaaaacctaagtccaagcgtcgtcgattgaatttctcatttggagttctcaatggatgcttcttcttcctcgtcgtcgactcaacccgaattcgattacttgttcaagcttctcttgattggggattctggcgttggcaaaagcaccctgcttttgag

SEQ ID NO: 26188 - DNA, 525 bp, Glycine max
attatattattttggcgcccctccaattcttttgaatcctcacccccacacaacaccactccacacattttcgttcttccctttcacccatctcatctcaacaattgaatctttgaggggtctttcagaatcagaatgatggcagcaactatggagcagcagcagcaacgcccccaacaacaagacgaagctgaagaaatacaacatggccctttacccgtcgagcaacttcaggcatcgggcatagccgccacggacgttaagaagcttaaagacgcgggaatttgcaccgttgaatccgttgcttacactcccaggaaagatcttttgcaaatcaaaggtatcagtgaagctaaagttgacaagataattgaagcagcttctaagctggtgcctatgggtttcaccagcgctagtgaactccatgcccagcgcgatgcaatcattcagataaccacgggatcaagagagcttgacaagatattggagggtggagttgagaccggttctataactgaattatat

SEQ ID NO: 26189 - DNA, 278 bp, Glycine max
ctaagcctgtggtgtaagcttcttgggatcgagagaagtgttattttggcgcccctccaattcttttgaatcctcatcacccccactccacccatctcatctctcttcgatcttaaatattgaatctttgaggggtcagaatcagaatgtcggcaaccatggagcagcaacgccaccaaaaagcgccccaacaacaagacgaagccgaagagatacaacctggccctttacccgtcgagcaacttcaggcatcgggcatagccgccacggacgttaag

SEQ ID NO: 26190 - DNA, 534 bp, Glycine max
cacttgttggccaacaagggtctcttaagttctgacgaaattctctcgacaaagaatcaagtatcagcggatttagtgaagcagtatgcagaaaacaacgatcttttctttgaacaatttgccaagtccatggttaagatgggaaacattactcctttaacagggtcaaggggagagatcagaaagaactgcagaggaattaacaagtgatgtagtgatatcattgtcatgtgacacgtgtgaaagttgcacctacattttacttttcttcctcttgtttaccgcattaaaaaacaggagtgtccattgatctattctgtggtgagttgagcaagtcattagcagtgtcgtgatgtgccttgaatatccttttgatagcgttgcggtgtgtttaaattaaatttatgtgcttggatgtttcaaggtcaggcttcaaatttgaattgattgttcaagtagttcgaatttatgtaggtattcaagtttaaataaaatttgtatcacctttcatgttgaataaaatagaattccaat

SEQ ID NO: 26191 - DNA, 575 bp, Glycine max
ctctgttttgaacatgattgtctcttttagaaaatatttgtgatatctaaaagaagaaagagtgactcatcacatattcattagtacaaatcttagatacagttcttttagtggttatagtattattctttgttatacttgaagtttcacctcgacaattggagttttactaattatcaaggtgaaatttttgttctgatcagagagtaatagtggtaacccttgaggtactctatctaagttttgtatagataaatattcgagtgcaaataaaatggagacttattgaataattgaagataatgttaagaataaacaatgtagttcatgatccacaagcattgtgtgtgtgagtcaaggttgagttactaagctcagttgtgtgtcttgttttactgtgttgtggttagtcaggtaggaatcgttgggttatggtttaggttaaggtgttgagttgttggttgtttttgtttgacatttgggattgagtggatgattgttgagaggagtcttccttccttgacttcaatctaaatgtcacttttggttactagtaatggaatttcagtttttct

SEQ ID NO: 26192 - DNA, 275 bp, Glycine max
cgacaattcatctggagcaagatcccaaaatggttgttcccatattatcaatccatgttctaatcccgaggttcccgatgatggaaatttggtctcaggctataaagcagatgctgcatcacagaaactgtcaatagaggagtttgcagaattgaaactagagaaagagaaagtagtgattgatctgtcaaattgtactgagaatcttgaaatgacaaagtctcaattgctagaggcagagcaacttctagctgaagttaaatcacaattggctt

SEQ ID NO: 26193 - DNA, 468 bp, Glycine max
  unsure (1)..(468): unsure at all n locations
attttctgtttaatttttcctctatgttataaatactactaatctcttacagtttgtgtgcgctgcagatggaaggtacgtttgctgaagaactttatgctgaaagtttacaactgtcaaaattagaactcacatccaccagtgctgatgatcaagaaaacaaggcaaacgtttgtgatggtgatgatttgagtttgtgggatgaatctgatgacaagttggagagctcgtcggatttggacagggagtggcagaggaggcacgaccaattccatacgattgggtatcgtgagggtcttatagcggggaaggaggctgctgcacaggaaggtttcaatttcggttttaaacaaatcggtcccttgatggtcacaccattgtggggtgtgnnnaagagtgtaccagtgctttttctcatcttccacatcaattaaaaaagagaggctgattgaaacacaaaaagaaaag

SEQ ID NO: 26194 - DNA, 471 bp, Glycine max
ctcaaactctcggactcaaacacacagcacgacgaaacctagcagcctcacgccctcatcgcagcagggacctagccgtcgccggagacgcactgagtctgagagcagcggtgactaaatcaggtttgtcaaagaggaaaaggagagttacgattcaggtttgaagcactaaatcaatcaaaattgtagcaatgggtgagagcaagaaacgaaagagacacagaaacaaacgtggtggtaaggaggagcaaccggttcttccttctccttgtgctaagcgcacaaagctgaaggaaccctcttcctttcttcaaaagatgcgagcacggttgtctggtgggcatttcaggatgattaatgaaaagctctacacttgcactggggaggaggcgctagattatttcaaggaagaaccttcgctatttgatgtgtatcatacaggatacaaaacacaaatgtcaaattggccag

SEQ ID NO: 26195 - DNA, 698 bp, Glycine max
aattattgtaaattttttgttatattgttttcaattctgggactcataacctgagtgagataggacaagtgctcagttgatcagctttgaaaacgtttcttggttgcatcatgtctgccatcactaatcattggaacaaaatgaaaatgctgcagaggcagctaagagctgtattgatactgttttgctgtgttcaatttcatgtccaaagttgtgatgaaattgaagatgtaatcagcagatctcaatttccagaagggttccttttcggaacaggcacttcctcttaccagattgaaggagcgtattttgaagatggaaagggtttaagcaattgggatgcttttagtcatacaccaggaaagataaaaaaggatgaaaatggtgacattgcagatgatcattatcatcgctatttggaagacattgagttgatgtcgtctcttggggtaaatgtatatcgattttctatctcatgggcgaggattctaccaagagggatatatggggacataaatccaagtgggataatgttctacaacaagattatagacaatctgctgcttagaggtgaagtaacaatgtcaatgtccacttggttctctataatgctactttgtcttgaccatagtcacatatataattcgctcaacttagtggagaaccgtgaattaatttgcgtgtaccaattcacggtt

SEQ ID NO: 26196 - DNA, 390 bp, Glycine max
tggaccccatctctatcatgtgtgtggtctacactcacccctccattctcattcattaataacaacctcacaaaaacaaaagcacacacacacacctatgctcgctcgatcatcgaatgaaaaaaccaaccaaaaaccctttctttcactttggttgtctcttctacaccactttcccttcaccttccgttctccactcactactactaacataaattaaaaacacgccatgaacaacaacccaacaacaatcatcggttccactacccacggatcagaagaagaagatgaacacatcactgaaataagggaaatccacgcgttaaccccgccgccgccacgtggcagagcctgggagacagtgcatacccacaggtcaagctctctctc

SEQ ID NO: 26197 - DNA, 265 bp, Glycine max
cgcaatcgtatgaagcgtcggcttccaactctcctcactggtcttcagggaaagtctcaaattgttcaggaagagttagtgtcgtttggtgaacaaatggttagtagttctgaaggtacaagagctctagccttgcagttgtgccgtcaatctgcggacaaatttcttcaacatcttactggaggcgagggtaatggttggaaagttgttgctagttttgaagggaattttcctaacagaatcaagcaacttcctattgacagac

SEQ ID NO: 26198 - DNA, 488 bp, Glycine max
ctgaaagagtcagaaaaccaacgtagagaaaactcttcagtgcctctaccacccttgcctccatcagacacagatgcaacagggtgcttgtcatggctggatcacaagcagaagcagaataatggtgttgggtcagtggcatatgttagctttgggacagtggtgaccccacctcctcatgagattgtggcactcgctgaagcattggaagcaagtggtgttccctttctttggtctctcaaggagcatctgaagggtgttctgccaagagggtttcttgagagaacaagtgagagtgggaaagtcgtggcttgggccccacagactcaggttttgggacatggctctgtgggtgtgtttgcgacacactgcgggtgtaactcggtgtttgagagcatgtccaatggggtgcctatgatatgcagacatttctttggggatcatgggttgactggaaggatggttgaggatgtttgggagattggtgt

SEQ ID NO: 26199 - DNA, 705 bp, Glycine max
cccatagaatgtccataattcacaccttcacttattgcttcatgacaatgtcatccctttatgctgttgtcttcatcctctatggcattgtacctcaagtgtgcctcctcaaaggaatcactgtgtttccaaaggccacggacccttggtttgccgtgtttgcatttgtgtatgtatctactcaaattcaacatttgattgaggttctatctggggatggctctgtggctatgtggtgggatgaacaaagaatttggattctgaagtcagttaccagcatatttgcaattatagatggaatcaagaagtggttggggttgagcaaggtgaaattcaacttgtcaaacaaagcaattgacaaagagaagctcaagaaatatgagcaaggtagattcgatttccaaggtgcagctgtgttcatggctccattggttctattactcacagccaacattgttagcttcttagttggtatatggagactatttaatttcaatgtgaaggattttgaagaaatgtttggtcaacttttcctagttacctatgtaatggttcttagttatccacttcttgaggccatggtaacaatgaaaagcaagagtggatagtgaaatttggtcacaaataattaggctcattcaagagtctaaattgattatgtatcttgagatgaaattgcttaatgcaatcttgttcgttcagttt

SEQ ID NO: 26200 - DNA, 482 bp, Glycine max
attatggacagctggaacttaggattctggcacaccttgctgactgtaagagcatgttggaagcttttgaagctggtggagatttccattcaaggactgcaatgaatatgtacccacatattcgtgaagcagttgagagaaaggaagtgcttcttgagtggcatcctcagcctggtgaagacaaacccccagttcctctcctgaaagatgcctttgcttctgaaagaaggaaagccaaaatgcttaacttctcaattgcatatggaaagacgccagttgggctttccaaggattggaaggttactgtgacagaagctaggagaacagttgacctttggtacaatgacagaaaagaagtgctgagctcgcaaaaagaccggcacacagaagcttgtgaatctcaacgtgttcacacattgctagggcgagcccggcggtttcctaaaatagacctagctaacaactagcacaaaggtcatatt

SEQ ID NO: 26201 - DNA, 282 bp, Glycine max
gctttgcctgctctaattactcttggatctgaccaaaacctcaatgtgaagtgtgccagcattgatgcatttggtgtagtggctcaacgctttaaaaatgagatgttagttgacaagatacgtgttcaaatgggtgcttttcttgaagatggatcccatgaagctactattgctgtcattcgtgcattggtggttgcagtaccacatacaacagaacgacttagagattatcttttatccaagatttctcaacttacagccgtgcctactgctgcttctagt

SEQ ID NO: 26202 - DNA, 313 bp, Glycine max
cagactcgagcgcgattcggctcgagaaacacattaactacccttctttcttgttccacactttcactactaccccttccttccttctcatggaaaccacccaacttgactacaacactaaaaaaacaaaccccacttccccaacgcgcttgaagctcttcggtttcagcgtacaccacgaagacatcatggacgaagacgaggtggcgcatgatgacgtggcagactccaccaccaaggtcacttcttccacttccccttcttccccgtctgactcgccggactcctccgtcgccggtgccggaccaccttc

SEQ ID NO: 26203 - DNA, 424 bp, Glycine max
tcctttcgtccggtttcttagccatggagaaagcaacaagagtgaaaatacttgaaatttgccttgtgtcaccaccacaggaaaaaacgacaacacaaacatctttgtctctcacattctttgagttactatggctgaggcttcccccagttgagcgtcttttcttctatgaattccccaaccaaaccatttcattcttcgacaccattcttccaactctcaaacactctctttccctcacactccaacactttctaccttttgctggctccatcatttggccccttgactcaccccaccccatcatcaactatgtccctggcaatgccgtttccctcaccatagctgagtccaacactgacttcaacatgctttgttccaatatctgtgatgcttctctacgccatcccttgataccccattt

SEQ ID NO: 26204 - DNA, 774 bp, Glycine max
gttatactttatgatctgtttgcagattctcgagcaccaatatctgcaccgcttcctttgctattaaggggtttccccagatccagcactttatctcaatctagtggtagagaaagtgagagcacagacggtaatgttttgagcaatcatgaagcagttacatatgccaatacatggacttttctagtgcctgacctcgtatgtgacgtggccaataagttattgtggaagttcaatttagacttagaggcaatttctgctagtagctctgaggtcccatcaatattagagttcctgcagcggcggaagttggaagctaacaaggctaaacaattgtgcttgggtataacacgtacacttattctagagcataggcctgtgcctgtggttgccaaggctgtaaatgtactagtcacctcatactcccattcaattaaaaccggtagctatcttaagggactgaaaccagagaacacatcaacttctgttgtacaaaatactggtgctgaggtatctgctaccgaaacaaatgtaattggaaaatcaatcgtccatgaatctacaagaagagtagacagtggatctcttaataaagcttcaactgtttcaagtttggattctgaggatgagtcccagtctgcaaatctgaaacatagttcaaaggaagtccacgtggaggatgaagtgaataatgagatatctttgagcaaaggagctcacagtgcttatgttatgcaatcatctcttcagtctgggcaagaggaatcccaactt

SEQ ID NO: 26205 - DNA, 262 bp, Glycine max
cagacatttttctctgggctggaatcccttgatgattttctcacccaggctgccactggtacaggaaaaccagcccttcattcttttaatgggaatggtggcgatgataattttgtcacacctgcttctagttccattaactgcttttggggaatgtgatactacccaagttcaaaggtgtcccgagtatcatactcctcaagattcattaaccttcaatgaagctgcagtcttcaatgaggatgatattcacactagcaat

SEQ ID NO: 26206 - DNA, 377 bp, Glycine max
aaaagacttttgctgttgaatcagtttatggaagagcaagggttgtttctcagtgagctgattccccaaacaaaattgatcaggcaatagaatcttgtcctgtcaattgcatttcggttgttgagaggtccaaccttgcagctttggagttcttgatgtccaagcagcctcgtggctacgtaagagtaggtgcaggtcatacagccggtgctcgtgtctctaacatatttgtagatgtggaaaagtttcagactagattccaggaagcaatggacaaggctaataagtgttctaaggagacagacctccatagagaatcaagaatgtcagcaattcaggctataagatcaatttccaattggttatactggcaaaca

SEQ ID NO: 26207 - DNA, 319 bp, Glycine max
ctcctgctaaagacagatctcagattctgtacgctaacacagagagtgcgagtgagaaagagagagatggcaacgacgacgtcgtcttcaagcgaggaagcaccgaacactaagaagaacaagaaggagcgtttaggttggatagaatggttaagaggttggttctatttggtctacgaaatgctctttcagcgcatcatggcgagccacttgcacaaccccatgcctctccctcccgtcaacgacctcacctgcattgtcaccggctccaccagcggcattggcctcgaaattgctaggcaattggctcagtcagggg

SEQ ID NO: 26208 - DNA, 289 bp, Glycine max
ttacatcacaaaagataaaaacagagaaagaaagattatttaggaacaaggaggcgtgcgcgcgcgaaccatccataacagaaacaacaatggcttccatgagtatattcaccaccatttccctcgccgccgacgcccggaatccggccatctattttccccggcggcggcagcccaacacggtcattttcgccgccgcctcatcgccggaatctcctccagaaatagagctcgagttcatcgggccaaaaccgggaagtgatggatcgtacccggtggagagagtgaa

SEQ ID NO: 26209 - DNA, 634 bp, Glycine max
  unsure (1)..(634): unsure at all n locations
gtgtgataagagaatcgagaatgatgctaatgtttggcaaatcaacgcggatactgctgaaaccactgtggcggtgagtcccaaagcttttgaagtggctgatagtaaaacttgccttaatggtgactccaactccatatgccccagtcataatgagcctaatacaccacatgccgttcctgctgatgtaagacctgaaatcaagagtggattagacaatgagaatagggataatgaaaagcaggctgctgctgcacgtgcagataatggaaactcaatctcaaagaacttgtactttttggatcctgatgattcatatgatggtaatgagtcaggaacagaagaggagcaatcagcttttatgaaggagcttgaaaatttctttagggagaggagcatggaattcaaaccacccaagttctataaagaggagcttaattgccttaagttatggagatctgtacacagattgggcggctatgacaaggttacctcatgtaaattctggcggcaagtgggagagtctttcaaacctccaaagacatgcacaacagtttcatggacttttcgggttttttatgagaaggcacttcttgactacgaaaggcatacaacanaaggtggtgagctgaat

SEQ ID NO: 26210 - DNA, 696 bp, Glycine max
atggaattcaaaccacccaagttctataaagaggagcttaattgccttaagttatggagatctgtacacagattgggcggctatgacaaggttacctcatgtaaattctggcggcaagtgggagagtctttcaaacctccaaagacatgcacaacagtttcatggacttttcgggttttttatgagaaggtgattctagattaataaggcacttcttgactacgaaagcatacaacaaaaggtggtgagctgaatgtgcctattactcctcttgcagagccaataaatattgaaaatcagtctgtccagggttcagcatcatcaggtagggcacggagagatgctgcagcaagggctatgcagggttggcactcacaacgtctccttagcaatggtgaatttagtgatcctattattaaggataggaactctttgtctacgcaaaagcgtgaaaagcagcttaaaaacatcaatttacttaaacgcaagaaatcatcagacacagttaatgctgtcaaagtggcacacagccaaccatctagaccacaatcggacacatatgtggttgacattggacctcctgctgattgggtaaaagtcaatgtgcaaaaaactaaagattgttttgaggtctatgctttagttcctggccttctgcgggaagaggtgcgtgttcaatcagacccagctggacgc

SEQ ID NO: 26211 - DNA, 328 bp, Glycine max
attttgtctcacccgcgaacctgaatacaaaggcttgggggcaaagcgagggcaggccttgaattcgcactctcttcacacactccccatggacttcacccaagacttgcactgtctcctatctgagcaacgccgcaagctcgccgccgcagaggccatggaattggacctcgacttcgccttccgcctccagttaaaggaagccctcgcggcctccctcgccgcccagccctcctcctcctccgccgccgccgccgcgatcatcgaacaacccgtcgtcgtcatccacgatgacgacgtcaacgccatgaccctgcagcgcgaggag

SEQ ID NO: 26212 - DNA, 565 bp, Glycine max
aggtgatgtgttgaagactgaacttccttattttgacatttgtgttgcaaacattccctaccaaatatcttctcctctctcattcaagttactcaagcatgaacctgcttttagggctgcaatcataatgttccagagagaatttgccatgagactggttgctcagcctggtgataaactatattgtcgtctcacagtcaacactcaactacatgctcgagtcttccacctcctcaaagttggaagaaacaacttcaggccccctcccaaggtggattcctctgtggtgcgaattgagcccaggaaaccccgtattgaagttaagcaaaaggagtgggatgggtttttgcggatttgttttaacaggaagaacaaaacacttggttcgatatttaggcagaagagcgtgatctccttgcttgaaaaaaactacaggactgtgcgggcactggaactcgggcaagaagattcactgaaggaagtggatgctaaaatggacttctctagttttggtgatgatcaaagtatggagatggatgatgatggagcagatgatgatgaaatg

SEQ ID NO: 26213 - DNA, 511 bp, Glycine max
atgccttgtttctgattatagagttgtttgtcatattctaaaaggacactacagcaaggatttcttcgagggttgtagggctatactgatagataaagacagaaacccaaagtgggaaccttccaaattggagcttcttagtgatagcgatgttaatcgttacttctctaaacttgatgataaaggatggaaagatttggagcttcctaaaaggtttaataatctgcctacatatgctatttcaaagctgtaaagcatcatcattctcatattttcaagcccaaagtatggaagacacgtattgctccattcaattgattcttggatgtttcaatgtatggcagtttatgaattgctaccgttacaattgataagattttaaaactagtgaagtctaccgttgagaatcagagtatgatactctaataaatgtagtttccaggtatataatctctaatttagaggaaattgaatattctctatttatgtgcaattaattcaataagcccat

SEQ ID NO: 26214 - DNA, 335 bp, Glycine max
gtctcctctcttgttgccgtataaaagactcgccctctgcacaatcccaaacccgaagccgaactaaaacctcactgcaactcaaaacaggaaccaacagtttcctttgcaatattttcttctttctctcaccgccgcgcgaatcctccttcttcgttgcttcattctctgcttctcttcactcgcattcttccttcctaccgctatgtttctatcaaagttggaattctagttgattagttttcctgactctagttggaaagatgggaagcacatttaatccacagattttggtgaaaaactagccaagctgaatgtttcaaaacgagcataga

SEQ ID NO: 26215 - DNA, 326 bp, Glycine max
cttgattcctttaagggtatacaaaagcacaaccaaaggtttcaaactcccaagctggagttttggcctattatcccaacgatcttcttctgcttgagccatggcccttaacatttgcttgagctttttggccctagctgcccttgcatttctcgtcacaatacaaggaactcttggagagacattagaatgcgagaatttgagccacgacacgtgcgcatttgcggtgtcatcggaagggaaacggtgtgtgcttgagaagcgtgtgaagaggacaggggaagaagcttacacgtgcaggacttcggagatagaagttgaaaaac

SEQ ID NO: 26216 - DNA, 411 bp, Glycine max
ctgatagttacaagaaacagtgctcggccattgagcttctgaagatgttgctgaaaacagtagggtttagtaattttacaccattagtggatgtggttaaagatggctaaagaataatgtacaacagagtcagcaacaaattcatggaatgcagccacagctacagcaacaacagcagagttcccttcggctgcctcaacaacttcaaatgcagaggcaaatgcatccgcagatgcagcagatgattcattcccaaaatatggcttttcatcagcagcaacatcaacaacaacagcagcagtttgagagattgcgaaggcgtgcagcagcagctactcctcgccctgctatggatatagataaagaaagaccattggttcaagtcaagattgaaaaccaagacttaccact

SEQ ID NO: 26217 - DNA, 330 bp, Glycine max
ctgaatttagagtccctggacctgttagtacagggatttcccaaattagaagacccttcaacagatatcactaacaaggatcctttgttgctgaaagctgtgactggcactgagatagactatctgttgaatactgctaaagatcctacatattggtcaaaggcctgcttgtatcatatggtcaaattggcaagggaagctacaacattacggcgtgtcctagagcctctttttcactattctgatactgaaaatcaatggtcttctgaaaaaggagttgctgatcatgttttgatgtacttacaatctcttttagcagaatcaggagat

SEQ ID NO: 26218 - DNA, 376 bp, Glycine max
gccagttgagtgctttcttgagaagactaatactgggcgcagtagaagttccagccgagggagtagtgctggtaggtctcctgtgttatatgttgatgagcagatccagggatttaaagtaaatctaaaaccagaaaagaaatccaaattttcatctgttgtgttgaagatacgtggtattgatgaggacatttggagacagcaagtaactggtggaaagctcagggaaattactgaggggccaaaagttttgcaattgggaacagggctcttgctgcactctttgtacatacaccagcgggtgacctgcagcctcaaattagatcgcggcttgcagagaattttgagtttctatctttaacaggagaagatgcat

SEQ ID NO: 26219 - DNA, 244 bp, Glycine max
ctttacgaatagatataaaaagattatttatcttggtccgccgtgcctatttcatctcattatcaaccctagctagaactcaaaggtaaatgcaaatgggctataaaaacctagccaactttttgtaccaccaaagctgacttgacatttaccaaatttggaagatcactgttggaggatcagcacaaccccctcccccccctagtgaaatacaagaagtgatcttcagtcatatatttcagta

SEQ ID NO: 26220 - DNA, 345 bp, Glycine max
agctcagtctcgctcagagtcagagaaaaacaccctaatcaaatattatcatggagcccagcttggatttgagactgggctttgtccccaaacccctttccctgtttttcggcgacgtttctgggaacagagacaagtgcgacaaagtggtcacactcgatggcttcgtgcagagattggaggaagagttgacaaaggtcgaggctttcaaacgcgagcttcctctctgcattctcctcctaaacgatgctatagcgagattgaaggaggatccagtgaagtgttcgggaatgcaagatccgcctcttaaaaccagttcaggaggaaatgaatatgaaaactctg

SEQ ID NO: 26221 - DNA, 355 bp, Glycine max
cacgctcccaagctctggaagcgctacacctcccggggtcgctacgccatgatgccggagatccccttcgaagctttccgcgtgacctctcagttcttcacgctcacgcgccgccacgcgctcgtcgtcgtcaaggacaggaccctgtggcggaaattcaagatcccgtgttaccgtgacgatgagtgctaccccgaggagcattattttccgaccctgttgtccatggcggatcctgatggctgcaccaaatacacgctcacgagtgttaactggaccggcaccgtcaacggccatccttagacttaccggccgacggaaatctcgccggaactcattctccggctccggaagt

SEQ ID NO: 26222 - DNA, 814 bp, Glycine max
  unsure (1)..(814): unsure at all n locations
aaccaaatcccggcccttcctcaagcaggggctaagagctaaatgtatttgtcagccaatggtcccgtttctactgtacactcgtaaacccctcacatcagggtggcactgtacatatgaggggcgttttgagatagtgtgccttcaggctcttactggttgccgatagtggtgcaccgcaaatcgactngtgcattaagtgtttcactgcaaagtcctgatggtcgtgtcatcggtgnaggagttggtgaagtgcttattgctgcaagtccagttcaggtgatacttgggagcttttcatggggtgcatcaaagacaaagataaagaaaaaagaaggttcagaaggtgcagaagttgctatggagactgatcatcagacggttcataatccagttgcagtgaatagtatttccccaaatcaaaatcttactccaacctcatctctaagtccttggcctgcatcgcgaccattggatatgcgcaattcccatattgacattgatttaatgcgcgggtgacaatttatttagtatatgccagtactgagtatataattcagattcatggtcactcatctaattttcctgtagtagtaactacagcatggtaagcaccaccaccagagtagaagccagctgactcttggaaatttgataaaatgccacctatctacccatgattgactttagggttgaactcatatttttgtagctgtgaggaattttaatttgaagatttcgtgttcttggttaaatacagactgtgtattttatatcctatttgaaagagattgacattgagttaaaaaaaaaa

SEQ ID NO: 26223 - DNA, 657 bp, Glycine max
tctgcccacgcgtccgcccacgcgtgcgactcactctctctctctctgccgagagatcgatcaaaaaacagaaaatcaaagcctatcaccgatgccgccaccaacgcccctgagcagcgcctccgccgcgctccggcggcggctgcagcagtccctgcggacccgcggcggcgcggagtccgggccgagccggtggacgagccccggccacgaggagaggccgaaggggtacctcttcaatcggacccctccgcccccgggccagtcccgcaagtgggaggactgggagctcccctgctacgtcaccagcttcctcaccatcgtcatcctcggcgtgggcctcaacgccaagcccgatctcaccatcgaaacctgggcccacgaaaaagcccttgaacgcctcaagatcgagaactccctcgctgccgccgctacaactaataacaacaacgacgagtcatcctcctccgacgaatcggactgagtcgactcggatccctccaagttaggttttgttaaaggaaaaagaaaataggtttcttcgctgtaataagggtataacaactcttggaatttgaactccttggttacacttaattatttttcttgtgttttgaattttgcattgtgatgatgatgatgatgagattgtcgact

SEQ ID NO: 26224 - DNA, 292 bp, Glycine max
cgagactacacgggcagtatctaaaataacagtgaactttttttgagactatcgacaggcatgcatcgagtctgaccgaaattgtggaagaagcacaattggtcaatgatcagaaattgtgtgaacttgagaagaagtttgaggagtgtactgcctatgaagaaaaacaactactggagaaagtggcagaaatgctagcacagttcaaatgctagacagaaacaattggttcaaatagcagtcaatgatcttcgagaaagtgcaaattgtagaaccagtaaactgcggcaag

SEQ ID NO: 26225 - DNA, 280 bp, Glycine max
agtttgtcaggagcatggtagtaaagataactggatcagcggatcaaatgttgagaggcaatgcctgaatcagataatagcatcgccgcaacatagttcacccgaagaccctgcctctgatgctgaaacggaccaaaaccacaatcactgatgagtgctagtgcccttggactgcgtggaataagagagactagacttctgttgttttctacaaatgttatttttttaattagcgtttttaaggtaatcaatattagaaatcttgtatttttcaattttt

SEQ ID NO: 26226 - DNA, 455 bp, Glycine max
  unsure (1)..(455): unsure at all n locations
gtaaggttgtgtttgcttgcgttgcgaagcctgttgtgtcactattgacacttgaatcccctcttcaacgccgtggtgagagtctcagtcgccgctatgttccgcagaatcttgtcccatcatcgcacactctcagcctgcgcccacaatgcaacaacacgctctctggccactcgccgccacgcccccaatgtccctccacccccttccttcctaatcccacgatcaaggcccctttcttccaaaacatcccaatccaacgaagccgctgaaagctccaataaggccaaaaaggacgtggncaacgttgaagatccctttagtgcccctacctataacattccggagaagcctgtgacgtttgtggagggagcgtcctacagtgttgtcattcttgcgggactcggaatcgctgctgctgccggatatgctgntttcaaagagcttatttttca

SEQ ID NO: 26227 - DNA, 249 bp, Glycine max
cttgcttgccttgcgatttgcgaaccctgttgtgttgcgtcactgttgaaactcgaaacccctctcctccttcctcccttcaacgccgtggaagaagaatagagtctgagtctccgttatgttccgcagaatcttgtcccatcatcgcgcactctcagcctgcgcccacaatgcaacaacgcgctcactcgttactcgccgcacccccaatgttccaccaccaaccacctttccaatcacaggatcaag

SEQ ID NO: 26228 - DNA, 399 bp, Glycine max
tgtgcatattgttgggatgtggaaactggtaaagtgaaaatggtattcaaggggcacatggactatttgcattgtatagttgctcgcaactcatcaaatcagatcatatcaggttcggaggatgggacaacacgtatttgggattgcaaaagtggaaagtgtacgcaagtcattgatccagcaagagatttgaaattaaagggatctgcttcatgggttggttgtgttgctttagatgcaagtgagagctggttggcttgcagtagtggacgtaatatatcactttggaaccttcctgcgtcagaatgcgtatcaaagattccaactcgtgcttgtgtacaagacatgtcatttgacaataatcaaattttgacagttggtacagatcctctactcaat

SEQ ID NO: 26229 - DNA, 604 bp, Glycine max
ccaagcgctgcgtgggttctattgaggatatgattgacttttccacctccgtattgggccgtaatgtcgcggtttggaccactgagagggtaaatgggtccaataagaatgtgatggtgggccgggtcaaagggatgaacggtggaaaggtgacccaatcggtgtcgtgccaccaaagcttgttcccttacatgctttactattgtcactccgttcccaaggttcgggtctaccaagcggatcttttagacccggaatctaaggccaagattaaccacggggttgctatttgtcacttggatacccactgcgtggagccccacccacggtgcattcatggcgctcgggtcgggtccgggtcggatcgaagtgtgccattggatctttgagaatgacttgacctggactattgctgattgatttaggaaactagagttggttcgcgactccattggctaatggaaattgaaagcaggctcaacccaatgtcaatgtgttttcattttaagtcaccttttttttttttttcccgggttttcagacataaaatgttttgaaggggtttgtccatttaaggtaattattaaagggggcattatctggt

SEQ ID NO: 26230 - DNA, 628 bp, Glycine max
acttgtataataatcatcctattgattattctgggtcttaatgtatatatttttttaaaagtacagaaatgatgtaccttgtccactgacagttaaattacaaggtgctttctgttacataaatatgatgcctagagaaagcagaatgtcattcttactaggagggatgcgtttaaacgacatacaaattagcctctgcaacttacagattgtgacattttacaaaaatatatacattaagacccagaataatcaataggatgattattatacaagtgccacttcaaaaactaaaactgaacagctaaaccctatctccaaaaaattataaatgaaaagccatatatggctagaatcggggagaaatgttgaaaatattatcccaaccctgcagataccagccaaactaccaccgaatggatctttacaactatatctgtcattcctacatgaggtttcagaaatctgactgcataagcttcattcgaggttttatgctgacatttgcaaagggttttgtctgttctacatggacataatccctggtcttgagaaccagagtttcaaaaaacatccgagatgcttccttccgtgttttaccaactaataaattgtcaagatgcagctc

SEQ ID NO: 26231 - DNA, 270 bp, Glycine max
tacagctgcgaacagacggcgaatagattgtctgttatgttggatctgcctgtaatggcctctagaggaactggaacgctgattttggtttgtctcttatggcttttcttcctatgcgccaccatagctttcttgcagctcaacttcgtagacaaaggaaccaccaacaacaacccttcctctcgcagtagtaacttcatcgcaactcaacagcatagcgctgatacccctttggaccagggtttggagggtgtcacccacaaggtgtat

SEQ ID NO: 26232 - DNA, 327 bp, Glycine max
gctacttggaagcttcacaaattagggagagagcgattgacaggattaataatgttattggaacatacaatgatttgaggctcagaatattttccaaataccctgatttattccctgatgaggtgttcaacatagagtccttcaaatggtcatttggtattcttttctcccgcttggttcggttaccctcaatgggtggaaatgttgccttggttccttgggctgatatgctgaatcatagttgtgatgtggagacatttttggattatgataagacatcaaagggaattgtcttcacgacagatcggccctatcaaccaggtgagc

SEQ ID NO: 26233 - DNA, 932 bp, Glycine max
  unsure (1)..(932): unsure at all n locations
ccggtgattattggcaatcctgacattttcatacgtgaaatcctccctagtctgacagttctgtacaagggtaacaaggacggtgatgccagatttttgtgccttaaaattctttttgatgtgatgatcattcttttgagtgaaccaattgaagaagagcaaagattgacggatctgaaattcgtatccaatacccgttttcttcctctctacccaaccttgattgaagatgaagatcctattcctatctatgcgcagaagcttcttgtcatgctaatggagttcagttttattacaattcctgacattctacatctgaagacaatttcacaatgctttgagttcttgctgggtgatctctcaaatgcaaatgtgaataatgttaagctgtgtcttgctctggcttctgctcctgagatggagtccaaattactctctcagttaaaggtggttaggaggattggcaactttcttgagtttgtatatgcaaagggtatggaagatttgctggaaccaactcttgggttgtgtaaggcttttctagcacgttcagttagctgcacaaaaggcttcagctacacaacagaactaattctcttaggtgactgtcctcccgagttgagtggtggcgctgtcgatccccaacaatgcataacagatatagcggactttggaagcaatgtcggtgtcttgctagagttgagtgcctctgcagaaaccagtattgctgatatagcttctgaatgtgttgtcttactgctcaaggcagctcctagagaagccaccactggtatactaaccaatctccccaaggtgactgtgatcctagagagctggagtagaggcattcctcacttgatcatccagcgaatgcttcacgctttaggctatgcttgcangcaatacttactgcatgcaatgatattatcaat

SEQ ID NO: 26234 - DNA, 570 bp, Glycine max
aagataatcccttttggaatagggcagtagtagcactagcaccgtagcaggaggcaggaggcaggaggcaggaggcaggaggcgagttaccttttatcgtggagtgcagcagattgagagcacttggttacccttttcacttaaaaacaatgcgaaaccttttgtagccgaaggcaaaactcaaataaccatgtccaccaccacaatcccttcatccctcttatctcccagcctatcctccttcaaactctcgttcccttccaccaaactccaacccttgagtccccaattcagacgcaaccgtattggcttttccttttcttcccccaccttctctccgtggaagcgtttcgctgtaaacgacaacaacaaggagagtgacaacggcgatgttttgactgggttggatgaagtggagaaagaggcgcgtggaaatagcaccatgcccgaacgctttaggtacctcgccaaagaagttccgagtcttcctgttaggtggccatggcttgtggtactggcttttctggtctatgcttggagagctgttctatttgaactgtcaactggaag

SEQ ID NO: 26235 - DNA, 422 bp, Glycine max
ctcgagccgctaacacacactgtctctgatcctgcattattgttgacaacatggccacggagcttctccaaattgatccccctcagctcacttttacctttgaattgaagaaacagagttcctgcttggttcatctcatcaacaacaactcttctcaccatgtcgccttcaaggtcaaaaccacgtcgcccaagaaatactgcgtcagaccaactgtcggcatcgtcaagccacacggaacatgtgatttcaccgttactatgcaggctcagcgcacagccccacctgatctgcactgcaaagacaagttcctcgttcaaagcgcggttgtcccaaaaggaacaaccgaggatgaaatctcctctgacctgtttgtcaaagatagtggaaggcttgttgatgagaagaagctaagggtggtc

SEQ ID NO: 26236 - DNA, 298 bp, Glycine max
atagcaaccccttaccttgtgcgtgtttgctccggggactcacaggtcacaacctccacattccgtgttcgttcttccatttcggtacaactgaaaagtaacaccatgattcagtttcagtgatggaagtcgaagctaggcgaatcaggaggtttgtgcctcagaggccctcacaccgcactattctcccgcttcacgcttcttcctcctcccacaatgtttccaacaccatttcctgctggtattgcgactacaaaatctgctcgtttaatagacctcttttccactttggtcgccg

SEQ ID NO: 26237 - DNA, 1011 bp, Glycine max
ctgatattgatcgtcgaatatcagagcatgtccttcgtatgcatcgatttcgttctgctgttgatggaggtgaggcagcacttgatgggagctcaagatatggaagagaagatgaagctgatatggactcatctgtctttgtcaaatataacagaatgttacatgggaagaaaactggaagaggtcaaaaacgtgatacgcttacaattaagtttcttaaaaaatttatccactatgctaagcataggattcaacctgaacttactgatgaggcatctgagaacattgccacggcctatgctgagctcagaaatgcaagttcaaatgcaaagactggaggaacacttcccataactgccagaactttagaaaccataatacgtctctcaacagctcatgccaaattgaagttgagcagagaggtttcaaagtctgatgttgaagctgctttgaaggttctaaattttgcaatatatcacaaagaactaacagaaatggaggagcgtgagcaagagagggagagagagctggacaggaagcgcaaggctgatcatgatgaaaatgatggtcctgatcgtggtcctaaagatagaagaggtcctaaagataaaagagggccaacatcaacggatgccatggaagtagatgataactcagcaactcatgctgctgtcggacccacccctgaaagaattgaagaatttaattctctatttaatcagcatatgcatgccaaccgcctggaacaaataactattgcaaacttagggaatgttatcaacagagggcaagatccaccaccttacagtgctgcagatatactactcctattagagaggttgcaagacgacaatagagtcatgataactgatggagtggtgcatatgatatcataaaatgtaagattgttttcacaatctctttacgaagattcagacagggagcagaatttgctgctagggtattatgtagcttacaccggagggagacttgagaaggaattgcaatttt

SEQ ID NO: 26238 - DNA, 282 bp, Glycine max
cgaagtttataacaaaattcagcctcagaaactgagtatcaagggaagaactcctcaaatggagacaccattagtggtccaaaattttacttcagaagctgactattttccagtgacaagcttgaaggatgttaaatttgttttgtgggcagagacagtgaagatatggagaatagcattgccagtggcattgacccatctattccaggttctcacaaactcctcaacttccatatatgctggtcatgctggagacattgaactctcttctatctctgtgag

SEQ ID NO: 26239 - DNA, 446 bp, Glycine max
ctttctggagttctcgccattcatcacccccaccaatctcctcctcctccgtacacatggccacgcttgccgattcttttctcgccgacctcgatgaactctctgataacgaggctgaaattcccgaggataacgatgtggatgccgcagacatggaagaggatgtcgatggcgaccttgccgacctagaaaacctaaactatgatgacttggacagtgtttccaagttgcagaaaacccagaggtacactgatgttatccagaaagtggaagaggcacttaataaaaaggagtctgaggtcttgtttcaggtagtggatatagaagatgatcctgaataccaactgattgtggattgcaatgcactgtcagttgacattgaaaatgaaattgttattattcacaactttattcgggacaagtatcctttgaaatttccggagctt

SEQ ID NO: 26240 - DNA, 279 bp, Glycine max
cctttgcagtagtaagtagtaccgtctcaatcactcactgttggccatggaaaaccaaaaccgtctcaaacttcgaagctctcgcatgttccgatcctcattcgggtcgtgcaggactcgtaacctaaccgatgtaatggaacaagcggtgtttgcaccacccaaccccatcgaagtcgaaccaccctccctcaaaaccatcaacaacacttgcatcctgtcgtttaaggattctcttcccaggcgcaaaatctcggagtggtcatcaccttttgtctt

SEQ ID NO: 26241 - DNA, 282 bp, Glycine max
aagaatgccactttctcctattcgttcttctactttctcttcatcatcagctattgttacattagctgtgttacttcttcttacaaggacctcttcagctaccctctcaaagaacttctattctaagacatgtccaaacgttttcaacacggtaaaatctgtagtaaaatctgctgtggccaaagaacctcgcattggagcttctattgttcgcctcttcttccatgactgctttgttcaaggttgtgatggatcaatactacttgatgacactccaacctt

SEQ ID NO: 26242 - DNA, 373 bp, Glycine max
cggggtcctgctacggagaaggctctttataacctgaatttttcaattgacgcatatcaagctaatcagatcctaaagcaacttcaagaccattcagttgctctaagcttcttttactggctaaagcgtcaaccaggcttctggcacgatgggcatacttacaccaccatggttggtatcctgggccgtgcaagggagtttggtgctataaacaaattgctagagcagatggtcaaggatggatgccagcctaatgttgttacttacaaccgtctaattcacagctatggccgtgcaaactacctaggggaggcactgcatgtgttccaccaaatgcaggagacgggatgcaagcctgatcgtgttacttact

SEQ ID NO: 26243 - DNA, 428 bp, Glycine max
cgcgtgccctcgagcgaatcggctcgagggctcgagcttccttactctactcttcctttctctctctcctcggtgctccttctttcccacttcccctcctccgcatgccccttcttcttcctcccttccccttctctggataaggaaagacggagcaaagcgtaagaaaggcaggatgagtaaaaaacaaagagagcaaaatcactttgtcctggtgcatggtataggccatggtgcctggtgttggtacaagcttaagccactgttggaatccgccggccacaaagtcacagtccttgaccttgcagcttctggcatcgacacacacgacattgaagacatccacacattttctgagtattctaagcctttgttggatctcttggcgtcgcttgctcctaatgaaaaagtggtccttgtcgggcata

SEQ ID NO: 26244 - DNA, 391 bp, Glycine max
gcttggtggaggagttgtttctgaacattttgtcaggacaaaaacgatcccaaggaccgtctggatgacatgcacccagactcttatgctcgttgtttaccttctgtttgcctatgctatcaatggatccctttatcctgcaattgcatttcttggtgtctgctatggtgtgcaagtttctgtgatgctcccaactgtttccgagctttttggtttgaagcactttggcgtgttgagcagcttcatgtcgctcgggaatccaattggtgcattcctcttttcagctctgctagcagggaacatatatgacaatgaggcagcaaaacagcatggtataggccttcttcttgattctggtgtttcctgcatcggtccaaattgctttaagctt

SEQ ID NO: 26245 - DNA, 310 bp, Glycine max
accaaggttttaattagagcctagtttgtgcaagtgattaataggttcacattgacctattcttttatcaagctcttttgcttgtcttgggaagaaaatgaaccctgaaatgaatggggttgaggctgagaagaggcaagagaatggacatgagaaagtggattatgatgtgcaggagaaaatagactatgtgcttaaggtggtggtgataggggactcagcagttggcaagactcaaatactctcaaggtgtgcaaagaatgagttctgctatgactcaaagtccaccattggggttgaatccagacta

SEQ ID NO: 26246 - DNA, 618 bp, Glycine max
aatactgcaccccccttagctgaatttattgaactagtactcaagatggtagactgcttgagtactagttcaataaatactgcaccccccttagctgaattgagtgaattgacttattcacttcgtctccatctaggcttaaggcttctgcaatctgctgccaatgcagctgggaaggataaattcctaaatgctattcctttgcatcacattgatagaactagaacaaatcttgaaaagttcatatgggggctttctaaaatgtattccccttgcaaagaagaaaagctatcaagattttccagactaaaccactcaatgctgatgtgggacactctcaagtactctttgacatcaatggagattgctgcacggtgtggaaagacttcttttacaccaaactttgctcttagtgcattgtatgaagaactgaaatcttcaagtggctttatattatccctgatgctgaaacttgttcaaaagacacgaagtaataattctcttcatgttctacaaagatttagaggtgttcaactcttggcagaatcaatttgttctggggtttccctgaattacgcacataatgacgagtctgggagaggtgatatgttaagtatc

SEQ ID NO: 26247 - DNA, 359 bp, Glycine max
cgcgcacttacagttctctctatttcaatcccctcaccaccaccaccactgccaaaccccaccacacctttctctttgacaaggaaaactccaacgccaatggctcctctgttctacccaagcccaggcctttcaggtctctttccactgacatgatcttgcagccctgctctcttgaatcccagtctctgaatctcaacatttgggactactctgactccgaatcaggtcctgcttcttcctggtccacactggccaacaagcccttgatctgtagacccttgcctttagatatcggaagctgcacttgctttatcgtcaatgaaccacctccccagggactatcaggtggcactttc

SEQ ID NO: 26248 - DNA, 288 bp, Glycine max
ctttatgttgttgtcgtcgtctccttttttctggaagcaaccccaatcttcactgatccgcgcacttagcaccgcttccatttgatggcgttcgctcactacttgctcgcagttcccgttgagccctctcccaacttcccgacaaaccctcccaaaccaaacccatcgctgtcgtcgtcctcgtcgtcgtcgatttcctcacactgtttcaacctctcttcgtctctccgccccaaacactcgctattctccaggttccgcaggatctgtcacaaagctaaggctaag

SEQ ID NO: 26249 - DNA, 291 bp, Glycine max
caggacacgaccataattggaaatgcttatgggttggcttgtatgacagttatgttcataactacatttctgatgacactagtcgcaatctttgtctggcagaaaagtgtcttgattgctgttgcatttcttttattcttttgggtgatatagggcgtatatctatcagcagcattcatcaaagtgcctcagggaggatgggtacctctagtcttatcattcatcttcatgattgttatgtacgtgtggcattatggaactcgtaggaagtacagctatgatctgcacaac

SEQ ID NO: 26250 - DNA, 613 bp, Glycine max
ctaacatcccacttggcattctccatttatttggtacatctctctctctttccgcttaaattcttaaccctcctctctctagtcttttctcctttgttcagtcacccaaactaagaaaattccacctacccctgttgtatactaaaataataatccttgttcatttaaataaatatttttgatgagataatgcaaggatctgtagctgaagcagaagcagaagcagaagcaggggatgaggaagtgaagtctacgctccttttcaatggcaaactctaagctgaatatcattctcattcacattctcttcctctctttctcctccttcgcagaagcattagattcccagcttaagcaacaaaaccaagacgaagaagagagggttccattcgtgggcgtgaacatcggcaccgacgtctcgaaccttccagcagcctcggacctggtcgcgttccttcaactgcagaagaccacacacgttcgcgtctacgatgcgaaccaggacatcctcaaagccctgtcggggaccaagattcgcgtcatcatcagcgtcccaaacaaccagctcctggcgattggttcctccaactccaccgcggcctcctggatcgac

SEQ ID NO: 26251 - DNA, 293 bp, Glycine max
ttttaaacttttccagagcttgctgtctcttctctctctctttggtgacattcatctctttctttctctatttgttgttccaagttagtggaacctttcctatttggattcaaagtcttcaactttggctatctttttgttcaagtgattcctctcctgttggtgggtgtggccagaatttccaaaggagagaccaaaaactatgctgcctttgttcttctcagtggctttctctgctgtgcctctgatcctctatattccaccactcagaagcttgaacctctttgttgaaa

SEQ ID NO: 26252 - DNA, 2007 bp, Glycine max
gagattcttcgttacatatattaccaccagaacaaagatggaggttggggactacacatagaaggtcacagtatcatgttttgcactacactcaattatatatgcatgcgaattcttggagaaggacctaatggaggtcataacaatgcttgtgctaaagcaagaaagtggattcatgatcatggtggtgcaacacatataccttcatgggggaaattttggctttcggtacttggtatagttgattggtgtggaagcaacccaatgccgcctgaattttggatccttccttcttttctccctatgcatccgggtaaaatgtggtgttattgtcggttggtatacatgcccatgtcttatttgtatgggaagaaatttacgggtccaatcacaccgttagttgtaaatttgagagaagaactttttattcaaccttatgatgaaaatagttggaagaaagcacgtcataaatgtgcaaatgaagatctttactatccccatcattggatacaagatctattatgggatagtttgtatgtattcaccgagcctcttctaaattgttggcctttcaacaagttggttagagaaaaggcacttcaagtaacaatgaaacatattcattatgaagacgaaaatagtcggtatattgccatcgggtgtgtggaaaaggttctatgtatgcttgcttgttgggttgaagatccaaatggagatgctttcaagaagcatcttgcaaggatcccagattatttatgggtttctgaagatggaatgaccatgcagggtattggtactcaatcatgggatgttggtttcattgttcaagctttacttgctactaaccttatagatgattttggacctacaattgcaaaagctcacgatttcatcaagaaatctcaggtaagagaaaatccttcgggagattttaagagtatgtatcgtcacatttgtaaaggctcatggacccttgccgatagagatcatgcatggcaagtttctgataccactgcagaatgtttgaagtgttgtctacttttatcagtgctgccacaagatattgtgggagaaaaaatggaacttgaaaagttacatgattcaatcaatttgatactgtcacttcagagtaaaaatggaggtatgactgcgtgggagcccgcaggagcttataaatggttggaactactcaatcctacggaattttttgctgacatagtagttgagcacgaatatcttgaatgcactgcatcagcaattcaggttttagtgttgttcaaaaagctttaccctgagcatagaaaggaagagatagagaacttcattgctaaagcagtaacattcattgaagatacacaattagagaatggttcttggtatgggaattgggcagtttgtttcacttacagctcttggtttgcacttggaggtctagttgctgctggcaagacttacacaaattgtgttactattcgtaaagctgtgaaatttctactcaaaatacaaaataaggacggtgggtggggagagagttatctttcttgcccaaggaagatgtacgtacctcttgaaggaagtcgatcaaatgttgtacaaacatcatgggctctaatggctctaattcatgctgagcaggctgagagagatccaactccccttcatcatgcagcaaagttactcattaattctcagttagaagatggcgattggccccaacaagaaactcttggagtatacttgagaaattgcttggttcattactcattctatagaaatatttttccaatgtgggctttggctgaataccgcacaaatgttttattgccttcctttactatttaagttgaaaaattgtgagctcaaaaagataatgtcataccaataaaagtctagaaaaaaaaaagttggtaatgaagtttaataggcttattcatattcccatacttttgtaattttgaaacaaatatttcgtatacattgtcagggactccaaaatttatcatacat

SEQ ID NO: 26253 - DNA, 464 bp, Glycine max
ggtgcccaaacttttgcaaactcagaatccttggtgtgtttgctgaaaaagcaaagagaatcaaacaaatattacggagcaatttgtgcatccccggctttagttttggagccccatggcttgctgaagggcaaaaaggccactgcctttcctgtaatgtgcgacaagttatcagatcagagtgaagtagaaaacagggtggtggttgatggcaatcttattaccagcagaggcccaggaacctccattgagtttgcgttagcgattgtggagaagctgtttggacgcaagttagcactagaacttgcaaaggcagtagtgtttgcacgcccttaggatttttgaacgcgaagctttttgtaccgatgcattatagatatgtgtatggataattgagtgtatctgaaccttcttgagttgtaaaaatcacgaatatagagtgggtgctaattactttgatatct

SEQ ID NO: 26254 - DNA, 287 bp, Glycine max
ctagaatttcaggttcatcacgctagcatgtcttgtgttaacgatctcatgcttcaagatgtggttgttaagcttcccaatggaatgaggagtgaagagggtcttaaatctgcgattctgatgaggttggatcagtgacactggtgaggttattagctgtaatgtaactgtgagatgttgttgctgttcatagtagtcggtttttggtgtacgttatagataatttgtatttatcttttttgtttttttggggggtctttgtcttgcgtggtgcttgatgacggtgg

SEQ ID NO: 26255 - DNA, 272 bp, Glycine max
ctcgagccgcgcaaaagtatatgaacgaatacacctttggacaaagaaagcacgaaggcacagagagagaaacactgcgagacagagagtacgagacccccaccacccgaatttcgcaaaacttgttaaacagtatcgaaaagttaacgaaattgaaagaatttcgcgaaatggaattcgaggatcaagaggagcaggaggaggagctgtgtatgggtggcggcggagcggcgctacgacccgacccggatgcaggtcccggtagcggcgga

SEQ ID NO: 26256 - DNA, 480 bp, Glycine max
atttcagctggtgtctttgctgaaactgcatgggcaggggctgcatattatttgctattatttatgcttgctagtcatatagttgggtcgttttggtacttgttagctgttgaacgcaatgacttttgctggcaaaaggcttgtagtggcaatgggtacaataaaaatttccttgtattgtggcaaccaatacatggaaggttatagtgcctggcagaatagaagtaaagatattcttacatcacagtgctctgtagataatgataattcaccttttgactatggaattttcaaacaagccttgtcatctcgtattgtttcatctaagaagttcttctccaagtactgttactgtttatggtgggggctccaaaatttaagtacacttggccaggggcttgaaacaagcacctacactggggaggttgtcttttcaatagcactagccatagctggccttatcctatttgcacttctgat

SEQ ID NO: 26257 - DNA, 301 bp, Glycine max
aataactttgcttacgatatggttttctttgaggaattatctccaggtgatgatcacgaataggaaggaacgaggtgaactattggaagccttagtagttagcgacaaagatatcatcatcccaaattttccacagagaatacatctgttatggggagagaatgataaaatattcaatctggagcttgcgcaaaatatgatagaacaactaggggatggtacaacatttgaagccataaagaaagctggtcacatggttaacatggaacgaccccgtctcttcaacagatgtctcaagcag

SEQ ID NO: 26258 - DNA, 678 bp, Glycine max
gctttatatgctctccatctccctcggcgtcggcgtcgccgcctacggcgaggcccgcttcgacgcctggggcgtcctcctccagctcggcgccgtcgccttcgaggccacccgcctcgtcatgatccaaatcctcctcacctccaaggggatctcgcttaacccaatcacttctctctactacgtcgcgccgtgctgcctcgtgtttctctctattccgtggatctttgttgagtatcctgttttgagagacacttccagcttccacttcgatttcgtcatcttcgggaccaactccttctgtgcattcgcgctgaatctggccgtgtttcttcttgttgggaagacgtctgcgttgaccatgaatgtggccggtgttgtgaaggattggttgctgattgcgttttcgtggtcggttattaaggaaccgtgacgccgataaatttgttcggctacgggcttgcgttcctcggcgtggcgtattacaatcacccgaagctgcaggcgctcaaggccaaggaggcgcagaagaagaccgcgcaggcagatgaggaggacgggatgttgctcgaggacagagatgacaacaagaggaacgaacagcagacttaactttgatttattcgtaatcgctccctggcttattttacacagattcaagaaaggaaaaaaactaac

SEQ ID NO: 26259 - DNA, 385 bp, Glycine max
ggagtctccacttcaagttgcaccaaaaaaacaaggtcaaacccaaaaggaaaggtagggagcagtgaatttccattccatcaagggatcggaacccaacacaagaacgaggaatttaaaagtgaacactacagaaaaaaaaaatgtctaattgctctacaccctcttatatataaagatggtgattttaatctctaggccacaaaaatgaaccagatttgagaacatcccttgtattgaagaacaccctctttggatacccttttgttaaagccaagacttttctcagatttgagaagaagaagaaggtgggggaggagatagtaatagggaaaacatatgtgagagaaaaataaagcacaaacgtgaggccgttgttgaaaca

SEQ ID NO: 26260 - DNA, 560 bp, Glycine max
ctcgagccgaatcggctcgaggaatcctataccttgcgcggtggaccgagttgacggtgataacctcctcccttctcctccgccagatctcatcctcgccgccgccgccgccgccgccgctgccgccgaatttctcctcgtcgttttgtctccacctctcactctcgctgaagcttattaaggaccgacagcatgtgccggcaaaattctccggtacaccatgccggtgaagaagaaattgcagctgatgagagtcttttaatttattgcaagcctgttgaactgtacaatattctctaccgccgcgctcttcaaaatccttcttctcttaggagatgtttgcgttataaaataagagcaagccgtaaaaggaggttgagagcaggaattgtgattttcaattatagggaccgctacaacattcttcggaagactgaagtgaccgaagacttttcttgtccgttttgcttgatgcagtgtggaaactttaagggtttgcgatttcatctttgttcatcacatgatctattcaactttgagttctgggttactgaagatta

SEQ ID NO: 26261 - DNA, 471 bp, Glycine max
cttttagggctcaattcaaccgtttcattaatgattgctggcagtgtataaaaagagttgggctaggaatttcgatgggccatttttgttttgcgaagaagcctaggtctattcttaccttgcgcggtggaccgagttgacggtgataagctcctcccttctcctccgccagatctcatcgtcgccgtcgccgaatttctccttggcgttttgtctccgcctctcactctcgttgaagcttattaagtaccgatagcatgtgccggcaaaattctccggtacaccatgccggtgaagaagaaattgcagctgatgagagccttttgatttattggcagcctggtgaactttacaatattctctaccgccgtgctcttcaaaatccttcttttcttaggagatgtttgcgttataaaataagagcaagccgtaaaaggaggttgagagcaggaattgtgattttcaattata

SEQ ID NO: 26262 - DNA, 256 bp, Glycine max
gcaaaattctccggtacaccatgccggtgaagaagaaattgcagctgatgagagccttttgatttattgcaagcctgttgaactttacaatattctctaccgccgtgctcttcaaaatgttgagagcaggaattgtgattttcaattatagggaccgctacaacattcttcgaaagactgaagtgaccgaagacttttcttgtccgttttgcttgatgcagtgtggaaactttaagggcttgcgatttcatctttg

SEQ ID NO: 26263 - DNA, 251 bp, Glycine max
cctgattgttccaacgttcatgcgatttcctgttttgagcactgcttcgagcaatttcaagaagaacctgcttgaccttagttccttgcacgcttcctggtgtcacaaaaaccacaatgtggtaaatgaaaaaaagagttctagcaatacactctctgacacaagaaattattgtttagtctggatcaaaattcatgtagtacataacgagtttttcgatttacgaaaagagttaataaaactcacataaa

SEQ ID NO: 26264 - DNA, 283 bp, Glycine max
cttatgatctggttggcaagaccttgatatggttgtgacaattagactggtaaaatatagaggctaattgaccatttttggatcatttttgcaaacataaataccaatatgggcttgccataaaactatttactggcatggatctcttctgaccattgaccgggtcaaaatgttagtttgacttgtgatcaatgttgtcaatggcggatgacgtagcggaaaatggcggatgtcatggcggacaaaaaataaatatacatatatataattataaataaccaag

SEQ ID NO: 26265 - DNA, 422 bp, Glycine max
gtccccgtctcatcgatgatttctcttacgtgctctatttgtctatttaggatcaccccttcaaagaaagtttctggcttttcttcgtagctcctaaaagttattaaagtaaaagcacaatattatatataatcttggtacgcgttaagccttgcccttttttttttctttcttcttttgtttcaatgaatggttttcgtttgaattgaaaacctgcaaagaaagcatcgattttgaatggaggaagggtaccccagaagcaagttcaagaccgtgtgtgtcttctgtggcagcaacagtggcaaccgacaagtcttcggtgacgctgcgattcaattgggcaatgaactgtgtaataggaacatagacttggtgtatggtgggggcagtgttgggctgataggcttaatatctcatagagt

SEQ ID NO: 26266 - DNA, 561 bp, Glycine max
aataataataaatatcagcattatcagtgatgggcgatgcttcattttctgcagtgatacctgaggcaaactcccctttctagtttctacataaacccaagtaccttcaatggatctggagggaatggctaaaatctccatcttgttggtggggctttggctactagttaactggtcagggttgttggatgcaaaaaacatgaagtacaagaaccctaaacactcaactgatactcgggttgaggatcttgttagcaggatgactcttgaggagaaaattggccaaatgttgcaggttgagcgcaagtatgtatctgctgatttacttaagaagtattttattggggctgtattgagtgagggagggagtattccagctccacaggcttctgctgaaacctggattgacatggtgaatgaatttcagaagggtgccttatcaacccggctcggaattccaatgttttatgggattgatgccgttcatggccacaacacggttcacaacgcaactatttttcctcacaatattggccttggagctaccagggaccctgaact

SEQ ID NO: 26267 - DNA, 826 bp, Glycine max
tgctggctttctgttagccttaatgaagagtgtgtagtgtactgtgtacctattagtttctgcgctagagatttgggttgcgtgttcttcattagtgaagggttaatttgatgcatttgagttatgtgcaaagtggacttaagtttttatggacattgacttttacatattctgttgaatttgtctcaggcccttcaatggatctggagggaatggctaaaatctccatcttgttggtggggctatggctactagttaactggtcagggttgttggatgcaaaatacatgaagtacaagaaccctaaactgtcaattgatactcgggttgaggatcttgttaagaggatgactcttgaggagaaaattggccaaatgttgcaggttgagcgcaagtatgtgcctgctgatttgcttaagaagtattttattggtaatcaccagacccttttctttgtttgtggttatgtttactcaattggctaataatggaaattattttttcttctgagtagggagtgtattgagtgagggagggagtattccggctccacaggcttctgctgaaacctggattgatatggtgaatgaatttcagaagggtgctttatcaacccggctcggaattccaatgttttatgggattgatgccgttcatggacacaacacgattcacaatgctactatttttcctcacaatattggccttggagctaccaggtatattgataatttgatatcaataatgttttgtgtcgtaaggtgtgtgagatgagatggctgaaaaggaagagagcaattggaagagaagaaaaatgttaagagag

SEQ ID NO: 26268 - DNA, 447 bp, Glycine max
ttccatgcgtccgcccacgcgtccggcagcaactccggagcagttaacggaagagaattccctcttcctcgctgcccctgcccctcctcaaattcaaatgccccttcccttgatctctggtcacaaatcgttgccgctgaaacgccccgccccgaacgaatcgacgtcgtttaccggagaagacaccctcgcaatcctcaaaaccacgccaactcaaagcctcccgattctgctataccgcgcccgcctcggcagagtttggccgatccaaacaagcgagtcagttggaaccgttctctttccacccgagggaggacaagtatagccgttggggcttttatggtataccagcctcagttgaagaaggacaaaaggaaaggaaaacccgctcttcccaaaggaaaggttgtgcaacctccaaacgttgacaaggagaggatatacttt

SEQ ID NO: 26269 - DNA, 474 bp, Glycine max
ctttcacagtaccctagcaacacttactcgccattggggatggagccaactgggccagatagttttgtgaagaaaggtgaaaattcagctgcaaaggtctcagaactgagtttagaaaagggggaagaagtagctaaggcatctcatgaatctctggtttctgatgccaaatgggtatgtgaaagccccaaagctggcgtctcttcaacagcttcaggatggccttcctttaatgacatcaaagcacctcctctcacttattctctatctgcagaagagaaagcaactgtggcagtgctgcaattgcagcacagagcattagacgcttgccagaagttcttagttggggatgctggttctgacagtgacgaagatgatgaggaggcggaggatgaagatgagctggtagataatgattctgaagaatctgaggagtataagttctttgacaaagtgtttgcagaagatggtgac

SEQ ID NO: 26270 - DNA, 495 bp, Glycine max
atcattagctcctctgtccccacgatatttctcccctctttcactaggtcctttgtttccttgaaagccttttattgttgtaagttcccttaaattttttttagtgccaaactcttagagcatcatttccttgctttttaagcattgccaccagtttcaaagcacccttctgcgctcctctcttactgctacacatctcaagcatccgtagtttccgtcttcccaatggctgcaactgcacctgcaacagaaacaagagttgaaattaaagaacctcctacagaagaacttttagaacctctcatgtgcaagagctgtgtgttgaaagtctccattcattgtcaaggctgcacaaggaaagttaaaaaaatcctacagagcatagacggtgtttattgcacatcaatagatttgaggcaacagaaggttatagtaaagggaaacgtagacagcgacactttgattaagaaactaacagagacagggaaacgcgct

SEQ ID NO: 26271 - DNA, 855 bp, Glycine max
cgaatagccactttgcgcaccacgatgaggtgatgcttctgggacacgacgataagtatttgccagataggggcatgcaggttacaatcgcgtttaatcacttcggtgagggtctggtgcagcgtatgccacgatgcaggctcggttacatccacgtcgttaataatgacttcacgcagtggaagatgtatgctatcggcggtacgctaaccccaccatcaacagccagggtaaccgttacaccgctcccgcagaccctgatgccaaggaggtgacgaagcgcgtggacacagacgatagagagtggagtggttcgaattggaggacggcaggggacataatggtaaatggcgcgttctttgtaccctcgggtgctgcggggcagagtggccagtaccaagaggccaccagtgtgcaagccaaatccgccgtgcaaattgaccagctcactatgtactccggtgtcttgggtgatcccagggataatggggatttatatcccggcttcaacggcggtgggaccgtgaccggagccaccagcaaaggcaacactgacgggtccagcagtgacgatgggggggacttcttcgggatgatattcagaggcggcagcagcagccgcgcagcgccaccatcaccttcttcgtacattgatttgttttaacacttttggctatttaataattttattttggacactaccaccaaccatgccattctattatcattactatgatcacacaatttgggagtgggaaaagaaaacaactaacttccttgatgcccatataaattatcaaaagcaaaagaatgatcaaagtttctaaatacttgtttttacatttagaagctagg

SEQ ID NO: 26272 - DNA, 257 bp, Glycine max
caaatccgccgtgcaaattgaccagctcactatgtactccggtgtcttgggtgatcccagggataatggggatttatatcccggcttcaacggcggtgggaccgtgaccggagccaccagcaaaggcaacactgacgggtccagcagtgacgatgggggggacttcttcgggatgatattcagaggtggcagcagcagcagcagcagcagccaagcagcgccaccatcgtccgttctatttgttcaatctttttgtc

SEQ ID NO: 26273 - DNA, 486 bp, Glycine max
acaaaaagtatggcaatgtagttgaagtgtttgagaagatgagagtggtgggatattttcctgattctgatgttattgctcttgtgttgaatgcttttggaaagttgcgtgaatttgataaagcagatgctttatatagacagatgcatgaagaagggtgtgtttttccagatgaagttcatttccagatgctgagtctatatggtgcaagaaaagatttcgtgatggtagagtcattgtttgagaagctggattccaatcctaatatcaacaagaaagagttgcatcttgttgttgctagcatttatgagagagcagatagacttaatgatgcttcccgaataatgaataggatgaatcaaaaagcaaacagaagtcattatcatgcttagcagtgtgcatctgcctttttccctgtgtaacttgttgatgaacattctttagccctgtaatcagaaaacctctcattcccaactgagtgtcatg

SEQ ID NO: 26274 - DNA, 1161 bp, Glycine max
ggcaccaacaacatgttgatgattcaaaacagaaaaaaaatgaggttttttacagtgaaagtagctctgtgctgtgtggtggttatgctactaaccctctcagatgcacagctagataactctttttacaaggacacgtgtccaagagtgcattctattgtgcgtgaagttgtcagaaatgtttccaaatctgatccccgcattcttgccagtctcataaggctccactttcatgattgtttcgttcaagggtgtgatgcatcaattctgttgaacgacacagctacgatcgtgagcgagcaaagtgcaccaccaaataacaactcaataagaggtttggatgttgtgaaccagatcaaaaccgcggtggaaaatgcttgcccaggcatagtttcttgcgctgatatccttgctcttgcagctgagatatcttctgttctggctcatggccctgactggaaagttccactaggaagaagagatagtttaaattcaagtttttctcttgctcttcaaaatcttccgggtttcaatttcacccttgatcaactcaaatctacatttgatagacaaggcctcaatacgactgatctagttgctttgtcaggtgctcatacaattggtagatctcaatgtagattttttgctcaccgaatatacaatttcagtggcaatggcaacagtgacccaactctcaacactaccctctcacaagcactacgagcaatatgtcccaatggtggacctggaaccaatctcaccaatttggacttaactactcctgatagatttgactccaactactactcaaatcttcaacttcaaaatggcttgcttcggagtgatcaagtgttattttctacaagtggtgcagagaccattgccattgtcaatagtttcggtagtaatcaaactcttttctatgaacattttaaggtgtcaatgataaaaatgagcatcattgaagtgctaacggggtcacaaggagaaattcgaaaacattgtaactttgtcaatggggattcttctaatctggctactctagccaccaaaaaatcttcagaggatatcttttgttaactcatctagattgagctcaccataccatcctaatgcaaaaatgaaaggtcattaataaaggggttatatagggagatacat

SEQ ID NO: 26275 - DNA, 281 bp, Glycine max
ggaaagatggggatgccctgaaaacattgagtttatctcgaaaatttagcttgccttcattaaatgatgagggtttaagaaaggctatatttggtggagaaagtgcagcattttctgatagtgaaggaacgaactatacttttggctttctctttggtgaatctgaataccttcgctcacaggatgacagaacgctgttagaaatgttgtttgcttttcccactattttgccttcatttcaggatgatcttcctgtgtcagagctcttgccttttcagaga

SEQ ID NO: 26276 - DNA, 502 bp, Glycine max
gcaaagaaggcgaagaagaaatgggttccaaggcgaagaagaagggttcaccggaggacattctggaaaccctaggagacttcacgagcaaagagaactgggacaacttcttcaccctccgcggcgattccttcgagtggtacgccgaatggccccatctcagggacccactcctctccctcctcaaaaccatccctctccctctcccgcttcagctcctcgtccccggctgcggcaactcccgcctctccgagcacctctacgacgccggccacaccgccatcaccaacatcgacttctccaaggtcgtcatcggagacatgctccgccgcaacgtccgcgaccgccccctcatgcgatggcgcgttatggacatgaccgtcatgcagttcgaggacgagagcttcggtgcggtcattgacaaaggtggactcgatgctttgatggagcccgagcttggccccacattgtggaaccagtacctatcagaggtgaagagagt

SEQ ID NO: 26277 - DNA, 439 bp, Glycine max
gcctcaagttagtaacccttcctctcttcttcttcttattctgtttcaaaaaccattttttattattttccggatggcgtccggtactgtgaaaccttcttctcggtaccgttcctacgattcacgctcctccacttcctctcatttctccgacccttcctcctcccatgaattcaacaatctcaaaaccaaaacctcttcttcttcttctcgcgctctcgtcaaggccaaaccctcaaacaccgccaaggtggaccccaccttcaccaccatggtcaagaagttcatggacaggaaacccaaatcctcctcctcggccgccgccaccgccaccaggttgattattccctccgattttctcgcgaaggatttgaagaaggacgcgaagaaagtggcggggttctccgcgctgcagaagaagctcttcggaaagggcgct

SEQ ID NO: 26278 - DNA, 298 bp, Glycine max
ggcatatatagagaagtagtactacactcacaacacataacccacttaagcataggagatagagaagagctagagagaaagcttagctagatagcagaaaattttaaaatggaatggaggtcatattatctggatatggtgcttgtaccattagcatatatggtaactgttgcttatcatgtttggttgtggcataaaactcgtacagagcctttttccaccaccatcggaatcaatgctcatgcacgacgcttctgggtgcctgccatgttgaaggacattgaaaagaagaacattt

SEQ ID NO: 26279 - DNA, 431 bp, Glycine max
gaagaaaaaaagaaaagaaaaggttgggtttttttatgccttattttttacctataaaagttttcttactttttcccctttggggtcccccaagggccaatatcctgtaaggccccggcattattttcatttacatttgggcatagggggcgctttgtcaagttgcaatttgtatcatctgcggcatttgatgaagtgatgtttacttagatgaaacaagggcagcttaatctttttgtacacccttgtttcatactcgttcaatctatagtttatatcttatctcattcttatatgttttgtatgatagtaacacccctaaaagctgtggaaccggttcttgctaaaatcccatttcaaatgtggattttattatatggttattaccgaataatgtcccatacatgtgataagttatggtaataatattg

SEQ ID NO: 26280 - DNA, 331 bp, Glycine max
tgcactttctttacaaaagcagagaaaccatagcggtttcttctataagaatccattgcttaagcttaaattcagcattacccctcaagaatcaagatgcatcatttggccattctctttcaacaacactagtcacaagatcattctattcactcccaaataccagatctttatgtttgctttggaatcccaattccaataacaaactctctctctctctctctctctcttcaaccattacgaggtttaacaattcgaattctagttctgaatatacatctgttttaaatacttcaaggagagctttaaaatcttcagaatttgcaattgc

SEQ ID NO: 26281 - DNA, 314 bp, Glycine max
gtgactaaggagggtgactgtgtgagtggagtgttcatacttgtattgtattggcaacaaaacaacacttgtgcacagtgagcaaccctcttgttcttcatcaacaatgctccaaacaacctgcattatactcttctctgttgtggccatatttttgcctcatggaacagcaatgctcaacctcactctcccaggacaacacccagaccctgaagccgttgctcgagaagttcataggaaagtgaatgcttcaatggcaagcagggaacatcatggagcgacagagaaagaggatgcaacacgtctatcaggga

SEQ ID NO: 26282 - DNA, 330 bp, Glycine max
gaatgatcttcattcacagatgcctccagaatttggcctccttcagaacctggcagttttggatcttcgcaatagtgccttgcacggttcaattccagcagatatatgtgcctcaggcaatttagctgtcctccaacttgatggaaattcatttgaagggaatattccgtccgagattggaaattgtagctctctttacttgctgagtttgtctcacaataatttgactggctcaattccaaagtccatgtcaaagctaaacaagctcaaaatcctcaagctggaattcaatgaactaagtggagagataccaatggagcttggaatgct

SEQ ID NO: 26283 - DNA, 518 bp, Glycine max
aaacacacagcattggcgtccatggtctccatttccatttccctccaaaaacaaatttcctgtctctcgctctgactctcttgcctctcccctttaaccttctccgccgcgatgaaattcaaggccttcgtgaccgacaacggcgtgcagctcctggagaggcggttcctcccggccctggacagaacgggaaaatcgtgccacctcttcctcacgcgcgaccacgccttgttcctccacctcctcaacggcgacggcggccagtgccttgcgcagttccgcaaggaggcgctcttccacgactaccgcatatccagccagaacgacgaccgcatcgccttcgctctcgacctctccctcctcctccgcgccctccgcagcgccgtcgccgtcgcctcctccgcctccgcttcctccgcccccacgcgcctcgagatcaagctcgtcaagaaacttccccctaattccacccagcccatgccctacctcacattggaaactcgcgggtataagtctgc

SEQ ID NO: 26284 - DNA, 389 bp, Glycine max
gttgtgtgacacgataatctcggaaccctatcacacattgacacagtggcatcttgttccttccttgtgatgtgtgtagggaagcgaagaagagaagagtagatggtgggtgaaacggcggcaacggggaagtcggttggtttgggtttgggatgtgacccagtggtgggatccttggcttgttcgaagaagagagaatacagagtcaccaatcgccttcaagagggaaagcgccctctatacgccgtcattttcaacttcatcgactcccgctacttcaacgttttcgccactgttggcggcaatagggttactgtttatcaatgtctcgaaggaggagttattgctgttttgcaatcttatgtagacgaagataaggatgagtcttt

SEQ ID NO: 26285 - DNA, 352 bp, Glycine max
acgtgtcatgtgcctctctccttttcccccaaaatctgcttcagtccacgctcacgattcgctacctgcgcctattcattgtctcttctcttcccctgctcaacgtttttcttctcccttcccccacccacctccactcttttcatttctattctcttcccaaacagaacgaccatcggaacaaacggcattttgtcacacagttacgaggggacaaaacaaaacaatgagcagcgttttgcaagggaaacgcaagcgccaggacttggcttcaaggctctcggcctcaatgaataatgaggagggtcgtgtctacaacatcattcgcgggaggaaggagatggggatatgg

SEQ ID NO: 26286 - DNA, 542 bp, Glycine max
ggaaaatttgaccatattgttattgagactacaggtttggcaaatcctgcaccaataatccagaccttttatgcagaggaaaatatttttaatgatgtcaaattggatggtgttgttactctggttgatgcgaagcatgctggttttcatcttgatgaggttaagccaaaaggtgtggtcaatgaggctgtggaacagattgcatatgcggatcgtataattgtaaataagactgacctagttggtgaatcagacattgcttctttggtccagcggataaggaaaataaacagcttggccaacttaaagcggacagagtatggaaaagttaacttggattatgttcttggcattgggggctttgatttggagaggattgagaatgccattaatgatgaaagtgcataagaagatcatgaccacagccatgaccatgagcatgagcaccatgaccatgatcatcaccaccatgaccatgatcattcccatgaccacaagcatgaacaccatgatcatcactctcatgatcatagtcacgatcc

SEQ ID NO: 26287 - DNA, 485 bp, Glycine max
ttgttcacgcgtccgcccacgcgtccgctacgagtgagtgcttctaaaaagcatttccatcttcaatttgggcactgaactgttaacaaaggcaaacttcaattggaaaataacttataacttgggcctcgaagcccgggaagtgttattgcatcgttgtgctgccacgaaatgagttggaagtgaaagcagaagacacaacccacactataccatgccttctgctccttccaaactctacgcagatgacgtgagcctcctcgttgtgacgctagacaccaaccctttcttctggagcacttttcccttccccttcgccgagttcctctctcaagtactcgcttttctcaacacgatcttgctcctaggccagctcaaccaggtcatcgtcatcgccaccggatgcaactcttgcggctacgtttacgattccacttccgacaagaaccatggctccaccactggtacaatgcccgcgctttatt

SEQ ID NO: 26288 - DNA, 278 bp, Glycine max
cctagctgcaccacatccaccacaaattgaagggttgcaagtattgtagctgatcaaatactatacttctgatggcatttcctaattccaaaatgtaccatggttgctaataggaacctgattacttggaacacaaagagtggtttgttaaattctgggtcagcatggctgcccagacaattgctgagactgcccagaaaattctcacccctgaaacccttcgctatgctgccaaacaatctgcacgttgccttgttgtccctgtccgtctccgccgt

SEQ ID NO: 26289 - DNA, 271 bp, Glycine max
catgaagcagagtcttctcagttatgcagaacgtggacacagttaattgtaccagcaaggcaatcgatgacgatgatgatctgttttgagatttaatatgcacaatgaaatgtgtaacaacttaccgtttaagaagatgggaatcggaaattatcatacatttgtcagttataacttataagtcatcaattccgtatcagttccaaggaaaatactcactttgttaaaatatatttaattattttcgtcagagcaggatcccaagtacatt

SEQ ID NO: 26290 - DNA, 415 bp, Glycine max
cactcgagccgattcggctcgagcgccaacatcgaccgcaacttaactccactcccatcccaatgggttgtcgttgcgacgaagacgacggtgacattttcaggcacctcatgaattccaatttcccctcatcttcctccacctccgccaccaccaccaccactcttcttgcaccgtgatttcaccgatgaattctcatttctcggcgctctcctccaccgacatcctccgcctcatcttcgacaaccttccaatcgccgatctcgcacgtgccagctgcgtgtgccgtctctggtgctccgtggcctcccagagggacatggtaactagagccttcgtggcaccttggaaactgaacgacgtcgtcggcaacccactctctggaagcttctggagagacaactccctcgccaat

SEQ ID NO: 26291 - DNA, 693 bp, Glycine max
caaagctcagacccaaacctttcttttgctcttcatccattccacaccaaaaagtaacactttcagtttcggagggaaacacaacacaaaaagccccctccccccaaagcaaatcacctttttttctttcagttattcaaaaaatgttcgccgaagagaatggactcaagggagaccccagactccaagccatttcccaagccatcagagtcgtccctcacttccccaaacatggaataatgttccaagacataacgacattgctgttggatcacaaggcgtttaaagacaccgtcgacatttttgtcgatcgttacagagacatgcacatttccgtagttgctggaattgaggcaagggggttcatgtttggtccctcaattgcgttgggcattggtgcaaagtttgttcctttacgcaaaccacggaagctgccaggtgaagtaatttcagaaaaatatgctctagaatatggaactgattgcttggagttgcatgttggtgctgcccagcccggtgaacgggccataataattgatgacttggtggccacaggtggaactctgtcagcaggagtaaaacttctagaacgtgttggggctgaagtggtggaatgtgcttgtgtcattggtgtgcctgatgtcaaggggcagtgcaggagtattggaaagccactttatgttcttgttgagc

SEQ ID NO: 26292 - DNA, 270 bp, Glycine max
gagagttggaatctggtgaaagtcagccactgttcacaccaacggacattattcgacggtgacgatggaaccggcgtcgtccgcgtcctcatcggagcaccaccgaaggctacgggcggtggagcaagtgcgacttcttccccgagaagtcattcgcgaacgggaaatcctaccgcgcagcctggccgccacgtgtccgcgcctcaaggaccggctcctgaaccggtcgagcgacgcgcacgagctcctggtgctcccacgcaccagcga

SEQ ID NO: 26293 - DNA, 278 bp, Glycine max
agcaccaaacctcactaatccaatccaacttaaccctcctcatattttccattctccttcgcttcgtagctaattaacgttgtcgtcacaaagaataaagcatttagttcaggtaattgaacatagtatataagttgttgtaaacttcatatctgactttgatccttacggattaaaagaagaaaaaaaagtgatcacagagagagaggcacgatggtgaacctggtggcagcacagaggccattgttacatggcctcatgaagatggcaggggtgag

SEQ ID NO: 26294 - DNA, 301 bp, Glycine max
gcccaacacagtggcctttgcgccactttaaggagctacttgaagagcttgtagccattgctagggtaagcaaagggaagcaacggttcaacattgatctcacaccatttcgtgaataaaaaaaatggtgatggttttcagttattctgaatgtaatttctttaccatcggtcttttaagattgttcaagggtgaatgcaaaactgtctcctctcacaagttccttataaggagagtttatcttaaaaatattattgatgatcaatgcatgttactctgaagtggtaacactataccaact

SEQ ID NO: 26295 - DNA, 286 bp, Glycine max
ccaattttcttccacaggttggcatacccatgacggcttttcccccaacccactactcagacatctcatctaccaactcaccataacactatttcccttcaactcattcattctcttcagattatacaagcgatagttcttctccattatcactttcatgtcagttagacgtgcttgaggtggcaagtcctttttagcaggctcctcctcacctatatctttcttcggtgtggactttggacccaactgtcaaagctagcatatactttattagaggttagagacc

SEQ ID NO: 26296 - DNA, 439 bp, Glycine max
gaagatcggaaatggcataatcaaggggatgcaatgcaaaggaactattatatgcaaagaccaatcatggcataccctccatatcattcacatcacaccctttctccagctcctatatatcctatgtggggacaacctggcagtcaaacagccggtgtacagatttggggccatcctggttatcccatgtggcatcctacagaaagttggcactggaagccttatccgggggtatctattcggacggaattcttgatgcagtttgctttgtggtctgttaggtagaaattgtagatgcagtttaatttttactaacttgatgtctcaggtgcatgtggatgcttggggatgcccgttggtgccacctcctcaagctccttgttttccctacaatgcaaatacagctggattgcacaatcctagagcagttgactataga

SEQ ID NO: 26297 - DNA, 383 bp, Glycine max
ctttgtttctattctcccatctctgtacgttctctcccgtcaacgttggctttctctctctcctcggattttgaaatagaaaagatgacgccggagaatgggaaagagaagaaggattttgatgcagaagcagcagggatgaagagatacaggaatggtgaaatctgggagtttgaggatgacatgggtgtctcagatggtgatggtactggtgtcttgttgggcttggatggtggaaccacctccactgtctgcatttgcatgcccatgattcccttttctcactctcagctccaatctctccctatccttgcaagggctgttgctggatgctccaatcacaatagtgttggagaaattgctgcaagggaaacgatagagca

SEQ ID NO: 26298 - DNA, 293 bp, Glycine max
cgtttctgaaatcgaattcgaaagtagcagccatggaagcgatactcgtggattgtgtgcagaagagtcttcggcatttcatgcacgccaacgccatcttcctctgccagcgtctctgcgccgagttccccaccgagacaagtctccaattgttggctggacgtcacctgcagaataatcaagcttattgtgcgtatcatatcttaaagggagcgcaaatggctcgatctcggtacttgtttgcaatatcatgctttcagatgggtcttcttagtgaagctgaagcagcactg

SEQ ID NO: 26299 - DNA, 335 bp, Glycine max
gggctctgatacttgccatggagatacgttccgcagaacctccaatgatgaagctattaaaagaagcagcagaagaaggactggttagttccagccaaatggtgaaacggttttctcgtttggcagaatccctagatgatcttgctcttgatattccatcagctaaggcattgtttcagtcatttgtccccaaggcaatatctgaaggatggcttgatgcttcacttaccaaacctgcaactgaagatggggaaatccaagatcatgagaaggtgaggtcgtacaaaaaggaatctgtaactataattcatgagtattttccttctgatgacatt

SEQ ID NO: 26300 - DNA, 606 bp, Glycine max
ctcgagccgctctggagcttatagactcaacgttaaatggattgtgttctcagaatgaagttttcagatgtattcatattggcctcttgtgtgtacaagatcaagcagcggatagacctacaatggtagatattgtttcatttctatcaaatgatacaatccaacttccccaaccaatgcagccagcatacttcatcaatgaggttgtggaagagtcagagcttccttacaaccagcaagaatttcattccgaaaatgacgtaacaatttctagtacgcgtgcaagataattggacaattgtgtacaccaaatttcactttttaatactgcatcactctggcggtgggagttcttggtattattgtttgtgccaattttacttcttttagataactgaccattttagttagtaataataaatatatctggaacgttttattttcaaaattttggtctattttttttttttgttcggtggaaaaataacaagaagatcacccatgaggccatgactatcattcagaaggagataatccagaggtgtgggaaaatcatccgaaatacaatacaaatacaaggagaataaaaaagggtcacaggttgtg

SEQ ID NO: 26301 - DNA, 272 bp, Glycine max
ccctcgagccgattcggctcgagcgctcttcctcctctccctctgcctcgtctctcgccggaaccgccgccgctccggcgccacgccccggctacaaggtcgccggagacgccgacgcggcgaaggacatccacacgatcgtgcaccctcccgggccccacatgctccggccgccggccccggagatccacgtggagatggggaagaagacggagcaccccgtggtggtgcagtgcgatagggtttcaagtgaggagagtaaggtcacggtg

SEQ ID NO: 26302 - DNA, 462 bp, Glycine max
gggaggtgattgaacataatgaacgaaaatcgagagtaaaaggcgaaggagcggtgggagcgatgcgcatggttgttaacgacgcattcctcccattaactaaatggctatgtctttacctcttcgttttcattcctcatctttctctctcacttctcttggggttgtgagaaaagtgctagggagtcttataacagatattgttcaaccaaggagtggacattcgcacttagcaaaaagaggtggaagactcatatcgtttaagggtcgtgcgaggctggtacatacaacgtgccgaatctctgtccctgggaccttaccaagaactgatgaaaaggcctcatctaacatctcgagggataagaagacagttccagaagcagatcctccgagtatcaaagatgttcagcttttgtatgaatttttggaccggagtaccaagctcacagtattgactggagc

SEQ ID NO: 26303 - DNA, 473 bp, Glycine max
cggggagggggttgaacataatgaaccaaaatccagagtaaaaggcgaacagcggtgggagcgatgcgcatcatggttgctcccataaactaaatggctatgtctttacctcttcgtttctattcctcctcgtctttctctctcacttctcttggggttgtgagaaaagtgctcgggactcttacaacagatattgttcaaccaaggagtggaaattggcacttagcaaaaagaggtggaagactcatatcgtttaagggtcgtgcgaggctggtacatacaacgtgccgaatctctgtccctgggaccttaccaagaactgatgaaaaggcctcatctaacatctcgagggataagaagacagttccagaagcagatcctccgagtatcaaagacgttcagcttttgtatgaatttttggaccggagtaccaagctcacggtatgtgactgcagctggaatcagtacagagt

SEQ ID NO: 26304 - DNA, 429 bp, Glycine max
ttggtgtcaatcttggaaagaacaagacaagtgaagatgctgcgtcagattatgttcaaggagttcatacattgtcccaatatgctgattacttggtgattaatgtttcatcacccaatacccctggtttgcgcatgcttcaagaagaaagcaattgaaggatcttgtgaagaaggttcaagctgctcgtgatgaaatgcaatggggtgaggagggcccacctccattgctggtaaaaattgctccagatttgtcagaagaagaccttgaagatattgctgcagtcgccttggctcttcacttggatggactgattatatcgaacacacccatttcaagaccagatcctaccagttggaatccattggcttcagaaactggttgcttgagtcggaagcctctcttcaatctcgccaccaacatcttgca

SEQ ID NO: 26305 - DNA, 289 bp, Glycine max
gtagagaaccttcgtgtgaggtaactatacttatagctaaaatccacacgacttcttccatctcttcccgtctttctctctttctctctctccctcgatctaattcctcatgttatggcttgtaggtcaacagtaacaataccatgacccctttttgaatcctccatattcattccaatatggcttgtctttctttagggtttggatttggaggcttgtggtcaactaagaaggcaccaactgttttaatttttgtgtactaagagcctgtttttgtttttctgtagag

SEQ ID NO: 26306 - DNA, 437 bp, Glycine max
cagctatctagcttgttctcttttatttccggtcggttcaccggcggcatggggaactgcaacgcgtgcgtgagagttgatgacgtggcggactcaaaccgcggcaaaaacaagaataataagaaaaccaaaccgaacccgtacgcggaggaggagatacgctccggcgttccaatccgcgtcctgaaggacgtaacgtcacggagcctcatcggcgacaagtacgtgataggccgggagctaggtcgcggtgagttcgggataacgtacctctgcacggaccgcgagacgaagcaggaactcgcgtgcaagtcgatctcgaagcggaagctgaggaccgcgatcgacgtggaggacgtgcggcgcgaggtggcgatcatgtccaccttaccggagcacgctaacgtggtgaagctgaaggcgacttacgaggacga

SEQ ID NO: 26307 - DNA, 285 bp, Glycine max
ttttgcatttaagttaagggagtcagaaattcgaggttttgatctctctgtgatggatggagttgaagcagggctgggactggttgaactaagataagggggtgtgctttgagtaccaacatctcttgtgattccctctttcttcttttctggattgggaaattgaagagccacttcttcttgtatgtaagttgctggctttgttggaatgtgctttgaggaataaactagaggagcagacatggcaattctgtttattgagtttctaaaagatcttccactaag

SEQ ID NO: 26308 - DNA, 476 bp, Glycine max
tcctttctcctcttttgatgtcttaggaaccatccaatctgaatttgtgtattcattgcgtgattgattttccttcttccttcttcttcttcctgtgtgtgcgtgtggcggagaatagtgatcgatcgttgttaatggcataccaagcgatgcagggtccgagttcgggatcgagttcgagttcggggtttcagttattgaattctccgttcggagacaccacctacaccaaagtcttcgtcggaggattggcctgggagactcagagcgaaaccatgcgccgctacttcgaccagttcggcgagattctcgaggccgtcgtcatcaccgataagaacaccggaagatccaagggctacggtttcggtataggtgactttccgggatcccgaggccgcaaggaagagcgtgtgctgatccatctcctgttattgatggcagaagggccaattgtaatttggcttcacttggtcgac

SEQ ID NO: 26309 - DNA, 834 bp, Glycine max
gagcaacatcagaacagttgcagcattcaatgctcagaacaagatgttatcagtgttctgccacgagcttcgtgtgcctcagagccagagcctgcgccggagcctgacatccggcttcttgttcggtctctctcagcttgccctctatgcctccgaggctctcattctatggtatggtgcacatttggtcagcaaaggtgtttcaaccttctccaaagtcatcaaggtgtttgtggtcttagtgatcacagcaaattcggtggccgaaaccgtgagccttgcaccggagattatccgtggtggcgaactgttggttcagtgttctcaatccttgatcgctcaaccagaattgaccctgatgatcctgatgctgatccggttgaatcgcttcgcggggagattgagctcagacatgttgattttgcgtacccttctaggcctgatgtgatggtgttcaaggatttgcaccttaggatccgtgcaggccagagtcaggcccttgtgggggcaagtggttcggggaagagttctgttattgcattgattgagagattctatgaccctattgctggaaaagtgatggtggatggaaaggacattaggaagttgaacttgaagtctttgaggcttaaaattgggttggtgcagcaagagccagcactttttgcagcaagcattttcgagaacattgcatatgggaaagaaggtgcaaccgaggctgaggtgattgaggccgcgcgtgctgcgaacgtgcacggatttgtgagtggtttgcctgaaggttacaagacaccggttggcgaaaaaggcgtccccttctcttggagggcaaag

SEQ ID NO: 26310 - DNA, 585 bp, Glycine max
cttacgcgtgggcggacgcgtgggcggacgcgtgggtttgaattcaagacttcaatcctctccttcctcttctctttctcataagccatctatagccataaacattacctttatctccaaaggctttcttgtgttcatggtaatcgaaaccaaagtacattttcttaactcatctctttaatttctctctctctctctctctctctctgctatgaagaagctctgtcccaatcttactcgcgaggatgggctcgaaacggtgctggaggttcccatccctgaggagattttcaccatcaagagtggaaccagcagagcttggcataacatgaagtcatggatgaagccaaatgttgaatcttcaagatcatcatcactctttggaggccaaaacacacatatccaactattgcttggtgttgttggagcgccattgatccctctccctgtcacctgtcacaaccaacctatcaccattagatcccataacattgaggcttcgatggcgaaatacatagtgaaacaatacgtggcggccgtgggaggagagagtggctagaattcggtggaaagcatgtatgcgat

SEQ ID NO: 26311 - DNA, 458 bp, Glycine max
cacccatggagccacacgagtcccgttgtcatccctgtattactcacacacacacaactgctatctgctctctccaaaccgtgcagcaattcctctcttccctctatccacccctcccatggcggaaccaatggctgtcgactccaatcccgaatccggtctcgacttcgagtcccctttcgcctgggggaagaagcgaggcatgggaggcaaaaagaaggacgtgcagttctacgagtcattctccttcgacggtgccgagtacgccataaacgacaccgtatgcctccagagcgggatcggcggtggcgagccccacatcgggaggctgatcaagatctgggagacccgcgacaagtccaggaaggtgaaggtgcagtggttcttccgccccgccgagatctgcaagtacttggttgggatcgaagtgaagccgaacgagttgttcctcgcgtgcg

SEQ ID NO: 26312 - DNA, 268 bp, Glycine max
gttaccactcatggcagagcttgagagtcctaatgttatgcctaagcttatatcatttctctcatctctcctcaaaagggtagctgaatctactgatcttaaccagcaacaactcctacaccaaaaggtctcagttttccatggcttgactcgccccaccatctcaattcaaagctaccttgagagaattttcaagtatgccaactgcagtccatcatgcttcattgttgcatacgtctaccttgatcgcttcactcaaaggcaaccc

SEQ ID NO: 26313 - DNA, 286 bp, Glycine max
ctttcatacacatcgaaagaaaaaagaaacaataacaactaaacaagcaccataaattttttaaaacctctcttctttcttctccatcgctgccggagaatgaacattccggcgaccctaacttccccgtcgatgaataatgctcgtctctccgaccaccgtcgccacgtcttccacgaaaacactcacctccaaaaaaccttcactcccttagcctagaagaacgaaaaaaaaaaaaacccgtacataactacgcataatcccctctttaattctttttttcttt

SEQ ID NO: 26314 - DNA, 262 bp, Glycine max
gctggatttgccatgtggtattgggatggattgtatgggaaaggaagattggatgtctcagagatgtgttctgttgcgataaagcaggttgacagattggtgagcggtgttatgcggtgaatgatggtgtttgaagacgtggaagttgagatggaagtgttctattgggttgagtcacaaatatttgggaaaggcaaatgtaatgtacaaccatttgacagccatcatcattcaaagaactccttgaccccttttttttatg

SEQ ID NO: 26315 - DNA, 483 bp, Glycine max
atcaattgtggagtgacacaaaagacatggaccacgttagagacagtgcatcaattgttgcaaagctggttggtttagtagagccagaacaagcatttaaggagatgtttggactcaactttaccccacaacctacgagtaggaaatcttttagttggacagccagtgtgaggcacattttgtgactttggattttacattttaggtagttagtttggtatggccatgtcaaaatttcccggctctatatataatgtagataattatttttctccccttatcttagaaacaaattgctttctgttgtatgcttctaactctgattgctattgattgaaaagtggtttgtaaagaatgtgcaattctaaggttgcagatttgttcatctgccctaggttgggtccaggtagaacatcatgaatggttcaatacggattgttagctggaaaaaaaatgcaatatgattttttacgtgggtgattt

SEQ ID NO: 26316 - DNA, 316 bp, Glycine max
gtgcaacaaggtctgtggaattgataggaagtttggaaagtattgataaggcagaaaaactaatgaatgctgtgattgcagaggctgatgctgggggttctccttcacttgtagctcgaggcctctcccctgctcaagctaccgtgggatctgaacaaattcagatacaagttccaactgaaaaggttggattaatcatagggagcggtggggagacaattaaaagcctgcagaccaaatccggggcacgcatccagttgatacctcaacatcttccagaaggggatgattcccaagacaggactgtccaagttac

SEQ ID NO: 26317 - DNA, 413 bp, Glycine max
cggctcgagcggctcgagtcaaagtagatttaatgtacagtttggaactttttatgttcaacggaaaagcaagacatcaggagtaactttgaactcaatctcaccttagatgaaagtcacattcaactcaaatgtaacaacgatttgccgagcatgcagttacaactttttgagggtgaacatcaatttagatggccaaacgtgaaaccaaacaccccttagttttcattcaaacatttttcttttttatgtgttttagtctttaaattttagatggcagaggttaaaatagattaaaaagcgcatgtgtaaggaataaaatgagtattatttagatgtaaagattaaaatataaggattttataagtatcaaattagtaattaaaaaaagttttaatttaatctttttaaat

SEQ ID NO: 26318 - DNA, 433 bp, Glycine max
agccagacaagttgcaactgcgaacagaacaagttcataatgccaaagtcaaagagaaatagacaaggtttgcgtttcgtttctctagttattcctttgttgctgttgttgcgtgtaatcaaaatttgaagcgaaggcgacgattttgttgacatatctgaaaaaaacgcagttacgctgtcaaagacgaagaaaaagggaagagaccacaaagagacgatagtgaacggaataaaagatgcggcagaaaagtacgggtgcgtgtacgtcttctccttcgagaatatgaggaatcagaaattaaaggagttcagggaacagttgaaatcgaatagcaggttctttctgggttctaacaaagtaatgcaagttgctttaggtcgctccgcttcagatgagatcagacctggccttcacaaggtttcaaagctat

SEQ ID NO: 26319 - DNA, 342 bp, Glycine max
ctccggagagctcgcaggttgacatcgtgtccatcgacgttgaccatgaaaacagtgtgaagaggttgaccctggacggaaaaaacaacgcgtttccgtcaccctcgccagacggtaaatggatcgtgtttcggtcgggtcgatcggggcataagaacctttacataatggacgcattgatggtgagaagaaggagcttcgaagattaacggagggtccgtggactgataccatgtgcaactggtcaccggatggagaatggatcgcttttgcgtcggaccggcatgacccgggtagtgggagcttcgagatctacctgatccacccgaacggaaccgggtt

SEQ ID NO: 26320 - DNA, 273 bp, Glycine max
caaatatttcccctctcattctccctataaatcccaatctttctacagcacctgttccttccgtgagatggcgacaaattgtacccagggggaaaaaatcctacacttgaaagaagaagaggagggggaggaggaggaagaagaagaaatagaagcattgtcactttgcgatcttcctgtcaatctggtcggccacgaagtccaatcaaaagcaaaaccagattctcgaatcattgaagcccaagaagatgattttgatttccgcttatgggg

SEQ ID NO: 26321 - DNA, 860 bp, Glycine max
caattgcaagaaaaagcaatggaagctcaatcacaccaccgactcaatgtcctttttcttccatatccgacacctggccatttacttcctatggtagacacagcaagactatttgccaagcatggtgttagtgttactattctcactacccctgctattgcttcaacattccaaaatgccatagacagtgacttcaattgtggatatcacatcagaactcaagtggttccattcccttcagcccaagttggtctcattgatggacttgaaaacatgaaagatgccactaccctagaaatgttggttaaaatcggttatggactatcaacgctccaagatgaaattgagcttcggtttcaagaccttcaaccagattgtatagtgactgatatgatgtatccttggacagtggaatcagctgaaaaactaggcattccaaggattttcttttacagctcatgctacttctccaactgtgcttctcattttatcaggaagcatagacctcatgagagcttagtctctgacagccacaagtttacaattcctggtttgcctcatagaatagagatgaccccttcgcagctagcagattggatcaggtctaagactcgtgctacagcctatttagagccaacttttgaatcagagagcagaagctatggggcactgtataatagttttcatgaacttgaaagtgagtatgagcaacttcataagaacacattggggataaaatcttggaatattggaccagtttcagcctgggttaacaaggatgatggagaaaaggccaataggggacacaaggaggaccttgcagaagagccagaattgctaaattggcttaactctaagca

SEQ ID NO: 26322 - DNA, 242 bp, Glycine max
tcacaagaccaggcagaagaaaacaaccagttgaattcctctacaccaatttggaaccattctagaaagcaaccttagttagaagaattgatggaagcttcgggtatgcgtgtcttacggtttgattttcatatttgatgactcacacacaaaaacgaacattagtaatttagtagcagtgaaggctaagaatatacgaagtacaaacacaagagatggcatgttctgtcccttttaacaac

SEQ ID NO: 26323 - DNA, 313 bp, Glycine max
cctcgagccgaatcggctcgagtctcttcccaaccttctcttccctccatttccctttcctctttcaaaaaagcatatatctatataaacttgtgatattgggagttgaaattaaacttgagaaaatggacaaccagcgtagccctcttctaagctgggcttactacttccagggaaagtcaatggaggagctgaggcagtccctgatatacacaactctggagctagaacaaacaagggatgcagtgcaagaagagctaaaaaagagggatgaacaactactcaacctaaaggacctcctaagcaaaaccat

SEQ ID NO: 26324 - DNA, 506 bp, Glycine max
ccagtttcttctcgctaagggaatctctgcggaaaggatattggaagttgagtacacaagggctgtggccccacggaaggaggaggacccttctttacatgatgattgggtcagtgctgttgatggttcttcttctcggttctttttgacgggatgttatgatggtttagggagggtgtggaaaggtgctggattatgtacccatatattggagggacatagtgacgctgtcacttctgttagtatcatcaacccaaaaggtgaggaaaccattacagtagctactgcttcgaaagaccggacattgaggttatggaagctcaatgcagaggggcctgtaaataatcctatgagggttagggcttacaaaatcttgcgtggtcataaatcttctgtaaattgtgttgcggcgcagacttctggagagatggtttgttcggcttcttgggattgcaccatcaatctatggcaaactaatgactttaatgcggaagatgacctagtgt

SEQ ID NO: 26325 - DNA, 594 bp, Glycine max
ggaaatagataatatttattacgaaacggaataccgaagagaatggtgcagcagcaagggtaaaccatcgacttgcttcctttttgccagaaaatttactcggactgctgctttaaggcttcttaatatgtctgttctgggagtgttcaattaagagaacaaaaggctctttgtcagagagactgatacaaggaagaaaaaatacacttagcaaaacaaataagaggaagaaaaggaataaagtaaaagcagttgaagagtatcggcaccatactgatatgtacaatgagttgtatatttacaaatttaagagtgcaatttgtccattttttttggagtctccaaggggcctggaaacatatgagaactcttgaattgaaatgaaaaaatagatgtaagtctagctactttggaaatggtaagatctttggcccaaggatgtacaaaagatgtcctaatttttttttcagaataatattgagaagtagggacacttctaaatagtggtcacgtcatgtcgtgttgtaattgtgtcaagtataagtacatgtcagatattgtatggacccctcaattgtattttatattttttgt

SEQ ID NO: 26326 - DNA, 458 bp, Glycine max
aaaataatttttcttttaagtttgaagtttcatctgctttgcctcgtaaccctaattcagagtcctctgttactgaaacacttccatcccaaaccaatgtctgtttctcttttcggatttcctaattcataatgagtagtagaaagagaacggggatgcgggaaggttacgagtttatgccaatacgagatgttggtagatctgttggccagaaagccaagttgattggggttattcttgacttcggctttccaaagaaatccaagggcactgatttttgttgttgcctaagaataattgatgaaacacatcaccaaatctccatggctattaacatgtttgaggaaaatgtagaaagacttccccgtcttgctgctgtcggggatgtagttgtgctttgttgtgttgaggtaaaatcatttaaaggggaagtaaatgttactttcaacaagagattt

SEQ ID NO: 26327 - DNA, 404 bp, Glycine max
cccacgcgtccgcccacgcgtccgtgctcccccacaactgcaacaacggtaatggcagaagctgaagattatgggttcctcccagaggaaatggcggtgaatgaaaaccttggctaccctaaagctttcgctaaactctgccgtgaccgcggtttcggtccctacagccatggccctcccttttccttcatcccttatgctttgtcagacgatgaggctgagacagccaaagatttggatgagatatttccgattattgatccgaaagctaaggcgaccagcaagccgaaaatctttgtcagtctcttggggaagcagctccgccatcttgggaatgctggctttgaccctgcagtgattcgggtggatggttatggcaatgtgctctattatcatgctgactc

SEQ ID NO: 26328 - DNA, 294 bp, Glycine max
cgcttttcaaaccctctttctccgttccacccaagctcttgccaacgctctgcgtcttgtgaatctactcaaatgtcaggttgaagctcttgaaccgcttcttcagcactaacttgtgcaccttcctgttctcgttcaaacctttagggctaagagaactcagaatcttgctccacgtttcaacctggtagttcttgtgcttcgcttttccttcaagatttgtgtccacaagctccattcaccctcattaactgcgccgcaaaaggtgacacattttctttttgtttgttgttg

SEQ ID NO: 26329 - DNA, 513 bp, Glycine max
cacctccttaatatccatcactgcctagctagctagctcgcacattaagttatataacacatatttgcttgcttagaaatactattattgaagatatggggagtgtagattatgagtaccctttgggcatgaacaactttgagagagtgcaccaagtcgaggttccaccgccacagccgtttttcaagtctctaaagtactctttgaaggagactttcttccctgatgaccctttgaggcagttcaagaacaagccagcttccaagaagttcatgcttggccttcagttcttcttccccattttcgaatgggctcccaaatacacctttcagttcttgaaagctgacctcatagctggcatcaccatcgctagcttggccattcctcagggcatcagttatgccaagctcgccaacctccctccaattcttggactatattcgagctttataccaccattgatttatgcgatgatgggtagctcgacggatttggcagtggggactgtggcgg

SEQ ID NO: 26330 - DNA, 393 bp, Glycine max
tgcaattactgccagcgcaagtttttcagttctcaggctcttggtggacaccagaatgcacacaagagagaaaggacattagcaaaaagggccatgagaatggggtttttctctgaaaggtacgccaatctagcatctctccctctgcatggttctttcaggtccttgggaataaaggcgcactcctcactgcaccatggtttctcaccaacaatgaggcgtcctgagataaagaacaatgcaagatttgatcaagggtatgttggccacccgatattcttggaggatgatgagtcagatttgttgtggcctggtagttttcgtcaagttgctgaggcaggtgatagtcatcagaatttcatactgactggaagttcaaatttgagttttact

SEQ ID NO: 26331 - DNA, 409 bp, Glycine max
agtttacgtttgagtttctggctcaagaaacaaacgaaccgtggaatccaaacgggctaaggtgaaacaccagcgctgttaagtgtgaacaaagtgggctctgttttgtgggagtgctcacctattcagggattcttgaaaaaaaaaatttggggtttattggtctgaagcttgttggagttgggagtagctgaagatgagaaacgtgcttcgttctttgcgacaattgcgaccagcctttcagaggcaagattgtgttttgatcattggtaatgttgcagaagaacctccatgtcacattggaaagagctgtcatattcattcttcagcttttagatttgttgatcatgctgagaccaactttaaaaaccatttgtttacaacaaccacgagacctctctcaactgat

SEQ ID NO: 26332 - DNA, 254 bp, Glycine max
acttgcatcatcagcgtcttctctttttctcagtttctcctttttttttttaaaggtgctgcaagcatacgtgtgattttctggcacaagaaggaaaaagaaaaaaaaaaacaacgtggaatcgcaacgagataaggtgaaacaccaacgttgtgaggggaaattgaaactttttagtggggtttattggtctgaagcttgttggagttgggagtagttgaagatgagaaacgtgcttcgttctctgcgacatt

SEQ ID NO: 26333 - DNA, 509 bp, Glycine max
ccttgcgtccgcccacgcgtccggggagcttattttttggttgcaaacagagggagagagagaaaagagggagcgtgtttcgttccaaacagcactgaagaaatgactaaagaagaagactttaagctccttaaaatccagacttgtgttctcaaagtgaacattcactgtgacgggtgtaagcagaaagtgaagaaactccttcagagaattgaaggtgtttaccaagttcaaatagatgcagaacagcagaaagtaacggtttcaggtagtgtggattccgcaactttgatcaagaaactggtcagagctggtaaacatgctgaactttggtctcagaaaacaaatcagaaccaaaagcagaagaacaacaatgccaaggatgacaagaacaaagggcaaaagcaagcactggtcaggggacttgaggccttcaaaaaccagcagaaatttcctgcttttagttctgaagaagatgaatactactccgaatatgatgatgacgatga

SEQ ID NO: 26334 - DNA, 449 bp, Glycine max
ttatcaacagaaaaggggcaaaggccaaggttgttgctgcttagtggttggttaactctatcaaccccaaatgctattgattccaccatttccattcaccacccaaatgctcttcacagattccctatttctctcttcttcaactttctcaggaacaggtattcgaagaaagaattctgggtgtattgaaagtttgaatcttttaagcctctaaatttcctccatacatttacctgcatttccaaattttgaagtttggatacggtaataatcaaaatggcctcttgcgtgtcaacaatttttgcaccttctaatactagaaatacaccaagggtgtttactgttggaggaagaaatctgacttgtaattatcctgggagagcttgttttacgaaaatgtatgaccgcaggaatgggttttctggtggcatccagatgtcgggtttact

SEQ ID NO: 26335 - DNA, 316 bp, Glycine max
cgaatgctgagattaatggcataaaaaacattagatttatatgaccgaaggcagaggacgtaatgggatctctgttaagggaacacctgaatgtgactaaggaacaagttgatgatcctaatatctctggaaagggcaatgacagtcccgaggatagtgcatgcccagaacctgaaaatggtgaactagcatctcattgtccagaaaataacaatgcagaagttggaagtgaggttcagaagggtagcacttgtgaacaagctgatggtatctctgaacaggcagaggacgtgatgggctctctgttaagggatga

SEQ ID NO: 26336 - DNA, 285 bp, Glycine max
  unsure (1)..(285): unsure at all n locations
aaaggaaagagagagggagaagtatagagatagagagaaggagagagaaagctatagagacggggacaaaggataaggggaaagataaaattagagagaaggagagggagacggatcgagataaagaaaggacgagagatagagtgagcagaaagactcacgaggaagattatgaactggataatgttgatgataaagtagactaccatgacaagagcgatgaggagattggcaagcaggcaaaggattcaaagcttgacaatgataatcaagatggccanacat

SEQ ID NO: 26337 - DNA, 544 bp, Glycine max
cgctcttgatattttcttcgcgtcctctaacctccttcacacgtttcattctctctccctctctttctctctctgcgtgcgtacggtcacacacacacacacacactattcgtagattgaatcctccgaagcagatctcacattcaaccttcaatgcttcgttctctttctttctccgatccatccatggattccgattctcagtttctctgattctctcgtcgaaattcgtttcccgaaccgcattcacgcgccaaccttgctcgcttcgcttctctcgcggcttcgtggattccgctttcatggaacgaattgccgcggtttctgttccgttctacaacagcgagaattttccttcttctgaatccgtttggtttccaaaaaaccacgcgacaaagagaggttcgagaatagagatgttctttaatctatacatggagcaatcatcgctttcgattgaaacgtgcgtttggatctcacggtgcttgtggaggggaagcaaacctaagcctttccagtgaagtgctttaatccacacaaccca

SEQ ID NO: 26338 - DNA, 415 bp, Glycine max
gcattgagttctccaagataatgcaacagggatttgcatatctgccagcaggaatatgtgtatcaagtatgaatcgaccagtgtcttatgagcaggccattgcatggaaagttctcgatgatgatgattccaatcactgccttgccttcgtattcatgaactggtcttttgtctgatgggggaaccatcatttagatactttattatatctattaatttatattttgagtactttactaagatattgtcacaccaacaacgaatgtaactaatgactggatttcatgaactcatggttgtgtgtgccattagattagctttgctttatgcttttaccaaggatgtacctttcttactatataaactccttgttgaagtatagcctacttattcctaaaaattatccttcactggc

SEQ ID NO: 26339 - DNA, 303 bp, Glycine max
tttggaaattattcattaggcgcacatgatgctggaaagacaccagttggtattcatgacgatgtcattaagaaatcaggttctgctcttcatcctggttattttggaccaggtcctggatatgcgagacatcatatggatggtatagctccaagaagtcctgttagtgaatatgctgagatgtcctcccggagattggggctgcactctggcagtcttgttggtaagtcaggtatagatgattttgatgacagagttgcacgtcgttttggtgaattccgtgatagtcggtttcctcatttg

SEQ ID NO: 26340 - DNA, 503 bp, Glycine max
cttcgcagaacgatgaaggaaggcatctatcgattatcgacgaaggtttcgacgagttcgatccctgatagtgttaccagagaggaccctacgaccaaatacgaattgctcaatgaacttgggaaggggtcttatggagctgtttacaaagcaagggacttgagaacctcggagatggttgctatcaaagtaatatcgttatctgaaggggaggaggggtatgaggaaatccgtggtgagattgaaatgttacaacaatgtaatcatccaaatgttgtccgttatcttgcaagctatcagggagaagagtatctttggatagtgatggagtattgcggtggtggtagtgttgctgatttgatgagcgtgactgacgagccacttgatgagggtcaaatagcatatatctgtagagaggcactgaagggtcttgattatttgcactcaatttttaaagtccatagagacattaaaggtgggaatatcttattaactgaacaagg

SEQ ID NO: 26341 - DNA, 335 bp, Glycine max
cttccaacaagttaacagccactcacttccaaaaaggaaagggttttttcagttattatttttattttccttacattcttcacactatcccctttcaccacaaaaccctaaacccgcattctccaatccaattcaacccctcccttcccatgttcttctccttctccttgcacccgaattcaacaatctcttccgatgtgacaccgcaagatctcagagcacggccacttgttccgcaagaagaagaagtagttgaagcgctgtgattcgtttgattttaagggtagcgactagcgagtgagaatggaagcgcgtgtggggatggtggtggaagg

SEQ ID NO: 26342 - DNA, 295 bp, Glycine max
ctcagccgattcaaacatgctatatattttaagcaaagatgtcaagtgccataaattggtcaagactctcaaatccaagggttattccgtttcacttgattctgatgcagcaaatattaatgatagggtggattcagaccgcagagcagcggtttctttgattgatctggtgcaaatctctactacggatatagggacgtatgatgtggtagtcctacctagttttgtaccctcaattgacacttacgtgcatattttgacaaagatggctcgcacaagtgtcaatggtgtattg

SEQ ID NO: 26343 - DNA, 639 bp, Glycine max
gaaacgggtgtagtgggagtgcttgtgggggtctagttcgtgattcctcgggatgttacctaggtggtttcacagttaacttaggcaacacatcggttactttagcggagctatggggtgttgttcacggtctgaagttggcgtgggatcttggttgcaagaaggtgaaggtggacattgattctggtaatgctcttggtcttgttaggcatggccctgtggctaacgaccctgctttcgcgttggtttcggagatcaacgagcttgttcggaaagagtggttggtagagttctcgcacgtgtttagagaatctaaccgtgcggctgataagttggctcacttgggacactcgcactctctggaatcgggtgcgaagcgattctcggacccaccctctgcccttgttgctattcttcaagatgacttggcagggcttgccaagcaacgtggtgttaattaagtgtaagagactgttgaccaagcaatgtaaattagttagagcttgcattctcgatcatcaaagtattttgactttgactgagtgtgtacataaagtttatctgatctagattatgatttataatccaatgctttctttttaatcatcccaagattatgagcttctcaattacgttttc

SEQ ID NO: 26344 - DNA, 568 bp, Glycine max
ccagggtacacagccttggtttagtatatgatgctggtgaaatagactatgtaagatttttatgtggacaagggtatagtacaaggactttacaactcatcacaggagataacagtagctgccctgaaacaaagaatggttcagcaagggatctaaactatgcttcatttgcactctttgtcccaccctccaactccaatagtgtaagtggcagttttaacaggactgttacaaatgttgggtcaccaaagtcaacatataaagctactgtgccttctcccaagggactgaaaattgaggtgaaccccagtgttctaccattcacttctcttaaccaaaagcaaacatttgtgctcacaattacgggaaaactagaaggacctatagtttcaggctctttggtttgggatgatggtaagtaccaagtgaggagccccattgttgtgttcaatacagcataatggctaaggttaatccattaaataacttgaagcaaaaatggctgctctcattttattgataatgtaatattgaaatttgaaagtaaaaaaaaaaacaaagggcggcc

SEQ ID NO: 26345 - DNA, 287 bp, Glycine max
ctggtggttggcttgagtgtgtgcagcagaagcagctggttctctgccggatgatggaccgcattttgtgcttcatctacttggtttctctcattctcttccaagccaatgcagcgacgccccatctcagtcgcgcaagcattgcttgacttgttggaaaagttgcctccttcaagatccctgaattggaacgcaagctcttccccatgtacctcctggaccggtgtaacctgtaatggagataggtcacgagttatagccattcacttgccaggtttcgggtttca

SEQ ID NO: 26346 - DNA, 459 bp, Glycine max
aacgttagcttgtaacctaagtgggggcattaaagtgatgggacaaggctactccacagacaagagaaagaaagaaaaccccatttaaagttatttctttttgtactgtgcacatcacaagaagaacaaagatgggtttttgaaccatcacataaaagaaaaagagagagaaacaaaaaagaaatagggatattggagaaaaacaagaggaagctgtgcgagtgacagaagatggaggagaatgaatgaggtgaggtgtgtttgttattcttcttgttgttgttttgttgttgctgaaatgggtttgttgaacacaagtgcatgtatttgactactagtgcgttaaagctcagatctttgtcttttgttctcccacctggtattttgaggttatcaatttgtgcactgagtccttccttaaccgaaacccattttgttggtttttttgggggttgttga

SEQ ID NO: 26347 - DNA, 316 bp, Glycine max
gaactgagcgctcgaggacgtcacgtctcgagcatcttcataacctaaataagaatatacaacttaacacaatttcatttcacccccttaacatttgcacatatctgcagccatggttattcttagagaaattggctaccttatttctgatgggaaggcatctcagaatgatggtaactcaacttctcccttgtttggtctggtagatctttccttgtactatacatgtttctacaatctccagagttttttccttagtttctggtgtttccttctgtaccaactttttcctaatgactcaaaggtgagggcagag

SEQ ID NO: 26348 - DNA, 340 bp, Glycine max
gttccaaaagccacagagcctaagtactcctcctgatcctctgctattattacttcatacttctcgatggatgagagtaaaacagttcacatagctgtagttcccagcgcaggcttcagccacctgatcccaatcctcgagttctccaagcgcttagtgaacctccaccctcacttgcatgtcacatgcataatccccacacatggtccacccccaagtgcctcaaaatccatccttgaaacccttccctcccaaaacatcacctccactttcctccccccagttgacctgcctcaagaccttgacacagtttcccaaatccaactcacagtcaccctct

SEQ ID NO: 26349 - DNA, 479 bp, Glycine max
ctgtatttgaagcatctttaagagctactcttgctagattgagcacaactctatctttttctgcatttggatcaagtttagaccaacaccagactataaacagtagtgtagatggggaaccatcttatggtggaaggcctgccttggatatggcagcactgcggttggttgatgtgtctgagaaggcaaggaaactctttaaccttttgaatcagtctagagatcctcgatttcatgcacttcctcttgcatctcaaagagttgcagcatttacagatacagttaatgaacttgtatatgatgtcctcatatctaaagtacggcaacgcctcagtgacgtgtcccgtttgccaatttggccatcagtcgaggaacaaggagcctttcctctccctaccttcagtgcatatccacagtcatatgtcaccagcgttggtgaatatcttcttactttaccccaacaattggagccgcttgct

SEQ ID NO: 26350 - DNA, 219 bp, Glycine max
gggaaggaacgcactcacgagcaagaggaagcgactagtgtagcgagtagagtttctgcttctactttacaagattacaatttacaagttacatttcagcaagtcaaaatttcctccagaaagttgctcgtgtaatggatataatctctcagttacaagaacaagttaatttgattgcacatttggcttttaatacagttgggacattccaagggatgc

SEQ ID NO: 26351 - DNA, 446 bp, Glycine max
ttcatattttgcattgcctcattgctacctcttcctcaacttagtatttatttcaaaaatccatttgcaatccatttcaaaaatcacattctgcagtcctatttccgtgatccagtgcatggattgcagcaaaccaagcgtctcaccttcgttgacttgctgcactgaatttatcatcacaaggtaggaggaaaaggtgataaaattaacaacatggatttaagaattaatactatattttcgtacctcttttgcatttttaattttttttcttcttaaaaatactatctcttttcattaactcttttttgaaacatattttgatatttataaatatttttaaatttagtttctgaattatattaaaaatatcctggaaattatcaacgtttatttcttcttttcttttctctttttcattattacaacaattactagttactagt

SEQ ID NO: 26352 - DNA, 266 bp, Glycine max
gcagacaaaatgaagagttttttgttgtggcgtgtggccattgtggaaaaaaatagaccctatgttgcaatgttgttcattcagtttgtgtatgctggaatggccttgctttccaaggctgcaatttccaagggaatgagcccttatgtgtttgttgtttatagacaagcctttgcatcagttgctctatctccatttgctttctttgacagcaagcaaccagctcctttgtcatgcaacttgttgtgcaaattgtttctagtttc

SEQ ID NO: 26353 - DNA, 292 bp, Glycine max
cggaattcggtcgagctatcctcattgattgcaagaatggaactccgttgcttactgtcctccatttctgttcttttcgctgtgtaataatcaacattagtcggtgggcaagtgtttatatatatatataacaacaacaaccacgccttatcccactaggtgggtcgactacatggatcaacttccgccataatgttctatcaacttcgtcttgcaagagaaagccatgcccaatcatcaataccagacgaagatttttggcatgctgtttggccaaacacttccattccca

SEQ ID NO: 26354 - DNA, 414 bp, Glycine max
ggattctctgctgggagttcctcagcaagtctcaagtcgttcttctctccctccttggagattcgaggtttatgagttatctaccttctgtattggcaactgctacgatgatgcacgttgtgaaaagcgtggagcctggtctagaagctgaatacaagagccagctctttggtattctcagaatcgtcaaggagaagcctgagaaggtgaattcttgttgcaagctgttgttggaggtgtggtcagggtacgaggaggaggagcaggagcaggggaagcaatgcatgaaacgcaagtttggaatagggtcgattcctggaagcccaaacggcgtgatggatgtgtcgtttagctgtgatagtagctccaatgactctttggtctcttcctcaccggaacctttgtcaaagaaga

SEQ ID NO: 26355 - DNA, 285 bp, Glycine max
tgcaaagccatcagcaggtcctgtctataggagcattcactgctaaagatggtctcttggaggttccttctgattttgagtccccttgggatttcttcagggactctgttaagaggaaccccaacaacaatatgctgggtaggcgtcaaaaaaccgaatctaagttgggttcctatacatggctcacgtatcaagatgtttatgatgctgccatgaaaatgggttcggccataaggagccgtggtgtcaatcctggagatcgttgtggcatatatgggtccactg

SEQ ID NO: 26356 - DNA, 290 bp, Glycine max
ctcgagccgttttcctaattaatcaaaccaaccaccaacaagatgatttctgagtccctcttgttagtattcctcattgtcttcatttctgcttcccttctcaaactcttgtttgtgagagaaaacaaaccaaaggcccacttgaagaacccaccaagcccacctgcaatacccataataggtcatctccacctccttaaacccctcatccatcactcattccgagacctctctctccgatatgggcccctcctaagccttcgaattggttccgttaagttcatagttgc

SEQ ID NO: 26357 - DNA, 446 bp, Glycine max
aatggagttaagagaagattggatatagtgattaacgtccgcttgggctggaatgggcgtagagtggttattggtgtgccatggcttggtcactgcggtggtcgttgcctctttcctctgcggtcgatggccaatctttgaaggcactttcattcaacgcattcactacttcctcactttcggcgcctacgattacttcctgtatctctctctctctctcttctccatttttgcttcttcaatttcaattacttcatctctctcttttgcaggcgtttcgttggcgctgttttcggtcctaagtgtacggattcggttctctccgtcgaatattactgctgcgatcgtcccaatcctcttctgcagattatatatattgtgataattggtgtaacatattatttcgttgcgaagtcttgctttgcctatatccctggatactatct

SEQ ID NO: 26358 - DNA, 268 bp, Glycine max
attggatatagtgattaacgtccgattgatgtggaatgggcgtagagtggttattggtgtgccatggcttggtcactgcggtggtcgttgtctctttcctctgcggtcgatggccaatctttgagggcactttcactcaacgcattcactacttcctcactttcggcgcctacgattacttcctgcgtttcgttggcgctgttttcggccctaagtgtacggatgcggttctctccgtcgaatattactgttgtgatcgtcccaatcc

SEQ ID NO: 26359 - DNA, 666 bp, Glycine max
gctcaacgaacgaacgatgctgctgctgctttggtaattgcatttgctggtgaggtgactcatctctctctctctctcatctctccctctctctcatctctcccttccaaaaaaaagcaccaattttttcgaacgccaacgcgaatcacgaagagggtcaccgagaaaatgggtgtttgtgggtcgaggcccaaagtgaacgaggacctctcagcgaagaagaagaacaaccaccaccgaagaagaagaaggagaatcctcagaagacgcgtctcttctagaaagatcgaagctaacaacgtttctcactgtaattcagctcttcaagcttctaatcgcgcttctgatgctgcttggtttgattctacttcggcattggattctgagtgtgatgacgaattttacagtgtctatgatggagaagtgtctacaggtcaagcagatgaaattggagagtacagaaagctgtccctggaccattgtgggattctgccaaatacctgtttgccttgcctcacttccaatgcacttgctgttgaaaaaagaaggccaatgagtcctgatacacctagttcgcggagaaagtcgctttctaaactctcccccaaatggagagaagggtcttcagatatgactttactttcccctaaggcatttaaacaaaaa

SEQ ID NO: 26360 - DNA, 379 bp, Glycine max
cgacgatgctgcattgctttggtaattgcatttgctggtgagaggtgaccccatctctcttttatctctctcttccaaaaagcaccgatttttgcgcacgccaacgcgaatcgcgaagagggtctcaccgagaacaaaaaatgggtgtttgtgggtcgaggcccaaagtgaacgaagaagacctctcatcaaagaagaagaacaacaacaacaacaatcatcgaagaagaagaaggagaatcctcagaagacgcgtatcttctagaaagatcgaagccaacaacgtttctcactctaattcagctcttcaagcttctaatcgcgcttctgatgctgcttggtttgattctacttcggcgttggattctgagtgtgatga

SEQ ID NO: 26361 - DNA, 260 bp, Glycine max
gctgaaactcctcttcgagttagatctcagcaacaaccgtttcgccgggaagttccccgacgtggtgctgcgtttgccgcagctcaagtttctagatctgagattcaacgaattcgaaggcacggttccgaaggagctcttcgacaaggacctggacgcgattttcatcaatgacaaccgcttcgtcttcgacttgccggaaaatttcggaaactcgccggtgtcggtgatcgtgctggcgaacaaccgcttccacggat

SEQ ID NO: 26362 - DNA, 393 bp, Glycine max
cgtaccccgaaaccaagccacccctccatagggaggttcacgccccgtgtagaccacgtaagtttgattctcctgccttcaatagaagtgctcattattatcgcaaggcagagattagtcacgatgtgggcaacttgttaagtaaaaattaccaaagggcgaaaaattccgcgttggctagcattaggtttggggaaaagggcaaggaggtgatagaagtggatgctgatagttccaagggtatggtgtcggaggattcgagtgtggaagaagatggacgagagcacaagtggcaagaaggtggtgatttggttgtgactgaggtgaaggatttggatgctaataaggatatgcatggtgtccctcagcagcagtcaacttcttccgttgttt

SEQ ID NO: 26363 - DNA, 476 bp, Glycine max
cgagtggttccctccctcacgcgccctcggcgccctctccgccttccgccagacgcgccgcgccttcgccgccaacaagcattccgcgcccgacgacgcctacgccgcggagtccatcggcgacgaccccctcgcggcgtccagcggccaggtcatcgtcggcgtcgagagccgctaccgcgtcgtgtaccgcctcgtgaacggcatctacgtcctcggcatcaccgtcgccgaccacgacaactccgtgaacgtgttcgagtgcatccacatcgtcaaccaggccgtgagcgtcgtggtgacggcgtgccgcggcgtcgacgtcacgccggagaagctcagccgcaagtacgccgagatctacatggccctcgacatcgtcctccgcggcgtcagcaacatccggctcgccgccatgctcgccaccatgcacggcgagaacatcgccaagatggtccactccgccatcgacaccg

SEQ ID NO: 26364 - DNA, 317 bp, Glycine max
gatcaattggccgccaccgtcaagaagttaagtcgagactttgccaagttggagacatttaagaaacaactgatgcagtcgctaactgatgacaatgcatcgcatgctgaaaccatagatattggaacctgtgatcaatcagttccaaaggcatatcctgataacgatgatgatggaagtggctatatggtacatcattcatacaatggccctgcagatgtgggtaaaacaaatgatgaagcttccaggtattcagggcaaaggttttctttgaccccatatatcacaccacgtcttacaccgacaggaactccaaa

SEQ ID NO: 26365 - DNA, 679 bp, Glycine max
attgagatgcttgaagataagcagtctaatgggcatcttcttgatgaccagcagattgcaaagcttcaatctaagtcagcacttgagaggatgatagtgagatagagtttcagaggactcgtgacaaacccatgaaattggagacagtcctcaggctagattcttttctacagccaaaggatgatcctaataaagaaatctccaaagtagtccgagctctaaggaagaagttgcagcagattgagatgcttgaagataagcagtctaatgggcatcttcttgatgaccagcagattgcaaagcttcaatctaagtcagctcttgagagctcacttgcagagctaggtgttcctgttgagacatcacggtataaagaatcatcttctatgttaccagaagggaaaggtagtaagaagggtaaactatcgaaaaaacaaaggagaaagagtggcaattcaaacatagagcagacagaaatagaatctgtttactctaaaagtgaagccattcccaaatctgaggacctgttggacattgacatcatgggggttcctgattcaaaggtggaagaggatgccgtgtgtgaacagatcagcgcagacgaagggtacggaagagatttagctttgtgttgtgcagaagaaagatgctttagagtttttgaaagacagagggtcca

SEQ ID NO: 26366 - DNA, 351 bp, Glycine max
ggagattgtcatgcgcaaccttgattttatatttgcagtatcatcacatactgtagcaagtgcctcactagatattctggctaacctcgagaggttgttcgaccagagatcatctgagccatggagtcaccgtcggctccctactccaactgctactttccctgccatcatcaacagtgaagaggatgatagtgagatagagtttcagaggactcgtgacaaacccatgaaattggagaaagtcctcaggctagattcttttctacagccaaaggatgatcctaataaagaaatctccaaagtagtccgagctataaggaagaagttgcagcagattgagatgcttgaaga

SEQ ID NO: 26367 - DNA, 465 bp, Glycine max
ctcttctacactaagtccttagccaccattgaccgctaggggttagggctagggttagggttagggttttcttctcctttcattcctccttcatcttgcgattgtttgttctcttaacttggttcttactttggctggatgattaaaacttattgccgtgtttgctcatttctgaagtaaccgtcataaatcaatgctcacggtgtagatggcaccgccctcatgggtggcatctccgccggagcagtttcatattcaattgccttgtggagcagcgtcgctgcctttaccatttgggactggccatgagaccgaacattacaatccaattttttcaatgtcttttttagaacatagggtaggatttgctctgaaatttgaaaaaaatatcttacttgttttgtttagtgagcttcatagtgtatatcaaatttaaactcaataaattgttaggatttttatgct

SEQ ID NO: 26368 - DNA, 378 bp, Glycine max
gggagggcatacctattcggacatatgagattggacgttttaagttggttgatgggaagttttctccggagcggaacatcaattgtccttgcagatgatgttggccaaatatattttctgaacacaggtcaaggcgagtcccagaaagatgccaaatatgatcagttttttcttggtgattatcgaccccttattcaggatactcaaggaaatgttcttgatcaggagactcaacttccaccacacagaagaaacattcaggaacccctatgtgattctagtatgatgccatatccagaaccttatcagagtcaatttcagcaacgtcgacttggtgcacttggcattgaatggcgtccttcattgataaaatatgct

SEQ ID NO: 26369 - DNA, 330 bp, Glycine max
ggagcttcagttctgagagtgatgaagagttttatccttcggaacagtttctcgagggtgacggtaacagcatcacaaaacacattgagtctgcaaataccatgctttcattcatatggtggattgttgggttctactgggtaactgctggtggccagagtttgacaagggattcacctcagctttactggctctgtatcacatttctttctttcgacgtcatgattgtactcatctgtgttgctgttgcatgtcttattggaatcgctgtttgctgttgtctgccgtgcatacttgccattctgtatgtggtggcagatcaggaagggg

SEQ ID NO: 26370 - DNA, 286 bp, Glycine max
ctcaaccccaaacagaagcaagctttagccaggcggttaaatctccggcctcgacaagctgaagtgtggttccacaatcggagagccagaacaaagctgaagcaaacggaggtggactgtgagttcttaaagaaatgctgtgaaacattgacggacgaaaacaggaggctaaagaaggagctgcaagccctgaaggcactgaaactagctcaacccttgtacatgcctatgcctgctgccacactcaccatgtgcccttcttgcgacaggctcggtggcgttaacg

SEQ ID NO: 26371 - DNA, 807 bp, Glycine max
acgaggacaactctcacctcctccaattccttcccaacaccaccaccaccaccaccacccccaacacccccttcttccatgctgcacctcacactcacaccatgcaccaccccctctctactaattcctccaataatactaattactaccccttccacctctcccaaattaccgaaacaccctcccaccatgatagagcccttgctgccatgaagaaccacaaggaggctgagaagagaaggagggagagaatcaactcccacctcgaccaccttcgcactcttctcccttgtaattccaagacagacaaggcttcgcttctggcgaaggttgtccagcgggtgaaggagttgaagcagcaaacctcggagattaccgagcttgaacccgttccgtcggagaccgacgagatcacggtgctctccaccaccggaggcgactacgcctccggtggcggcgacggaaggctcatcttcaaggcctcgctgtgctgcgaggaccgctccgacctcatccccgacctcatcgcaatcctcaattcgcttcacctcaaaaccctcaaagcagtcatggccactctcggaggcagaacacgcaacgttctcgtggtcgctgctgacaaagaacacagcattgaatccatccatttccttcagaactcgctcaggtccattctggaccgatccagttccggcgacaggtcgaaacgacgccgtggcttagaccgaagactgatgtcttgaaccggatactgtttccatagctacacatgcaaatgcatgccttactagtatcactcctaatatt

SEQ ID NO: 26372 - DNA, 521 bp, Glycine max
ctttctcaaaagataaatttggatgacagttgaagtctggaggtggcggcaccattactgaagtcttttatgcaggttggaagcaggttcggggagagtacttttaaactgggatccatactaactgatggtcaagttggcatttttaaggatagatctgctgctgccatgtcctcatttggagatattctacctgctcatgcagctggtcttctttcatcttttacagctcccagatcagattcataatggcccaatgatcgaaaggcatcccggctgctcttttcaaagtctcgttaccataaagtgtgatatcccatgaaaccttcccaaccctccacaccttatattcatggcaccactctagtagagcaacattagaatcatatttgccagctccaactccaaatatcctagacatctggagcaaatggatcaataaattctgggatgaggattctgaatgttggctgctgtgattaatggccttttatcccctagcttggaaacggatgtgaata

SEQ ID NO: 26373 - DNA, 328 bp, Glycine max
caaaggctctcctcgatgccagaatttatattgctaactattcgttgacaagggctgcattacgaattcaacgtgcacagagaagcagggatgatccagatgaagatatggatgcagagatgaattggcgcattgaagcaggctgggaatttgagtcttgaattcagtgaaattggagatgatcggccactttctggttgctccttctcaagggatggaaaatggcttgctacctgttctctgacaggagcttccaagttgtggagcatgcccaaaataaaaaagcattccagctttaagggtcacacagagcgtgctactgatgttg

SEQ ID NO: 26374 - DNA, 657 bp, Glycine max
cacgattgccgctagagactcagccttattatacagacacggcgttacacaaataccgtacactgctccaatgcagagaccgaacacgaggccgaagccgagaatgactacttgctgataattcccatttttttctccgaaactcaaaacttttcatttgaagagttatcatgggatcagcttgttgtgttgctgcaaaggatcatactattcccagcactagcagaactggaggtgaaagtttaaatagaaatgctgtatgttcgccaacatggagttttcaatgggatagttggggccgtgttgctggcgaaattgaggatccttcctttcacacatctcacagagtcagcagaaatgtcagcatggagttaaaagggtcattaagctctgaaagaggcaatttatctgattggggaagcaccctggataattctgtaacacccatgtctctgaagtcccctgttcgtgagcatttggttacaagtcagatgactccatctttagatctattcatgtcaagtaattgctctgcagtggtgaagaatctgattgaatcaccagagattgcagaatcttcaataccttcagttttcccaacacctatgtcagatccaatgactaatcataattatcacaatcttactaactcaacac

SEQ ID NO: 26375 - DNA, 243 bp, Glycine max
caaaagatgaatacttttcggatggtgagggactttggattagccgtggagctgaaactggactatagacggggtagtgatcttgttatggcagaggagatagagaaagggctgaaacaattgatcgacagcgacaatgtggtgcgcaacaatgtgaaagcgatgaaagacaaggcaaggacagctgtccttactggtgggtcttctcacattgctgttggaaaactaattgataatatgttg

SEQ ID NO: 26376 - DNA, 337 bp, Glycine max
attaataaatagatgataacatgccaacctggcacctgcatctgatttgctcctgtttgtaataaacagcaagaagccatgaataaagtggtagaagttttgagtgtagcaccaattttggaatcagaagagttaccaactcaaacatcgcttcccctcaccttctttgatatactatggttaaggttaccacctgttcaacgcatcttcttctatgaatttcctcacccaacccatctcttctttgatacccttcttcccaaactcaaacactctctttctcttgcacttgcctactttttccctcttgcgggccacctcacttggccacttcact

SEQ ID NO: 26377 - DNA, 434 bp, Glycine max
gaacacaaaacacaacaaaaatttacaagcaacggcggcttcaagctatggccgtaatgcaactgagatcttccaaggacaagctatcttatacagatgcatgtttgccttcctagattccatgtgtctcaaatcgattattgagcttggcataccagacataatccacaagcatggccaacccattactctttctgagttggtgtcaattctgaatgttccaccagctagagttggccacgtgcaaagtctcatgcgctaccttgcacaccatggattctttgaaagactaagaatccatcttgaaaaagaatcttatgctctcactgctgcttcagagctacttgtcaaaagcagtgagctttgtttaactccaatggttgagaaagtgcttgacccaactctctcagcttcattccatcaaatgaagaagt

SEQ ID NO: 26378 - DNA, 246 bp, Glycine max
tgctgctcccgaaatggtgtcggtgccgcagcagcagcagcagcaggcttcgttgttcgctcatcaccaccgtcagcagcagcagccggccatcggagaagctttggcggcgaggctgcgacattaccttccgggacatctgaatttgctcgcttcattgtcaggtggacctgggaattctggtcggagagacgatgagcctcgttgattgtgacatctcttcaacggtggcggtgaggatggttg

SEQ ID NO: 26379 - DNA, 318 bp, Glycine max
tggtgaagcagctgaggaagaagaagaagcagctgaggaagaagaagaagcagctgaggaagaggaagatgcagcagaggatccttcttaaaggagacaacataaccttgatgatgaacacggggaaatgatgaacaacgctggcacagttgtaaacactgttcctatccaacaggagagaaaaaaatatctttccttttccagtttaattactgtttctcttgttgaaatcttgaatatgttgtgagagaaatattatcatgcatgaatctgtgaatttttaatacactagatgaattcttagttgagcagtttaac

SEQ ID NO: 26380 - DNA, 486 bp, Glycine max
ttcttctcgtccgttggaatcacccagaaacagaagaaagagctcttctttctcttcaatgcgatttctcatctttctctcctcgctttcctttttcaggtgcaaggcttcaataacgtaactgccatttttatttttaatttaattatcgttgctttacgtgcaagcttctacaatttttcccgtccagggaaagaagaatccctagttatcatttttggggaaattcaacccatgattctgtgagatttgtttgagtgtaaacgttgcttgtttgggtatttggggtcacagaggagagaaagctgaaaactttttctgccttgtgattttgttgatttcatgggtttagggttgctctcctcaggcaaatggggttttgaaatgattggctattattaattttgctctaagtgtgaattttttttttttgggttttgtctaggtcagatttggaaagaaaaaaaagtttctttttttgagggg

SEQ ID NO: 26381 - DNA, 310 bp, Glycine max
gaagttgagaagatagcagaagaagaagggaagagatccattccatggcgtcgtcgtcttcaaactgaagaccggagagagtcaccgtcgtcactttccggagaacagaacagaacaagtgcataagagaatcatcgaattttcattcctttgtatagaagatgaagcgcaagcgtcgggcataagaaagggaaggcagaaggcagcactaaccatggaagcagtggtgctgatgctaacaaggaagaaacctctggtttggaggttgacacaccttcttccacggggaccgggatggatcagcagcagc

SEQ ID NO: 26382 - DNA, 425 bp, Glycine max
gatatgtctccggaaaaagtagtatcgagggacctggatgcaaataataaaattgtactctttgaggggtgtagttatgcgtttgacttggaggatttgttgagggcttctgctgaggttttggggaaggggacgtttggtgctgcgtataaggctgcgctggaggatgctaccactgttgttgtgaagaggttgaaggaggtggctgttggaaagaaggactttgagcagctcatggaggttgttgggaatcttaaacatgagaatgtggttgagctgaaggggtattactattccaaagatgagaaactcatggtctatgattactacactcaggggagtctctcggctttcttgcatggtaaaagaggagaggatagggtgcctttagattgggataatcggatgaaaattgctttgggtgc

SEQ ID NO: 26383 - DNA, 509 bp, Glycine max
gccataaattgcttttctggcctaggaaaaaatgccaaaaaacaagtggacactttggttatcacaaaatatggagcaagtggagataatcctgcgtgtactgaccttgcatataatcaagctaaatcagatggggcagatgtacttgacgtcctgttcaaatgtccaaggatggaatacccttttgcttaagctctatagatctatcagagagcacaacagttgctgatacacaattgaaaaaccgtgcaacgactattcccgagattaaatatcgcagtggcatatatacattcagcttgacatgggatgagataaaaacattgactccctcaatattgaacccttatgagaaatacatattgtcccggaatccaaaatccaaaaatctaggaaaacttatagccttgtctgactttttgtccctgactgaaggctctcgcatcttgattagcatagagaatgcagcctatcttgctgagaagcagaatttacgtgtgactgatgca

SEQ ID NO: 26384 - DNA, 700 bp, Glycine max
caggtggtcttagatgcaccattgcgcctcaaaagtccgccaagttgtcaaattttatgcgttaaaccacttgctgtttctgctagttcttgtgctcaatttgttttgaaaggattcaattttctgctgtctaactcgaggttgctctgtgcacttgaagggaagtatctggtacaagataattgttatgatttgattgacagtgttgacgcagccaatggacatcatgagcttcagcatctcagtttctcttgtcatgtaccgaatgtgactggaagagggtttattgaggtggaagacaatggtcttagcagctgttcctttccattcatagtggcagagcaagaaatttgtttagagatctgtacgctagacaatgtcattgaggcagcagagatggctgatgacaaccagataaaaactaacctaatggaagaaaagactcaagcattgtatttcatacaagaaatgggttggctccttcatagaagtcgtgtgaaagttaggctaggtcccgtggcacctgtccaggatcgcttccattttaatcggttcatgtggcttgttggcttctctatggaccatgactggtgtgctgtgatgaaaaagctcttgaacattatctttgagggcactgttgatactggagatcatgcctctgttgagttagctttgttagagatgggtcttctacacaaag

SEQ ID NO: 26385 - DNA, 856 bp, Glycine max
gaaaatgccaagccgaatattctattccccttcttgtacacttttttcagacgtgcaaaaacttgaaacataaaatattcgtcacccccatggaaagttggaaacacataaacagaagcacattatgtgcaatgaggggctccaatatatatatatacagttgagatgaaagaaatggaggtggatgttaattttggcgcggagaagagggagtccagggtgtgatatcgatagggtaactccccaagagtcgcaagaaggaggtgaattcttgaacctcagcgagtgcgttctgtgctctaacctcagccatagaagcctcgaaatcaatataaaagagatactcaaagtgcttggcggttccctcactctcatcatcaacaacgcgaataggacggctacggtgcggcctggactcgatcttagttaagcttatgtttctgaacgcaaacgcggaaagcactttgaagagcacagaggttcctttatcgtgcgcaaacacgatgctcgtcttgaagggccgatccgtgcgcggaatgatcggttcgcgcgccagcatcacgaaccgcgtcacgttgttcggatcgtcctggattccgtgcgaccagttcgaggctgcgtttcaagcggtggagctctggatcgcggatcgcgcggttttgccggttgaaaactccctcggcggctcaattcaccgcaactacgatctcctcctccgccaccgcctccacatcgtcggcgaggtccagctcccggtgcaccactgcctcctggcgctccccggcgtccgcaaggagttcctcactcgcgtgatctcgcatccgcaggccttagcgcagtgcggaactccttgcgg

SEQ ID NO: 26386 - DNA, 632 bp, Glycine max
atctgtctggtcagccagtgaaggacttttcaacatgagaaagtcttcttaagagaccacacatacaatatgaaattcttgacaagcatggtttcggcgacaaaagcttatcaagaatggagaaagaatgtgtcgagattgatataaagtatgaaggtttcatcttgcgtcagcaaagccaacttcaacaggtggttgctcaacaacatagaccacttcctgaagacttagattactatgcaatgacaacattgtctcttgaagctcgcgaaaaactttccaaggttaggcctcaaaccattggtcaggcaagcagagtagggggggtgagccccgctgatatcactgctctactcatcgtgatcgaagccagacggaggaaagctcaagaactaaggaggtccaaaatgatgaatgccattcgagcaaattcccaagataaggtgcctaaagtttctttgactgagaaagtcagctctggatgaagcttccatgtcactttgatgcccgactattctatcaattttggtatttagtgtgtcatattatgtatactagagagtcgtccgtaccatgctcatactaatatttgaaatttcataaatataaattattactacatatacatactt

SEQ ID NO: 26387 - DNA, 455 bp, Glycine max
aatcgctgcttcccatgttgataaaaaggggtgcctaaggcaaactcaaccagatgaaggaccaatgccaccatatcctggtgcggacattgtgaagagcgttataagtaacatggcaaagcctgcagaattgctagacatcactctgctcacacaactgaggagggatggtcacccctctatctacacagggcgtggcacttcttttgatgactgcagtcactggtgtctggctggtgttcctgatgcttggaatgaaatattgtatgctgttctctttggaaattattagtatcttcatctcatttgtcctttatctatgttatccttggttattcatttattgcccttgaggaaatagggctctcataaatttgaatatgagcttttaattaaattcgaaatattaaaaaatgccatgttaaaaaaaaaaaaaaaaaaaaaggggggccgcc

SEQ ID NO: 26388 - DNA, 335 bp, Glycine max
gaacactgcagagcaagatctcaaacgacaaacgttgttggaacttgttgattttgtttcttctggatctgttaagttcacagaaccagcaatcgccgcatcgtgtaaaatgtgtgcaactaatttgttcagggctttcccaccaaagtttcgaacaagtactactggtggggaaacagaagatgaagaacctatgtttgatcctgcctggtctcacctacaagttgtttatgatctactccttcagttcatcaattataactctcttgatgtgaagttggcaaaagcacatatagatcatgcttttattctaagattacttgacctttttgatt

SEQ ID NO: 26389 - DNA, 509 bp, Glycine max
tctcgagccgaatcggctcgacatagccagcatcagcattcagtaacatcaatatcatcgacaacagacaacaatttcgggaatccgctggctatgactgcagttgtggtcgtcccattgggccttctcttcttcgcttccggcctcatcgttaacctcattcaggcaatatgctacgtggttgtgcggccggtgtcgaagaatctgtaccggcggatgaacagggtggtggcggagctgctctggctggagctcgtgtggattattgattggtgggctggtgttaaggtccaagtattcacagatcctgaaacctttcgttcaatgggtaaagagcatgctcttgttatctccaatcacagaagtgacattgattggcttgttggatgggttttagctcagcgttcaggttgccttggcagcactcttgctgtgatgaagaaatcatcgaagtttctaccggtcattggttggtcaatgtggattgatgaatatcttttactggagag

SEQ ID NO: 26390 - DNA, 352 bp, Glycine max
gtttttctctctcaaaagggtttaaagacctttcctttacctaactttgtctctttctacttcagccatctcttctctgcctcaaccagcgatggtggaattttgagcctttcccttgaaatcaatgcatgtaaagactaaagctttgatgatgcatattggtttttcgttagcacattcatgtgggtcattgcgtgcttctattagtttcagcaaagtggcaaaagggtctgtgtttgtttgacttgaggagggttcttctttttattaagtgcaaaggtagctgcgttgtgcgtgtgagtgtgtgtctttttcttttttccattttgaggcatgaactaccttgtgggga

SEQ ID NO: 26391 - DNA, 427 bp, Glycine max
ctttcttgcttgcttgccccatcatttctctttctctctcttttgccctaaaagcacaaccggcttcctacataaagctcactcctctcccctctctcccacttcattctccaacactgtcacatgggtttttctccacaaacctgttctgttccctaagccccacccttttctgttctagcaaataaccgttcttatcaatggctcacaactcagacagtgccacctccaaccttcttcttctctgttccgagaacagcagcacctgcttcgatgatgatggtttggaatgtgatgccgcagatgggtctaactccagaatctcgcaccatgagggtggtggtggatcggagttgctgctggcgtgttctgtggcgcagagtgaggaagctgtgaaggctatggcggagagagaaaaagagcattt

SEQ ID NO: 26392 - DNA, 289 bp, Glycine max
ctccaacactctcacatgggtttttctcaaaacgccccacaaatctgttctgttccctaagcaccaccctttttctgttctagcacacaaccgttatccctggctcacaactcagacagtgccacctccaaccttcttctctgttcggagaacagcagcacctgcttcgatgatgatttggaatgttgtgatgccgcagatgggtccaactccagaatctcgcatcagttctgggaccaccatgagggtggtggtggtggtggatcggagttgttggcgtgttttgtgg

SEQ ID NO: 26393 - DNA, 405 bp, Glycine max
gcatggcacgcggctgatgctttgagtttgtttgagcggatgaagagggcgggagacaggccggacggcgttactttcgttgggattttgtcggcctgcacgcatatggggttggtgagaaacgggcttttgcatttccaatcgatggttgatgattactcgattgtgcctcagattgagcattatggatgcatggtggatttgttgggaagagctggtcttataaaccaggctgtggatatcgtgaggaagatgcctatggagccagatgtggttatttgggcagcactgcttggggcctgtagatgtacaagaatgtggaaatggcagagctggcacttcagcggctcattgaacttgaacccaataaccccggaaactttgtcatgctctcgaacatttaca

SEQ ID NO: 26394 - DNA, 505 bp, Glycine max
ctcagcttctctcttccttcacttattctttcattttcctcaaatctttcaaacacccacttccccattttcttctgcatcttcacaaatcacttcttcaaatcttcccaacaaaaaaaaaaaactcattttctatcatacagttttgggatctatcactctatccacggtttctggaatgaaactttccttgtttggtgttgttgttcttcatcttcatcatgtttaacataccttcatctctttctgaaatctgtctcacccactttcgccttgccatctccaccgcggatccatggcccttctcatgaatctcatgtcataaaaaccttttcctactgtttttcataccactgaaaagtcccacattgcttagaaaactctacaaagaacagtttataaaccttccgctgagaagataaactgctgatctttcgtgtagaccatgcaattcaggctcggcaggcgcgttgtaagggttgctaaatgggtcttcggtcgggtc

SEQ ID NO: 26395 - DNA, 283 bp, Glycine max
acctgcttcaaaacactaacctcgatccctaatcactcgcttgggttcgtgcagcgcaaaaccctaggctcgttttctagatcttttttttcttctctcttttccgatctaccgttagagatcgaagatgctgtccgacgccagcaagaagaaggccgcacagaagaaggccgccgccgccgccaagagaggtggaaacgccgccgccgccgccgttatggatgcgtcttccaaagccgccaacaaggtcgccaacggaatcgccgatattcagatttcggat

SEQ ID NO: 26396 - DNA, 289 bp, Glycine max
cttccgttggaaaatctcaggaaaaaaaatgaagggggtgaaaggaaaattcctgaagaagctcaaatccatcaaaccaatcctgaagcaagatttaattctccagatcaaggcctcagatgggtacgtccattttctcccaaagattccgagtttcaatctgcattccccgtttgtttcccgagaaaacaagcccgagacagttgttcagagctgcgagaaaatgcaggacgaacccgaggtgatcgacgttgcagagctgatgaaagaccttgaggaagaagatgat

SEQ ID NO: 26397 - DNA, 315 bp, Glycine max
ccaaagtattttgggttccttgtcaagagcacatcagctgcagttgtctgccgtttgagttttcaggcatcttatgtagacacgtgctacgtgtcatgtcaactaacaactgttttcacatcccggatcaatatttaccagcccgttggcgaggcaacaattcatcttctgttaaccactaccggggtacacccagtagggatcagcctgaaaggatacactttttagaatccatggtttcaacgtttttagtggaatccattgaaactgaggaacgcctggatgttgcttgtgatcaaatttctatggtgctat

SEQ ID NO: 26398 - DNA, 447 bp, Glycine max
gttaaaattctgaaagatacttcacattatcattctagtaaaacacacccatcaggctgacgaactagcatccttacaatatcaatgacaggatgctagttcttcatcctgatggggctgttttacttcacaagcattttgaagcagaaaatgacatactaatggaagtgattaagaaagtcactgtaaatccaacaatccctgcaaatctgttgaccagcatccgtgttgtaactaatctcttcaggaatttgtgctactacaactggttgcaaaaacatcgtagtgagattcttgatgctttctcaagttgtagttcatctccaaacaagaatttgcagttgtcatactctaccttgttactaaattatgcggtgctattaattgaaacaaaggatcaagaaggtcaatctcaagttctatcagcagctcttgagattgccgagg

SEQ ID NO: 26399 - DNA, 350 bp, Glycine max
agtttgagaggtacattgcatttacaatacatggattgtctctacatgaatcctcaggaatccattgaagcacgtgtgaaacaccttctttctcttatgactttgaatgacaagattggtcaaatgacacaaattgaacgctcagttgctaccccttctgccatcaaacacttctccattgggagtgtgttcagcgctccacacaatggacgtctcgagaaggtactgtcatctgattcggctgatatggtggatgggtttcagaagttggcacttgagtctcggttagccataccaatcatttatgggggttgatgctattcatggtaataatagtgtctatggtgcta

SEQ ID NO: 26400 - DNA, 683 bp, Glycine max
acgagaaacagccctaaagagagagagaggaaacccgcccatcaggccaacacctttcttcctttttcattctcaaattctcaatcaaatcgcatcacatcccattcatgcccaaattccagatctaaccaacactcccaaatgtcccacattcccaccgccggctacggcaccctcgccggcgccactcccactcccactcccaccggaattactccatccaccgccgccacctcctcggtgactccccgtccatggcgcgagtttctagacctatcagccctctcccgcccctactcctacgacgacgccatgatccgagtccgaagaaacctgagctacttccgcttcaactaccgccgccgtcacgctcctcatcgtcttcctcagcctcctctggcaccctatctccatgatcgtcttcctcctcgtcctcgtcgcctggtactacttctacttctcccgcgacgtccccctcgtcgttttcaaccaaaccctcgacgacagaaccgtgctctgcgttttgggattgctcactgtcgtttcgctcgtctccactcacgtcggcctcaacgtcctgctctcgttaatcgtctcggtggttctcgttggcttgcacgctgcgtttagggttaccgaggatttgtttcttgacgaggaaagttcgttgctttccgttgtgg

SEQ ID NO: 26401 - DNA, 613 bp, Glycine max
cagattcgttttgaatctcttatttctttcaggtgaaagaaagactttaagtatgggaaatgaagaatcaacacatgattctcatgatgattttttccggcaaccccgttcccatgatggaagttcaccgaatactagccatcaatatcatcaacccccttcctatgatggaagttcagcgaatactagccatcaatatcatcaaccctcatcatatgctgggagttcggtgaataccagacatcaatataagcagcgacccacatatatagctgacagtttcagttcattggatcaggttgtttctgctttaagagaagctggtctggaatcttcaaatttaataattggcattgacttcaccaagagcaatgagtggacaggcaagcactccttcaaccacaaaagccttcattttactggaaacactcctaatccgtatgagcaagcaatctctataattggccgtactctctcttcatttgatgaagacaatctgataccatgttttggatttggtgatgcatctacacatgatcagaatgtgttcagcttttatcctgatgagtgctattgtcatggttttgagcaagtacttgcacgctaccgagag

SEQ ID NO: 26402 - DNA, 329 bp, Glycine max
aagtaatctataagtttctaaaatcattggaaaattatgggttaatagtgtgaagcattggatcccagagaaagatctccaaaatgcgcgaggcagcatatatggacttgatggattagtatcaggtagggtgacctcctgtgaagctccatcaaggatgcctcggtcacgctctgtccaaaattgagaggccatttgtgtgtgctgtcgatgattgtcaggcaagttacagaagaaaggaccacctgactcggcaccttctacagcatgaagggaagatttttaagtgccctgttgagaattgcaacagtgagttctctttgcaaagc

SEQ ID NO: 26403 - DNA, 632 bp, Glycine max
ctagtcagtgttaggatctgagaaaacacacgtgactacgcgtgtaatgggaacatttggatacgttgcacctgagtatgcaagctcgggtatgcttaatgagcgcagtgatgtatatagctttggagttcttctcatggagataatcacaggaagaagccccattgattattcaagaccacctggagagatgaatttggtagattggtttaaggcaatggtagcaagtcgtcgcagtgaggagctagttgatcctttaattgagattcctccccctccaagatctttgaagagagttttattgatttgtctgcgctgtatagacatggatgtcgtaaagcgaccaaagatgggtcaaattattcatatgcttgagacagatgatttcccctttcgttctgagctacgttcagttagagagaaagatcctgtgccttctcatgcggacgtttccattaaagttccttatccaccaccaaagcatgcagaaaccgtagaaaaatcaagatggagataattgtttgtaatgttggtcatgcaactttggggatcaatctatttgtataaggattttcgtgatgttatgaacgagttttgagtctctgtgcatatcttatacgttgtagcttttt

SEQ ID NO: 26404 - DNA, 414 bp, Glycine max
tccccgccccctaattttcctaaaataaacaaattggaacgagggcccaaaattttcccagagcccatgtcaccgaacccaaagacgacgaactgaaacttgaggaagaagagaaaaacaagaccctctcttcttgtgtctgatcgaagaaaccaaccagtcagtcatgaattcgtgttcgtgatttgcgccacgctaacacacacttacttcgatttgaatcatcactctcttcactcctctctccaagtgcttcccacaatgatgtccccgaaccgcgtctcagaggatcggggcaccccaccacaacatttcagacacacaccctttcagataatccatattgttgcaaatttcatgaggatatggtcaatatactcgatgtaccgctacttcttgcagactggtgcttct

SEQ ID NO: 26405 - DNA, 396 bp, Glycine max
gaaacaacagattcattccatatgggaaaggatctgtttagtaatttaccagacgaaattctaggtcgcatagtttcatttctaccaaatgaatcatcgctagaaaccagccttctttctacaaggtggagggacctgtggaatgaagctcttgtcaaacatggaactcaagaggatatcataggtgttgttgctggttttatcacacgttttgaggagtttgatccattgaagcatcctagaaagcttcaatttcactttgctgaagacagtgtagtctcagcaaccgttgcaaataataacaagcttatgcttcatttttccccttggaaagaagagattcaaatggggtatgagttggagttcaagcaaactaagcaacacatagccacctac

SEQ ID NO: 26406 - DNA, 516 bp, Glycine max
ggggatagagaagcgaaagaaaccaaaccacaatgaaataaaaagccccttttgtagaacagtgatacattcgctttctatttcttcctcatctcgtacgtttcgtggatccttactcaacgcaacacaacacaacacagtggaaaaattatgagttccaaaggtgttggtgaagattgcctgggatgggcagcaagagatgcatccggagttctatcaccttacaaattcagtcgcaggactcctgggaatgaagatgttcttattaaaattacacactgtggtgtttgcttcgccgatgtagtttggacaaggaataaacatggtgactcaaagtatcctgttgtgcctggtcacgagattgctgggattgtgacaaaggttggcgccaatgtccaccgttttaaggttggtgaccatgttggagtggggacttatgtcaactcatgtaaggattgtgaacattgtaatgacagagaagaagttcattgtaccaagggatctgttttcactttt

SEQ ID NO: 26407 - DNA, 473 bp, Glycine max
attttctacactcagtgaagggagcgagcgagtcacgactcagtgagcgatggtgggcccacagtacgattttctggcgaaccctttgggcgccgtcagatccaccttcgacgccgccgtagcctccgttcccgatccctccgccttcgacggccgcgactggggcgtcttacccctcttccaacacttcctctcagatccgtccagactctctcaggttcctcttctgacccctgccaccatccaatgggtgaagcccaatactctcgttcggtttcgcgggatgatacaagacatgctcgggaacgaattctacattggcgcttataaggatggttcggtgtggaggacgaacaagtttatggatgtttctcaatctcttatggcttcttcggtggatatgcgaatctgggaacgtcgactgctttattgtgttccggttccaggactgagtccatggactcaagtttcag

SEQ ID NO: 26408 - DNA, 330 bp, Glycine max
ctttttcttcttctcaaaaaccctttgaaaaaaaaagatcttctaccgctgtcaacccccaaaaccacaccacccatgcttctcacagtttttccccgttgccatttcagcatctgggatcactacaccccaaattcatacacacctgtcaaatactctgcagccatctgataaacttttcttgcatcatggatcatagacttcatcttttttctgatgcatagctatctcttctcagcttctatattatacttttgagttaattctcacttacattgaaagtctcatcaattgtatctcctggacttgataatgagctgcatgctattt

SEQ ID NO: 26409 - DNA, 289 bp, Glycine max
ggcaggaaacgaacgcatgaatctgtcatcaagggaaaacctgcagttgatcctgacgagcttgtcaacattcaaactcctcccacactaaagaaacaattagttgatgattgtcagtttattacccatctcggcaagcttgttaacctcccccgtactcctaatgtgaaaggcatattgaaaaattattttgcctacagattcaagaaatgtggctcggtgggtgattcagttgaagaaattatgaaaggattgtcttgttacttcgacaaagcactgccagtgatgc

SEQ ID NO: 26410 - DNA, 348 bp, Glycine max
gaagcataagcaacacgagttgtaaaacgcgggaacgcaaaagcgcgcgggaggaaatgctgctgagtaccagtaacctacagttttctcgggtggactttcttcaaacaccttacgccacggaaattcaaattagctccaccactctgtcagcacaaatccgtagccactctctctcacttcggaatcctaacctcccgccaagacagaccagattcatctctacgtcgaaactcttcttcaatggaacaagcgcatgaatctcaccgctgttagagaggtgaatgaagtgatggagaggcacgtggaggattccctcgcgattttgcctccgctcagcgactgtta

SEQ ID NO: 26411 - DNA, 420 bp, Glycine max
gcaagaccagggatttggatagtgaggagctattggggcagttgcctgctttgcagcagctgctgtatcgacttgttggttgtcggccagaaggagcagctgttagcaattatgtgatacaatatgctcttgccctggtactgaaggagagctttaagatttattgtgctattaatgatggcattatcaatcttgttgataagttttttgagatgcccagacatgaagctattaaagcccttgatgcctataaacgtgcgggtcagcaggcagcaagtctatctgatttctatgatgtttgcaaaggattggaactcgctaggacttttcagtttcctgtcttaagagagcctccacaatcttgtcttacaaccatggacgagtacattcaggcggcaccacgagtggttacagttccaa

SEQ ID NO: 26412 - DNA, 574 bp, Glycine max
gacgttcccttggatgtcaggatggagcaacatagcaaggtcctagaagatggagttcttgatcctgagactaccatagttgccatatttccatcacctatgcattctgctggtccaactgaagtacagtggcatgcaaaggcacggataaatgcaggtgcaaatttctatattgttggtcgtgatccggctggtatgggccacccaactgagaaaagggatttgtatgaccctgatcatggacagaaggtgcttagcatggctcccggtctggagaagcttaacattttgccattcagggtggcagcttatgacactaaggtaaacaagatggcatttttcgacccaacccgtgctaaagatttcctctttatatctggaaccaagatgcgggcttttgcaaaaagtggggagaatccgccagaaggtttcatgtgcccaagtgggtggaaggttcttgtcaaatattatgaaagtttgcaggcagaagagccatcacaacagcctgtgctatctacttagacattcttctaaaagtagaagcttagcatcaattgattccaatgggagagtg

SEQ ID NO: 26413 - DNA, 516 bp, Glycine max
cctaaccccgttttctgtgaccccacaaatatctcattcccgttgtgcgtttctaaccgaactcacccctttcctccgatcaccggttaaatggttccggccaccggtgaccggcatcaccagcactttgattccgccgagccctaaccctaaccaaccaaccaagtactcttttcagattcatggatcctcctgattctcactcgcagtcccaggaacaggaagcgcccaagaagaacggcgtcgtttttgtcattctgcgatggatcctcgcgattctttttcctttcctcctctttctctcgattccctttctgcttggcttactggttctcatgttcgccgatttctccatccccaaccccatttctctcccctcacagtgcaaaatcgtctccactggtgttgatattaggtcatctaagatatgtgaacttggattgttagattataaagcacaggatgtgttccatcattttgaaagaagcaaatttcgctgccgttatgattactatt

SEQ ID NO: 26414 - DNA, 275 bp, Glycine max
gaaccaaccccgttttctgtgaccacataaatatctcattcccgttgtgcgtttccaaccgatcaccggttaaatggttccggccaccggtgaccggcaacacccccactttgattccggggagcccttaccataaccctaaccaccaacaagctcttttcatattcatggatcctccggattctcagtcccaggaacaggaagcgcccaagaagaacggcgtcgtttttgtcattctgcgatggatcctcgcgattctttttcctttcctcctc

SEQ ID NO: 26415 - DNA, 353 bp, Glycine max
acgagataaaatgatacatacagatattagtgatgaagacctggagaagctcttggatcgcagtgatcttatagtcaacgactctaacgatgataacttcaaagctccagtcagtgcctttcctcttaaagggccggggtgggaggtggtgattccaactgcgactgggggcatgctctctactcttaactgctagtttcttgtcactgtttatggccggagtttgaaaatcttcctttttgtggtataagatggaatggctttttgaaacattcttttatgtcacggtggtaatgccctggatggcattcattttttgtagatgcttctaacggaactatgtttagaaatga

SEQ ID NO: 26416 - DNA, 357 bp, Glycine max
gcaatgcctttcttatgctcttctcttgcgcgcaggatcgcgccatcaattatctgtttacgcatatcgatagaactattgactggggtgaacagcttcagatggtggtgttggagctgattaggaaggtttgtaggagcaataagggcgagaacgggaagtacattaagatcattatatcccttttgaatgctccttccactgctgttatttatcaatgtgctagcacccttgtgtcactctcttctgcacccactgccattagggctgctgctagtacttactgtcagcttttactttctcagagtgataacaatgttaaactcattgtgcttgatcgtttgaatgagctcaaga

SEQ ID NO: 26417 - DNA, 541 bp, Glycine max
  unsure (1)..(541): unsure at all n locations
cccttctccgatttaagctctttccggtcccaattttgcagattcgaccgatctcgcaacaggtttttctgtattcccttacttgatctcgcaatttgcttttcattttcatttgccggattgattcctcaattgcgcgctcatttgttagttctttttttttttcctctcaattttctggaatattgtgatgatttatgaatctgcctttaaaattatgacgcagcgtaatgggcccttcttgattggtttcttttttctgccatttcggcagtgtttaaggttcttgaaaaggcttcgcaccaaaccatagaggctgtaggggtttatagtgccagctctttcctcttgtggcatttgggtttttgtgacgtttggttgaagactttctgtctccatggatctttcagaccttaattccgctgaaatgcagaagttctactcttaggtaagcaagttcacactccaaattccatttcgaaacttcaccagcttcaacgctcgacactntntttctctctctctctctctctctctctct

SEQ ID NO: 26418 - DNA, 314 bp, Glycine max
ccatttaaccactctctaaaacccccttctccgatttaagctctttccggtcccaattttgcagattcgaccgatctcgcaacagtgtttaacgttctagaaaaggtttcggaccaaagcatagaggttttaggtttttatagcgccagttcttttcacttgtggcattagggtttttgtgacgtttggttgaagactttctgtctccatggatctttcagaccttaattccgctgaaatgcagaagttctactcttaggtaagcaagttcacactccaaattccatttcgaaacttcaccagcttcaacgctc

SEQ ID NO: 26419 - DNA, 338 bp, Glycine max
ctcatcacaagcctttctctacagtgtagtttacgtttccatggctcaccttgctgatctttgtcaaaagctgaaagtcatagagcaatgtcaagtttctcctccaccaggttcggttcctccaacctctcttcccctagccttccttgaccctccttgggtttactgtgacacagtgcaaagcattttcttctttgagtttcctcactcttgtaaccacttcttgcaaacagtgcttccagatctcaaacactctctttccctcactctccaacaattcttccccttcgttggaaaccttgtgatccctcctaaacctaacttccctcacattctct

SEQ ID NO: 26420 - DNA, 509 bp, Glycine max
gtcgggaatttaccttcctatccagctcgccaaatggagagaaactaccctgctccaatgcaagctgctgtagagccaacggaggactcgatcactacccttgtctctatgggctttgacaggaattctgccagacaagccctagtgcaggccagaaatgatgtcaatgtggccaccaacatcctactggaggcacagtcgcactaattccataaatgtagcgcataaatgagagccggattgttctgaattgatagatggaatcctaatcaatgaaggattagaaattcactaatcatgatgtgaggatgtttgtgaacttcaggcattcctatatagtatcatcctcaaggactcctgctttctgaggatcatttttcccaccttaacttgaatctttagataaaatatcttgagtactggcattgataggcaaatgagttaggatcctgtcccaactccctgcaacatatggaaaattatgcacatttaaatgaagagtgaatcag

SEQ ID NO: 26421 - DNA, 600 bp, Glycine max
gtttgttaaccctagattggatcgaatttttctgaaatatgatatgatccggctatgtctttttttacaaaaaaaaattgaaagtgctgtttttcgtaacaaatgctagatatgtatatgcatgtgatttcaatgaattgaaaaattcaacatggtgattggtgtctcgcatggttggtagattaccatgccccttaagcatgagatcagggattcaatctccaggttgttagatatgtatatgcatgtgatttaaatgaataaaaaaaatacccacatagtgattggtgtggtatgatttacagataatcatgtcccttaagcatgtgatcagagatacgatcttcatatccaagtgcatagaagatcatcatctgttgggaaaggtcatcccttaaaatggatttttgtaccttgagggattagattagtgtctggctctcggtcagggatatcgtgggcacctgaaatgaaatgaattgggaaaattatgatgcttgtatttctagtgatcgaagacacccataaaatggattcatcatgctttgattaattttagctatagtttctttatggagatcatcaggctataacaatttt

SEQ ID NO: 26422 - DNA, 609 bp, Glycine max
caccgaatgatttggatcagaaaagcattgaagatcagcatgaagaggacaattgtaaggaagttaggtgcattgagttagaagacgtaattacaaacacgcataaacactcaaactcagcagatttaaagatcacatacatacactgattcgaatgcatcatctcctagtgcaaacacagctatcttaggattggttgtagttgataatagagacaaggaaaaagtagtagatttgagttcttctctgtcaaaggaagacaaaagattgaacaatatgcaccaagattttgttcttccctctccaaaagaaatttctgtgtgcatgacaggaaacagtacaagtagttctagaaccttgaagttgagccgaagtagaagttgtatagcaagtatcatgaggaatttatcttcagattggtttgaagatgaagacgtaattcagaacactcctccaatggggaagaaaaagccttccctggaagaccagagggctttccgaagaacatttatgcactaaattacaatgccaatgcagagaggctttcatgtaatggccatgggaattctgtgcaaaattcttctgttcatgatgttcagaatgtgaaat

SEQ ID NO: 26423 - DNA, 556 bp, Glycine max
caagcagttaacgttgttattaattttgattttcccaagaacgcagagacttatttgcacagggttggtcgttcagggaggtttgggcacctgggtttaccagtgaacttgattacctatgaggatcgctttaatttatataggattgaacaagaacttggaactgaaataaagcagattcccccacaaattgatcaggcaatttattgccggtgattggctgtaaataccatggttgtgtttaccattgtggctaatagcagtggttagtgtgaccgtggctaaagtaggtgcaagaaaggatttgcaaagcaagtgacaaattctgtattagtggaccctggtatgggaggatgcactgtcgagaactgggtattattggacccattaattgagtgctttcggattaattccagtttgggtttctgttgattacatttgcagaacggtcgatcattttaaataaattaaaataatttatagtatgtttggatgagtgttaataaaattgatttggttaaaattaattttgaagtgatggagatgtttttttttt

SEQ ID NO: 26424 - DNA, 602 bp, Glycine max
atttctttttctgaaacccattctcattctctctctttctcagccactgtagtgtgtctcttgacacagttcgttagccgcaaccctttggctcctccttccactctcactctcactctgttttcatcgtcctcaaccaacgccatgtgctcttagttagacctcccagaggttcttcgtagacaacacagaagaacgatttgttccgttgttttagtagctcttgaaatgaaaccacaaaccaatgggatgtctagagctcataaggcaaataataatacacagtttgaagggcctaactggcttatttttgctgctggtgctttgttgagtaccctatccattcgcctcggttacaagttaaagcaggcagtcgactccaagccgaagcaaaatgcaactactggtcagaaaggtccttatgtactgtttgggggacaccattctcccccttctgcgtttaatttttttatcctaagtgggaaaataaactcaacttaatagtcaaaatggtttagtgcctttgtctattgtggattcttacttcatattatttgttactacaggaaatggaaaatccacccacacaaaaaactccacag

SEQ ID NO: 26425 - DNA, 765 bp, Glycine max
ttatctccctcctcactctccattcaacttcttcacttcagtgcctacaatactggttcaactttcaagtgttcaaatgggggcaatttcaacaccccttgtgttggttcttctattttgctgcctggtttctgtttcacaagcagaatacttgaagtacaaagacccgaaacgagccactgaatgttagaatcaaggacttgctgaagcgaatgaccctggaggagaagataggccaaatggtgcagattgaacgaagtgttgccaccccacaagtgatgaagaagtacttcattgggagtgtgctgagtgggggagagagtgttccagaaacaaatgcatctgctgagacttggatccaaatggtgaatgggatccaaaatggatcttttgctaccccgtcttgggattccaatgatttatggaatagatgcagttcatggccacaataatgtctacaaggcaaccatctttcctcacaatgttgggctcggagttaccagggatccagtactgataaagaagattggagatgcaactgccctagaagttagagctactggaattcaatatgtttttgctccgtgcattgcggtctgcagagatcctagatgggggcgttgctttgaaagttacagcgaggaccctaagattgctcaagcaatgactgaaattattcctggtttgcaaggagacatcagtagcaattcaagaaagggggttccctatgtttctggaaagaacaaggttgcggcttgtgctaaa

SEQ ID NO: 26426 - DNA, 295 bp, Glycine max
ctaaattcgcactttgcgctcaccaacacacacagagtgaggactctgcatgttgtttgcgactacaatgaggtcatccagttgtatgactagtgcacaagttaaatctcttgattatgtcggttcacgagtttctaaagttgctctcgccgcattcttttacaaaaccacgttctgccagaagcaatgctgtccaagcttcttcagttttggtcaaccttgtttaactttcagtttcaagaggatgacttggtcagttagaagcagcttaaatgacagcagttttagtccttct

SEQ ID NO: 26427 - DNA, 286 bp, Glycine max
cggatcaacttttgaagatgaaccatctcaaaatggaagttcagtacatgctcctcaaaatggggtacataatagacctcagacagttgttaatcaaactatgtctatcttacctatatctaccacaagtgctcctggagcagttcctggtcccacaactaatttaaatataggaatggattattggggcacaccaacttcgtccaccattcctgcattgcatggaaaggttccttctactgcagttgctggagggatgattgctgctggatcacgagatggtgtt

SEQ ID NO: 26428 - DNA, 325 bp, Glycine max
caaacactttctcccttttcatggttttcttcttcaacttcttgtcttaaatgtgcaaagactagataacattatttgacaaaggagggaatcttgatggggtctaagaaaatgaaactcgtgttttggggttgggatgcttgaagaagatgtttctgttcatgcaaaagtagtcaacacaactttggtgttgctcttttatttggcatggtgtaagcaaggttggaatgccttggcttcttctccttgttggtttttcttataacaaatagccttgttgttcttttacattcctgtaggttcacaatggagaagatatcttggt

SEQ ID NO: 26429 - DNA, 450 bp, Glycine max
cttgccctcaccggcgcggccaccaaacggtgcaacgccaccagcgtttattcacagatcacacggcggcgacgacctcccttaccagcgctttgtctcgaaaacgcgcatctttgactcacttcctcacaggcacggatcgcgctgcgccctccctcaccgacgtcaacgtgaccggcttctggtggcacatagcgcactgcactcgcacaaagccaacacttcctttgaactcacgcgttcctggtggagacccaaaagttcgaaactgaacattttcacaagctttcggagggcgttgatgagttcggtagctattttgctttcagagttctcaggtgcaaattagggttcttaaccatgagtattgattatttcaagcaggacattgatgaacttatcggtgaattcacccaggatgagtcaacaactttggctgagataaaaaga

SEQ ID NO: 26430 - DNA, 341 bp, Glycine max
gtgtcgcgttttctgacacgtgggctcgctccctgcctcagaaaccatggccgaatttgccatcaacaacaacaacaacggttcccattccagcattaacagcccccatcctgattatgcggagattgttgtggtgcgtcatggcgaaacagcttggaatgctactgcaaaaatccaggggcacctggatgttgaattaaatgaaaatggaagacagcaagcagctgtagtggctgatagactatccagggaacctaaggcctctgttatatattctcctgactagaaacgggctttcgaaacagcactgatagttgcatccaagtgtggagggatcgagg

SEQ ID NO: 26431 - DNA, 603 bp, Glycine max
ccaacattgttgtcctcctcacagactcccatgcctctttccaaacccaaccaagaagtaaagggctgatttcatggctgttccctaggttgaagaagaagcataataagaatgtgagttccccaagcagaacagaatctgaggaagtctctcaggttctcaaggacatggggatagtgtcagttgaggcactgaagagggaactgatggtggcaaatgagagtagagatgctgccttggtggaagtttctgagatgagatcttcacttggagaactgaaacaaaagttggagtacgtggagagttactgtgaagagttgaagaaagctttgaggcaagcaatactcacaagagaaaccacattttctgaaaagcttaatagccctccctcagagaggaacaccaccctttgatgggaatggggaaaatttgatgcctgtgggtgaggatgttatggttgagggcttcttgcagatatcgtcagaatcaaggttatcagtgaagcaattctgcaagacccttatatgccagattgaagaaactgatcattctttgatggacaacttgaacttgcttctccaaccatataagctctccttgaat

SEQ ID NO: 26432 - DNA, 1111 bp, Glycine max
  unsure (1)..(1111): unsure at all n locations
cattgcacatgtggtcgcccttatccagatccagatgctgaagaacaagtagagatgatacagtgctgtctatgtgaggactggtttcatgaggagcatcttggtcttgagtcttctgcggagattcccaaagatgatgagggagagccaacgtatgaagaattcatatgtaaggcatgctctcacgtatgcttctttctaaagttatatcccgaaaaaatatgggcggctggaaagcagccagatgctactgtccaaattagcaaggacaaaggtgtcttggaagacatgccttcaacttgtgggtctgaaaagccaacatgcaatacttcatgtagttctcctaaagttgatgatgcacaagctactgttgattccaaatctatatctgatgggaagagtttgtctcagggagaaaattgtaatggcagtatggcttcaaatcaatgcacaaaaagcaccgacttgcatgttaattgtctccttggtgttaacattattactgttaacccagttttacctggtaaaccaatgttcctttccaaaaattggagagatgctctatgcaaatgcaataattgtttggagttttacaagcagaagcagattgcttttctacttgacaaggaagactcaattgcggagtatgagcaaatggccaagcaaaagagagaagaaaaattgcagcaacaagagggtgctgagttaagtttttttaataaacttggacatgtagagaaagtggagatcttgaagggcattgaagagatgaaggatgggcttcgtgctttcctggagtctgcagactcgtcaaagccaattactgctgctgatgtccaccagttttttgatgacattaagaataagcgtcgccgtgtacagtgagtttttgatgtcttggctgttcaaggacgttgttagtaaaaactttcaaactgttaagagtttatttgtattgtctgatgttcgaaactaaaagcctgcttgctttatgaatatttatattaaaatgctctacttgtatcaactcttgacttactaaactcgttttggttccttaagagttnnnnnnnnnnnnnnnnnnnnnnnnnnnnnnnnnnnnnnnnnnnnn

SEQ ID NO: 26433 - DNA, 473 bp, Glycine max
agaagaaaaagaagaatatgaagaggaaaacctatgggtcagatgatggcaagtttgtagaccggccttctcgcccaagaaagaaaacagaggatggacttaccatctacaccgaagaggagttaggtattagtaatgcagatgctggaaatacccctctctgcccatttgattgctcttgttgcttttgatggtagctgtataatgttatatgcacttaattccttgctgtggtgattgacagtgttgtgattgtcacttacagtcttggatttgtaagctagggacatagcttttcctttattacatttatagttgggcctaaaatggcttgagttatcatgtgctaagcttgaattctttagatctagatatgattcatcaggtgatttcaggtagaattttgcagcaattgatctgcctcccatgtaacacaattgtttaagcattacactcatgccagcatttttgag

SEQ ID NO: 26434 - DNA, 633 bp, Glycine max
ctgtaaattgttcgttgggagccccaccaattcaagagttttgggagtgggagatgggcgattggagaaagagtagagcctttcgtattttagccattgatagaggtcatgtttcatatgttgatgttgatttcaaatctgggaccaaacgtgcaattatattgcccacttttccattagactctcgcttcatgttaacatcttcatgccgtcacaactatgaatgtcaatctgtgtccccttcatcttatgaaacaattcgagctctggtattttctgtttctccaattgtatcagttgtagctagggtctatgattcacgatctggaaaccttgatttagttgtagaaacacatatgatcaagcatgctggtgataactccaggggggacctctatgttgctccatggaattacagagcatttgaggaatgttctcctgataggttttggcttcaaatcgaagcaaatgacattgcaggcagatcaactttgactgaattgaggccgttttctatcaatggtcatagcctcaaactttcatggggctggaaggagtttttggtcatgggatgtcaatgggcttccctttattacccattattttggtctgctctttactttttgttcatct

SEQ ID NO: 26435 - DNA, 288 bp, Glycine max
taaaacttgaatgataacccccggcattgggaaagatcctgcaacaggtaattttggaatcaaccaaaataaaccctttgagtatttgaagtctgcgagaacaccagttgttatatgcaaattagtcagggttactgaataggtagtttcagaatcaaatgtcccatgccttaagctatgagctttttgcattttacattccccccagttcggctgtaattttcagcgggccgaatgaattttggggagcttttaaccaaataaagttttttttagccccccgccgcc

SEQ ID NO: 26436 - DNA, 359 bp, Glycine max
tctcgagccgattcggctcgagcgactgtctcaatctgttcgacgacaccgtttcggagctcgaaaccaccatcgcggatcactcacagagcacaataggaccgaagcgttaccacgacgcacagactttgttgagtggcgcaatgaccaacttgtacacgtgtcttgatggctttgcgtacagtaaagggcacgtgagggacaggtttgaggaggggctgttggagatttcgcatcacgttagtaactcgctcgccatgctgaagaaattgccagctggagtgaagaaattggcgtccaagaatgaggttttccctggatatggtcagatcaaagacggctttccaacgtggctatca

SEQ ID NO: 26437 - DNA, 414 bp, Glycine max
caagacccaactgaggaatggtactacaagactttctttgatgctggtgaatttgcattcggtaaatctatggtttctttggtgcctttggaagattgtccaccacacgcacagttcctagatgcatattttgctgcaactgatggtagcccacaacacttggagaatgcaatttgtgtgtttgaacaatacggtggtatcagttggcgtcacactgaaacaggccttgatgagatatttacagaagtcagaacagatgtgagtctaattgttagatcaattgttaccgtcggcaactacgacaatatagtagattgggagttcaagacaagtggttcaatcaagccctcgatatcactatcaggcattttggaagttaagccagtggacattactcacacagaccaaataaag

SEQ ID NO: 26438 - DNA, 486 bp, Glycine max
acagaatgtggcaacatggacaaaaagattgtggaggttaacggcaatgctaaaaggaaacaatctgattatgaagcacaatatcctaacaaatcaccgaagaacgatcatgatgataaacattcatcgccaagcaatagtttgggctcttttaaaaaaccgagtggagataagctggactggaaagttcttagaccatctagtgttaaacaaagtagatgatgactttattgattatttgatagcgtaaaaattatgccaggtttggttctgtttcaggccttgggcatttatatcggtagtcgtggttttgttaggctgtttatccattggtataaagaccttcacaatttcttgttaaaattcaggatttaacctgctgatctagattgaatacttttagattaaagggctaaaccaaaagcctcgtgagtgttttttttttatcatcatatattgtactttatgaaactgccggtctttgga

SEQ ID NO: 26439 - DNA, 464 bp, Glycine max
cccacgcgtccacaacacaacaaactaaaacacacaccctctaagttcattaacctcttcaacatcaaaacttgtaatattttaatggcaacacgcgtgatccctccaagaatcctcaagaatcttcgttacaacacaacaaccaagcccctcaacgccgcccaaccctccatctctccggccatcgcctcaccgtcgctcttcgagaggtcgccgtcccctcctgccgcggacgtcattccggcatctgcggctgggacggcagcgctcaacctggacgacgcggagcggctattcgcatcggtgtcgacaaagaggctgctccggtcgtccgcagttctgcacgcgacggcggtggggcccatggtggacctgggaatgtggatgatgaagtcgagggtgttccagagcggtgtgctgaaggatctcgtcatggccgtcacgaaggagacgttcttctcgca

SEQ ID NO: 26440 - DNA, 454 bp, Glycine max
tccggatttggcggtggtgttggaggtggggcagggaatggtggtggtctaggatgtggaggatgctttggcggtgggggtgggagtggtgttggagttggggttggacctggtgctggtcatggtgttggtgttggtggtggtggtggtgttggtggaggaggtggaggtaaacattaagcatgcatgcatgaggttatggagctttagctaaaccatatttggatgttcctcaaaaagagtcctttatgtgtgatgactatcatatagtgcatatgttgtcttgtgagagttatatggtttggaacaatcctattacaattacgagagatccatgctacttaattagtcacactactatccactcgggagttcgcaattttcttttgtaataatgggtaatttcttgtcaacagttattgataatgagaaaaaatgtcataaattaattact

SEQ ID NO: 26441 - DNA, 516 bp, Glycine max
ctttctccagaacactcaacaacagtaatttaccattaccccctcgtaaagcgcatagacgctctaacagtgacattccgtttgggttttccaccgttttgcaatcctctccgccgcttatccctcttcggaaccccgtttcagcgaaacctgctcagttagtcaaaagagaaacaccgtgggacaggggtgttgagaataataataataataatgtagaggggtccggggagaagaaatcccctgaaggggaagtggtggatgatcttttctctgcttacatgaatttggatagctttgatgcgttgaactcttctgggacagatgataaaaatggaggcgaaaatcgcgatgatttggatagtagagcgagtgggactaagaccaatggtggtgacagtagtgataatgaggccgaaagtagtgttaatgagagtggggatggtggggtgaggcagggagggaatgagaagagggacaggatgaagaggagtgctgggggtgagattgcgccca

SEQ ID NO: 26442 - DNA, 236 bp, Glycine max
gactactcctattatatgaataaaatttaattgcaataaaaattcctgttatcatataaatagagatatgcagagacaacacacaagatgtttcagagaagcctttaagctttcaaatgctatataaccttgacagagtgcacaagcttttagcttttatttacataaccttgatagaaggaagaggacagagtatgctccaaatgtatttcaagattcaatggtgatcgcctagt

SEQ ID NO: 26443 - DNA, 328 bp, Glycine max
gttccttttcaccaatccattttctgacttttctcactctgctcatggctttgcttttcttatcatcacctattctcttggaatcatagttagttatcttttgcaacgtaaataccaacaataattatagccaatggaggaggagagcgagtttcttttagaaatgaagctaattatcatctcgttatgcactgaaacactttctcttctctctgttcactcttcccaacctctgttttcatgcattgtcactttctgtttcttgattctcctttatttgcctcatctattttggaagatagttttctcacccgtgctgattctgtcc

SEQ ID NO: 26444 - DNA, 351 bp, Glycine max
ttcttcctcacgaaccctaatctctaatctcatcatctattgagcgtttctcatctcattcttcactccttgatgatcgcactctacatttcccttcctccccttctcaattccccaatcaatagcaaccctcgatcccttattcctcttccaatcgcacctaaagataaagaataaatactcgttcaaacccccaaatccctgaatcccaattcactttatcacacactctctgtttcgatcatggacgtggacggtggcaacaagcgcgtgtacaaccgcctcggtggggacgccaagcaccagaaagtgtgcttccactggcaagcgggcaagtgcaaccgctacccg

SEQ ID NO: 26445 - DNA, 559 bp, Glycine max
atcagttacacccctggtgatgccgtttccgtcgttgttgctgagtccaatgctgaattcaaccacttcatagatttctcagtgccccatgaagcaacagagtctcgttttttagtaccccacttggaatcctcggattctcgtgcttctgccctagctcttcagatcactcttttccccaacaaaggcttcagcattggcatcagcatccaccatgctgctgttgatggaagatcttccaccatgttcatcaaggcttgggcttctctgtgccaacaaattattatgaacgatgaaacaacatcacaaagtgtggtggtgccatctttggtgccggagttggagccttcctttgacagaacactcatcaaagacccgggaaattggaaccgcttcttgttagcaaaatggtgcctaatattgctaatggaaacagtgatggtgatgataatgggaagcgaaccgtgaagattctaccttccccaccaagactcaagcaagcgttttcagccacgtcagtcattaaaccaacaattgaggaagcagttagagccacgtt

SEQ ID NO: 26446 - DNA, 484 bp, Glycine max
ctcgtgccaaagaggcttattgaacacttgcagcagctagagccacaatttcaatgcccctgattagtttgtctgtccatcacagtacatagtataataatcataaaccctttttctcagcgaggcacacagtatcattactacactttttttttcactattgttttacgcagtcctcaaccccaacaacatagagagccataatacccttcttaggcacaacaatatggctttgtaaaatgggaaggagtccttgctgtagtcatgaggaattgaggaaaggggcatggacggttcaagaagatcagaaactcattgcttacattcagaaacatggcacaggaagctggcgtaccttgccacaaaaagcaggtcttcaaagatgtggcaagagttgcaggctgagatggtttaactaccttagacctgacattaagagaggaaaattaagccaagaagaagagcagacaattataaaacttcc

SEQ ID NO: 26447 - DNA, 468 bp, Glycine max
ttgttttctcagttccaactaactcaatcattcatcaactcaactaattcaatcattcaaagtaattattaaaatgtgataaataacttcatcttttaaatataagatcagtaggttaaatttttaaatggtatatgaactgataaaaaaaaattattagaaaaaatcagtttcttaaatgaatttttttgatacttctacagatttgtctttaatttttatttgagaatgtcatgagtttacactcaagaaaaatcgttttcgtgtaattattacaaattaaaattctaaagaattttttgtacatgtatagctactctcgtaatgggagtctcttgcatgaggttgcccttgaactaattcaactcccacacttattcacattcaatgagttgtagttggatggtccaaaccttgatcttcctcgaccgtgacaatcttttatctgtgaaagtgaaagcatgcatc

SEQ ID NO: 26448 - DNA, 616 bp, Glycine max
ctcgagccgctcgagccgcgctcactctagaattttttacctctcacacttcaccttcttcttcttctttattccttgctcttcaatggcttccgatcttgagcttaaggccaaagaggctttcgaagatgataactatgatctcgcctacgacctcttaactcaggccattggtctcagccccaacaacgcagacctatatgctgaccgtgcgcaagtcaacatcaaagtcaacaacctcaccgaggctgtttctgatgcaaacaaggcgattgagttgaatccttctcactcaaaagcatatttgcgaaaaggtaccgcatgcatcaagcttgaggaatatcagactgctaaggcagctctagagatgggtgcttcattggctcctggagattctaaatttactgatttgatcaaagactgcgatgaactgattgcagaagaatctggtgtcatacccatacaagaacgagagcacaacacagggtgctgctacaaaagctgttgaggcagagaatgatcttccagagccacctacagtaaccgtggttaaacctaaatacaggcatgaattctaccagaaacctgatgaaatggttattaccatatttgcaaa

SEQ ID NO: 26449 - DNA, 396 bp, Glycine max
ctctaaagaattgaaagagcatgtgatcaaacctgtcatcccagctaaataccttgatgataagaccatcttccacctcaacccctcttgtaggttggtgattggtggaccccatggagatgcaggactcactggaaggaagatcattatcgacacctatggtggttggggtgctcatggtggtggtgccttctccggcaaggacccaaccaaggttgataggagtggtgcatacattgttaggcaagcagccaagagcgtggtagcttcagggcttgcacgacgttgcattgtgcaggtttcttatgcaattggagttccagagccactttctgtgtttgtagacacataccaaacggggaagattccagacaaggacatattggctctaattaa

SEQ ID NO: 26450 - DNA, 290 bp, Glycine max
ttgactgtattgcttatcaattactatcactattaatggcagttcttagttctggagaattccttggggcatttcttgttttcgttgtaatccactactggaggctcaacagacacaccccaattgctaagtggcccattcttggcatgttacctggtgtattcctcaacatgcccaccatctttgattatataacttctgtcttgaaacgtgaaggaggcactttcatgtttgaaggaccatgcctatcaaacatgaacataatgtttaccagcgacccaatgaatgtg

SEQ ID NO: 26451 - DNA, 640 bp, Glycine max
gagcggcaactggattcatctctcaagcaagtgaggtccacaaagactcagttcatgctggaccagttagctgatcttcagaataaggagcatatgttggtggaagcaaacagatctttgaccatgaagctggaagaaatcaattcaagaaaccagtataggcaaacatgggaagctggtgagcaaagtatgccatatggaacccaaaatgctcactctcaaggcttcttccagcctttggagtgcaaccccacattgcagataggttctgactacaggtacatccctgaagcctcagagcagcagctagctgccacaactcaagctcaacaagtcaatggatttattcctggatggatgctttgacctaagatctcagtattttagatggctacataaataaaattagcaaacacctaaggccaaagtcaaaatgcctcttgctgttggaaatgtgtaaatgctgcttgttcttctgttaatttgttttggcataaaaacagcagtgactgacttaaaactattaaaactttagccatagacataggatgtggcatgaaggttatagtattttgaatatctttggaggacaagttttatctgactgaatgacctgttatgtcatttttcttttgcaatc

SEQ ID NO: 26452 - DNA, 474 bp, Glycine max
ctcgagccgcttcccttctcttcacatctcatctaaatctcaatctctgtctctgtctctgtccgcctcagctttcactccaaaccctaaccaaccgatctctttcgcctatcccggaaaccttccgaatcgtttaattgacgctacgccgtggaatctgggcggaacaaatccacgatggcggcctccaccaccagccaggtctacatccaggtaatcgacgatgtcatgaacaaggtccgcgacgagtttgtcaacaacggtggtcccggcgacgaagttctcaaggagcttcaatctatatgggaatcgaagatgatgcaagctggtgccattgttggtcccatagaaaggtccggggcgcctaagccaacgcccggtggtccaattactccggttcatgatcttaacatgccttatgaggggactgaggagtatgaaactcccacagcggaaatgcttttcccccctacg

SEQ ID NO: 26453 - DNA, 424 bp, Glycine max
cttttaaagggtttgattaatttagagagatgggtgggagcaagaagaggaagagaaacgaggggcaacggggaggcacagtgtattcagaaagagaaaacccaccagactttgctcttttggcttctctctaccctgaattccaccctttccttcaattctcgcatcctcactctcgccccaccatcgattggaccgacttcaacgccactcgccaactcacgcgcgtcttgctccatcatcgccacgctctcacctggtggattcctgatggacacctctgtccaactgtgcccaacaggtgcaactacattcattggcttcaacatcttctctcatcaaacatcattcgaaacaccgtttcaagtgatggcaagttcaggggatttgacattggaactggagccagttgcatttaccccct

SEQ ID NO: 26454 - DNA, 308 bp, Glycine max
gctggatcatcagagcttaagctacggcttgatggtgttcagaagaaatggggtaaaccaatgtattcgtcttcaacatcatctgcctctgtctcgtattctacttcccaaaaaccaacgaatggggcaactcaggtggatggtgctacaactgtcaattcaaaagtgcgtgatagttatgattcaagaaagacacaggttgagattactccagaaaagcaaaagcttgctgcttctttgtttggtggttcaactaaacctgagaaaagatcatctacaagtcataaggtttcaaaatctagtgctag

SEQ ID NO: 26455 - DNA, 355 bp, Glycine max
tctattctagaccttactttttctaactcctatctatctaatctgactgttcaaccaaacaaggtacaacctcactcaccgtccgttgtgttttgttcatctcaatgtatctctggggctgacaaaatgccacaagcttgaacaaaggtacattcattttgtgccaaaactctccaaaataattctcttattgggtcatcaactacaaggacaaaacagctggcagagtccagctgttttgtgtctgcatcagtacaagaaacctggtggccagagtaattcttttatgaagcctgcgattgtttctgatagttgcttatggctgttcttaaaccagtaagttcttgctttggag

SEQ ID NO: 26456 - DNA, 415 bp, Glycine max
caaatatcccgtgaagtggatcccacaggggaaagaacatttggagtcttgacaaagattgatcttatggacaagggtactgatgctgttgaaatgttggaggggagagcttatagattaaagtatccgtggatcggtgttgtcaatagatcacaagcagatattaacaagaatgttgacatgattgctgctagacgtagagaacgtgaatatttttctaatacccctgaatataatcaccttgctaacagaatgggttctgagcatctagcaaagatgctttctaagcatttggaggcagtaatcaagtccaaaattcctggtattcaatctcttattagtaaaacaattgccgaacttgaagctgaactgagtcgtctgggaaagcctattgcagctgatgatgggggaaagc

SEQ ID NO: 26457 - DNA, 424 bp, Glycine max
gtcagggactcagaagagagagatcacaaatatcacgtacctactactcctagcaaaaaaatcacacaactcgtgctgcggttcagaaagactgaaactttctccttaaaaacttggtgggtattaatgatctttgcctccctgagtcattacatgaagattctctacttgggtgttcaaaatgttggttactgaggacaagtctcatgtcgttgttgccatagacaatgatggctgttgtcaccggagctctgccggcggcgagggtttcgccgacgccggcgaacggtcggatgaggagcaaaggtcctctcatgattctggcaccgagattgtgggagtgtgtgagaaggagagaggatcagagtgttctgtggaggtggatctggttcctgaggttaaggtgcatttggccaatgtgaga

SEQ ID NO: 26458 - DNA, 720 bp, Glycine max
aagccttacagatttctggaagacaaatgatgattaacaataatgaaaatatggccggggtaatgaatcacactgattatcttaacgattgtaaaagtgtggtttattcatatctttccaaaaaactatcatttagcgccgcaaatactgcattccgtatactatctgcttgcaaagtcaacaaagtttgtcctttgacttttaaggagccaacagaagtaattaatgcatgttggaatgtagctgcccccagcccttcctgttgtagttcattaaacacatatattactgggatacaaaagcaaatgttaattacgaataagcaagctataatatgtgcaacactttttggatctatgttacgtggaggtggagtgatgacaaatatttatgagctttgtgacgttgatttgaaagatttcagcatacaagttatggacaacaaggctgtttacttcgaagcttgcctggagatgtgatatttgacaattcatcaggctttagctttacatgtgatttgagtgataacattgctgcgccctggccttcttcatcatcttcatttgcatctatgtcactctgtgcacctgagatgtcattacctgctctcccaacttcttctcagacactagaaaataatggttgtacttctggtggagtgggattgcttctgcttattttttcatctttcatcttcagtacactgttgtattgaagata

SEQ ID NO: 26459 - DNA, 867 bp, Glycine max
ctcgagccgattcggctcgagcccagggacatctcacccattcacctttctcctccactctcatagctttattagctttcctctcactctaattctctacccccaatcaatctcaaaatttccaattcttatttttaagaattgaacattcttcaaatggcatcgtcaccttcatcatcatcgtcgtcgtcgtcgtctatggtctcaaatccagttccgaacacggaccggtcacgtgacgcgaaacggaggaagaagaaagcgcagctgaggcagcaactacggcaagaggaccagagcaatcccaagtggaaatcccaagcgcagcaacaaatctactcctccaagctgcgccaagccttagccagagttaacctacgggtcgtcgcgcgccgccgcgccgaggcaaagccgtgcgcgacgccgccgacagagtcctagccgtgacggccaaggggaggacgcgctggagccgagccatcctcaccaaccggctcaagctcaagttcaccaaacacaagcggcagagacttacaacgcccccaacccggtcaaagaaaccccgggtcagcgtttaccggctgaaggggaagggttcaccgggcgtgcagagaaaagtgaggttcctcgcacgcttggttcccggttgccgtaaagaaccgttaccggttattttggaagaagccattgattacatacccgcgcttgagatgcaggttcgagccatgagcgctctctttaaccttctctctggttcttcttcttcttccggcgccgccgcctccccttccgcgccacctagctcgtcatagaagacacttttggctctaggcctttatgtatgtatgccatgccatgtcatgtgtc

SEQ ID NO: 26460 - DNA, 466 bp, Glycine max
acgagctgcaactgagcaatctgacaaaatttaataaataaaagcaaaggaaaccacttccccctctctttctctctgtttcctctgccactccccatcactattccaacctccattaagcccaaacaaaatcatccaaatctctctctctctgtgcccacttgtgtatactggctctcccaaccatggaagctttcaccttgctcaaatactggagaggcggcggtgctctcggacacccaccttcctccgacactccctcttcacgcaccgccaccaccaccaccatcctcaccgccgtcgaaaacgaaaatgcaaccgaaagcgacgacgacgacgacggccccttcttcgacttagagttcaccgtccccgacgaagacgctcatgaaaatccaaacgcgaaccacacccaagaagaagaagatgaagatattaacatcgaagaatccgacggcgagagaga

SEQ ID NO: 26461 - DNA, 301 bp, Glycine max
acgggtctctatccatcaaacaaacatctgcatatatagagagagagaagaaccatggctggtggtcggttccaatctcttctccatgccacttcaagatcctccttggtaaagtctagcagtagcaggccattcttcaacaacattatgaattatgggcaagcgagcaatggaactggaaaccgtagtaaccgtttgatggaagagagggcaccttccacagctgaagagttccaaagagttgcagaggaaaaagccaaggaaaccaaggaagaggtggcaaatcagaatgttgaaaagt

SEQ ID NO: 26462 - DNA, 471 bp, Glycine max
cttttcaaaaccctctcttatttcctctttctgaacattactgtactttgttgtcatcatggagaagaatagctactaacgttgttcagactttggagcttcctttgtttgtttgttgtctctttctgtgtttcaggtttggattttgaaattgtttacgcattgccgataggtttgctcaaagtaaactaaagggaaataaaaaaaggaaaatgatcggaaacttcatcgacgacattgactgcggcaacttcttcgaccacatcgacgacctcctcgaattccccgacgacgccgccgccgctgacacctccgccgccgctcctgtccctccaccggcgaacttctggtccgccgagtccgactcgctccccgccaccgacacggtgttttccgacaactccgtgacggacctctcggccgagctctctgttccgtatgaagacattatgcaattggaatggctgtcca

SEQ ID NO: 26463 - DNA, 265 bp, Glycine max
caaaaccttaaaaacaaaacatactaaaccttctccttttcttttctcttccattttcccaactcacacttctcattttctcagggaactaaaaaaaggaaaatgatcggaaacttcatcgacgacattgactgcggcaacttcttcgaccacatcgacgaccgcctcgaattccccgacgacgccgccgccgctgacacctccgccgccgctcctgtccctccaccggcgaacttctggtccgccgagtccgactcgctccccg

SEQ ID NO: 26464 - DNA, 608 bp, Glycine max
ctgtcgcgtgggttttgaggtttagcacctccagagaaaaaggaaggagcagaacacgacagagtgagggaagctttgtaaaattcttattgccttttgcttgttattacaaggttcttatagaattcctagtacagaatgattctaggaatattacaataaccaattctgataaaaagttgctccgcaggaccaacaatttcaagcaaggcgatttggagaagatttggcagaagcttctgttttgacagtttcctcagacgaaatccagacgaaatcgtgaaggggaacctgacagaggcagttaacgaacaaacagatgggttgggccatagcactacacggcggcgccggcgacatcccgctttcccttccaccggagcgccgccagcctcgcgaggaggccctccgccactgcctccaaatcggcgtggaagctctcaaggccaaactgcctcctctcgacgtggttgaacttgtcgttcgggagttggagaacattccgcagtttaacgcgggaaggggatctgtgctgacttgcagaggcaccgtggaaatgaagcttccataatggacggcaccactatgaattgcggagctgtttccgg

SEQ ID NO: 26465 - DNA, 421 bp, Glycine max
atggcatagagtaggtggaagttgacattaggatgggtggccatgcgtgaaaggaacacaagaggagtcttcttggtggttatatatatatgcctattgaacttgtcatagagaagagggttgatgaggttagcagttgtaggattctagaggataaggctattttatgctacaaagcaaactaataaaaacctatggaggaaataacttcgactgttgcagtgccattcacactagagaatttaatacaaaaagagccagcagtgacaacccacatggagataactggtctcaaactcagggcaaatacatcaccacctttgatattaaatccttcaattgaaattgaaaagcacacagatattggtccacaaccccaaattaaagcgtcttcagagggaacggagaatctggttggagc

SEQ ID NO: 26466 - DNA, 336 bp, Glycine max
cggctcgagatttaaataagagtccaaaacaggtggattaagaaaggggtctagagggttattctacttatagtttatagcttcactgtcttcaatataacctttgattttctgaatttttgatgcccaaaacctagcatggttacactgtagaggagattgttctaagatcttttggtttcttgccgtaggagtcttcttggtggttatatatatatgcctattgaacttgtcatagagaagagggttgatgaggttagcagttgtaggattctagaggataaggctattttatgctacaaagcaaactaataaaaacctatggaggaaataact

SEQ ID NO: 26467 - DNA, 242 bp, Glycine max
tgataaaactccaatttgattggaaaacatctaaagtatttatggtgttgtacctgagttttgtccaaaagagtttggcaagttttagcatctcaggctctttgtctttctttttgcacggcacttaggctctttgttatcccttgttaactccataaccaaattatacagtttctagcatatgtctttgtgagtgcgtgtgtgcttggaaatcattcccgcacgagtttaagaacccttcc

SEQ ID NO: 26468 - DNA, 512 bp, Glycine max
acgagaattccactgcaaactgaggatttaagtaagattcccccgatatcagatgatgtgaaaagcatgctcagatcaaatgcaaaggttttcttagggaaagatgttccctactgtttcttatcccgtatagaaagttcatatgcagaattgactcttggatacaacctcaaaccatatgcgcaaagatgaattatactccgcagaacaagatattctcctacaggcagttcaaatcattaagaatcatggggttgctcttggcagcacatggcaagacacgtcttctaaatgatgtgctctgcgtgatggcaattttggaagtgattgcaaacatcgtgagctttagcttttactaatacaatgcccgcaaggttattaatttgtcattcgttcacacagaaaacagttttccagtactagtaaacagttttccagtactagtttgacatgtgtagttggttttagttttgatttactaaaagaatacaaaaaaaaattcattatgagtg

SEQ ID NO: 26469 - DNA, 197 bp, Glycine max
ttgtgttatggtatggtcagaaactgaagcgaaatgggtggttttacttttgaggttggtcagcaggaggtatcaccacgcacctcaggaagactctctcacagcagtggccctcttaatggctccctaacagatagccctccggtttctccttctgaaattgacgatttcaagtataaccgttccacacaacatac

SEQ ID NO: 26470 - DNA, 533 bp, Glycine max
acaacgtattcatcaccgtggatcttccttaccctccatcaaggatcatcctcagttcattgcatgcaaagaaggttcaatttattacaattccaccaatcccaatcctaatgttcttgttggtgccattgttggaggacctgacgaaaatgatgattatgtggatgatcgagttgattttaggaaatccgagccaaccacatacattaacgcaccatttgttggggttttagcatattttgctgctaatcccaactttagttaatataataaaaacaattaccataaggtataggttcatctttttgtaaatgaaaagatatacgccgaagatgtttctcatcttgagaaaatcaagagggtagaggcttgattgggtttaggagcattactagaaaggatgacgggtttttaattacttctaaatgttttattctcgatgtttggatgtacgggtttgttaactatcttaaagttatatcagtgaatataaagtgttcattttgctttaaaaaaaaaaaaaaaagggcggc

SEQ ID NO: 26471 - DNA, 433 bp, Glycine max
atctccgacaaaacaaacaacgtcttgatccatttcaacacatcctaatacccctcattaaagacgcaaccatctttctctctctgcactcaactcaatcatgcgcctaacttactaacaactcttcaactttacagccaccaaaacgatgtcggagaatctcgacggttccgaaatctcgccgagtacttcctcccaaagtctcggcgagttaccggaaatcgccgcgataccattcggaatcgatctcgtgtcggcggccaggcgaaatatctggttcctgaggacagtggcagattctgtgtggcttcaccacacccccattatggtggaagccgtgagaaggtaccatgatttctggatgccgttgattgctgatctcacgctgccctactcttcccctcccacgattcttcctccccttgacatccac

SEQ ID NO: 26472 - DNA, 370 bp, Glycine max
attcatccaatacaacgcgcccctactgacagacccgaaacacactcattgcgcggaagcagttatcgctgcaagaacaacaatggaagacggcgatacgacggaggaggcggttgtcgttccggtctcaaacggcgacgagcaatcgttttctcattcttcctcacggcaacgcgattcggaggaggaatctccgcacgaaacgttgcgtaacacaaaagcttcaatagagaacatcgtagccgagattctctctctgaagaaccaggcaaaacccaaaccactcctcactctccgactccgagagctcctcactcaaacgttcctgcacttcgtcactctccgccaggcaaatcgctcgatcttgctg

SEQ ID NO: 26473 - DNA, 278 bp, Glycine max
caacaaaatggaagcacaagactttttccagaacaccttctgcccccaattcccctccgccaccaacatcacaccctccaacgccaatccctccgccgccaccgccgaccacttcctcgtcgaagacttcttcgacttctccaacgacgcgcaacgacgccaccgctgtcaccgacgccaccttcgactccctccccaccgacgtcgactcccccaacgttacccccctcgacagcaccaccaagaactccaatttgccctcctcctcctccgccgac

SEQ ID NO: 26474 - DNA, 283 bp, Glycine max
cagctgacgatgatgacagtgttgtcgtcacgctcgttcccagggatggacgtgtcaaaatcagacccatcaagacacggcttcttgcagagtgaaggaaatacttatgcatataaataaatttgtggggtgtaatacttgtattataggttaattttgttactgcttttcaaattatggagacaatttataattgtgcttgtattttatattaagagaaatttaaaagcttgtgaggtcagttgtcccaaaattcaccaagtacctaatcttatttgtgttg

SEQ ID NO: 26475 - DNA, 249 bp, Glycine max
cagtggtgcagccaactaactcaacaattctgaacaatgtgtatagctttgtttctttggcaatgccacccactgtacccttttcttcttttgaataacagagatgaatatcacaataggcctacgaagccagtgtcttggtgggaagattgtgatattttggcaggaagggacgaaatagcaatgggaacatggttggcttgttccacacaaggaagggtggcttttctcaccaatgttttggagctt

SEQ ID NO: 26476 - DNA, 449 bp, Glycine max
tggcaccttccacatcttattcaaggggagtgtcagttcgctattagccactaaacacgatcgcccagatccaactgctccttctccataccctcgcacacttccaagccctccaatggaaaatgcttggtaaggagccatgtccccgacaattgagccacctgtaagccttgtcaagagaaatgctggtccaagtttgattccctttgaagcaacaaatttaaatcgattgaagattatccacttacacacaactggaataccttgttctatttgaagattaaaatgaaaaaagctattatcattcgcctttgcaaattgagactcttgctttaacactaccatactgccctgtggattgccactggaagtcaaaggaaatccatcataatctctacatatagaacaaggtattccagttctttctaagtggataatcttcaatcgat

SEQ ID NO: 26477 - DNA, 275 bp, Glycine max
ccctcgtggccacacgagctttaccactactagggcggcaaaaccactgttcttagcttctgcatgtgaagtgaattcttgcaatgcttccttttctccacggtgagcatgaataacaacaattgctggttcttgtaattattattattgcaattccattttgtgacttccctgttgcttgttaattagtgtgacccagatggtgttttgagtatttgtttggagattcattcagtattttgagagatttgtatgataaatatggatactttgct

SEQ ID NO: 26478 - DNA, 605 bp, Glycine max
ttactaacatgggttcggctttgcttgggatagaccttggattcatgggtcgcaactactctatatccacggcttgtgctacttccaattattgcttttatgctgcggcgaaccatattcggagaggggaggctgatttgatgatagccggtgggactgaggctgccattattcctattgggttagggggttttgttgcttgcagagcgctttctcagaggaacgacgaccctaaaaccgcttccaggccatgggataaggaacgtgatggctttgttatgggtgaaggtgctggagttttggtaatggagagcttggagcatgctatgaagcgaggcgcacctattattgctgaatatttgggaggagctgttaactgtgatgcttatcacatgactgatccaaggtctgatggacttggtgtgtctacatgcattcagagcagccttgaagatgccggtgtgtcaccagaggaggtcaaccacataaatgcacatgcaacttccactcttgctggagacttggcagaaattaatgctattaaaaaggttttcaaggacacttctggcatcaaaattaatgccaccaagtctatgatagggcac

SEQ ID NO: 26479 - DNA, 404 bp, Glycine max
agttcttgacggaaaatccaactgagattgttaccatcataattgaagactatgtgcacactgcaaaggggttgactaatgtgttcacaagtgctggactggataagtattggtttcctgtgtccaagatgccgaaacagggtgacgattggcccactgtgacggagatggttcaagcaaatcaccgacttgttgttttcacttccgatgcttcaaaggaagcaggggaaggaatagcttatcagtggaagcacatggttgaaaatgagtctggagatcctggagtgcaacagggttcttgtccgcacagaaaagaatcaaaggcattaaattctaaaagtcattcacttttcctgatgaattactttccgacatatccagttgaagctgactcttgcaaagag

SEQ ID NO: 26480 - DNA, 299 bp, Glycine max
attcggctcgagctgacacatacactacagtataaccattggcattgacgccaacaccaatcttcaaccaccattctctggaacaaccagtcagcgtccatgcctccggcttcaagaaggaaagcaaaacaagccaagaaactcaaaactgtgaccattctcaaccaccattctcccccctctgatcaactccaaggggcagctgtttcaccaaaccacggccagaaaatggaaggatcgctcaatggagcattacaagacagccacaaagtagaaacacaattttgagagaagataag

SEQ ID NO: 26481 - DNA, 377 bp, Glycine max
ctgagatggttactgtggggactgacaggcattgaaaaagattgtccccctgttctgtttgctggctcatattttttgctaatacaaactcaggtgcctatgttcgctcttgtacatttttgggttgagctcattgatctcctcatcctctccatttttctatgattgctccacagttttcacgttacacttggtaccatttcagagagagttaattatagaaaattagacatgattttgttgggtacacttgtttcagcacactcccatcaacagcatcagcatactcatctctacctctagggccatactttaaacagcacaagccactcctatattccaaaccatccaaattcaactctcttgtaatcaatggc

SEQ ID NO: 26482 - DNA, 289 bp, Glycine max
gtggtgtgtcacagctatctttttcatattagtgggagctgttgtttggattttggagcatagggtgaatgatgaatttaggggaccacccaaaaaacaagtagttactgttttatggtttagtttttcaacaatgttcttttcccacagggaaaatacagtgagcacacttggccgctttgtgttgattatatggttatttgtagttcttataattaactcgagttacacggcaagtctaacctcaatcctcacagtgcaacaactttattcgcccattaaaggcatt

SEQ ID NO: 26483 - DNA, 277 bp, Glycine max
ctctttcaaaacttgtcgcctctcatggaggctgataatggaactacactcaatgtgttgatgaaagcatggactaaaaacgagcttagagagtggaagccctgtgccaacgcaagtcttcctgaaacagaattgccaaagtcaaatgggttccttataattgaagcaaatggtggattgaatcagcaacgcttgtcgatatgtgatgcagttgctgtggctggactactaaatgcaactcttcttattcctatatttcatttaaatagtgtatggc

SEQ ID NO: 26484 - DNA, 751 bp, Glycine max
tatggggagagtaaccactagtgtgcaaaagaaaactcaagctcccagattctgttccaatgcctcccgtaccaatttcccccatcaaagttgggcacattgatgatgtccaagagctaagaaaaaccaagccaaggacaattcctcaaagatttgtacgagacttgacagaaagaccaacactcactacacctcttcccccaccacatagtgacatgccagtcattgatttctctaagcttagcaaagggaacaaagaggaagtcctcactgaacttttcaatcttgcaactgcttgtgaagagtggggattttttcaggtaattaatcatgaaattgacctcaatctgctggagagcatcgagaacctgagcagggagtttttcatgctacctttggaagagaaacagaaataccctatggctccaggaacagtccaagggtatggacaagcttttgttttctcagaggaccaaaaactggactggtgcaacatgtttgctcttggaattgaacctcaatatgttaggaacccaaatctatggccaaagaaaccagaaaaattcagcgaaactgtggaagaatactcaggagaaataaggaaactctgctataatctgttaacatacatagctttaggccttggtttgaaaggggatgagtttgaggagatgtttggcgtatcggtgcaagccgtgaggatgaactactaccctccatgttcaagacctgaccttgttttgggtctgag

SEQ ID NO: 26485 - DNA, 280 bp, Glycine max
cgttacaaagttgttaaagagcaaataacaacaacaacaacaacaagctcggttgatgaaatgaaaaggatcctcaagagtctgaatcattatgatgcccttggatttagccgccacaagaagattgatgccgctgttttgaaaaaggaatacaggaaaaaggctatgcttgtgcatcctgataaaaatatgggcagttctttggcaagtgagtcatttaagaagcttcagtgcgcatacgaggttctttctgactccgtaaagaagcgagactatgatg

SEQ ID NO: 26486 - DNA, 533 bp, Glycine max
  unsure (1)..(533): unsure at all n locations
attttacacacacaaaaagaaacacaatntcaaactcttnnctnncaatatgttttcttttngtaatatacacaatttcaacctcatcccgaccttatgaaaactatgatgacaagtcatccctttcctccacaataagtgaacaacacttctctctccaagtcccaacattagatgaaacaacctttgataatctcctatcctttggttactaccgtaaaacctgtccccaatttgaatccatcctacacaacaaagtcacagaatggatcctgaaggactacactctagcagctagtctcatgaggctccacttccatgattgctctgtcaggggatgtgatgggtccattctgttgaagcatgatggaagtgagaggacagcacatgctagcaagacactgagagggtttgaagtggtggatgatatcaaggcagagttagagaaacagtgccccaagactgtgtcttgtgctgacattctcactgctgctgcaaggcatgccacgtttgagttaggtgggccttattgg

SEQ ID NO: 26487 - DNA, 343 bp, Glycine max
gccatttcctcaagatgagtctaagagcacaatcttcagctcttgtgacattggtgttggtgctgttgctgatcaaaatagagggaaatccgacaccaaaagaagtccatgagaatggcactgatgcctcatcttcatcaacatcattgatggagaaagatgagaaccaaatcattggatgcaggggaagaccactgatatgtagcagaggagagtttccaccaaggtctatatgctgtggagaccgttgtgtggatgtgactagagacagagagaattgtggggtatgtggggttaggtgcacatttaatcgtcaatgctgcaaccgtttgtgcttaaacac

SEQ ID NO: 26488 - DNA, 330 bp, Glycine max
acttaagagccttgcaaacaaatgtgctgaacaggttttggaaatcaagtctttaaaaacattgactgaaaagttacagaaggagaatcagggaattagagttggttctgggatatgcatggcctggaagaattaggataaaagatattcggaagtaagagaatctgaaagtaaagctcactctcaagctgaaatgctgaaaaatgctttagatgagcatagcctagagttgagagtaaaagctgctaatgaagctgaagctgcttgtgaacaaaggctttctgccgcaaagctgaaatagaggacttgaggtccaagctggatgcatct

SEQ ID NO: 26489 - DNA, 440 bp, Glycine max
gaatgctgaaagcaagctctctatcctttctggtagcaatgccctctgcaactgcaagcttcggattcttcttctgtcgacaacgcctttcttcttctttccccttccctccgcgtccaagactcctctccaccactcccaccccataccctctccaatacgaactcatcatcaaccgtccttcttaccccgactctccccgcccaccacctgctcgacctattgactcccctgaacccgaactcaacaaggcccagaggaagtactacaacaaacgcagaaagaggatgtacggctccgacgaagatgaatcccgacgccccgacgagaccttcgtggagttgaagcccgaggtggtggactttcccactctgcacaagagggaggaagagctttacttctatgacgcctttacttatccctgggagaaggacaagcat

SEQ ID NO: 26490 - DNA, 438 bp, Glycine max
aaacaaacgaatttgaactttgggaggctgaggctgctacattctattttgatcttcagatttcgtccattagtgaagcattattggaaaacaaggtcaccgagcttactggagtatgcatgagacttgaagatgaaagtgatgcaaaaagcttggagattaaacagatgacagaaagagtctgtctactggaaagtgaaattggaggactgaaagggcagttatctgcatataatccagtcattagttcattgaaagaggattttgcttctttagaacacactgccctagttcggataaacaaaatgcctgttgaatgcaatcaagaacaaaaggatgcagtaattgaaacttgtcttcatgaaaatggctatcaaagttcaagagataacaaaagcactttgataccagatggggtttcagatttgctgagtgtga

SEQ ID NO: 26491 - DNA, 299 bp, Glycine max
cagagagataattgttgttattgttgttaaaaagcttcattaaagtgccttcaattctcctcctctttcaacgcccctttctcaactcaatccaattttcttctgcttcccttcgaatccgagatccgcttccaatctcattaatgggttcattttatcttggtactttttaatgggttatttctcaatgcaaacaatttattcctcaagggtgttctgttttgtcagatcctaggttttgctacatttcttcacagcccaacaatttataaaccaggcgaacataagaatgggtgatg

SEQ ID NO: 26492 - DNA, 389 bp, Glycine max
gcgcaggaacacccacagaaagaaacggagaaaagtagttttgaaaagactcacgcacataatgtttcaaatggatctgaggttgttagtgaaaaaaggaaatctggcaataaaaagattttggatcatgctgtcactgatgtttcagagctcggcccaaatgcctcttcagagaaaaagaaagatttgaccgtgccaaagtcaaaagagtctgatcctgagaaaggtgatggacaggaagcaaaagacaagaatgctaatgagctacatcgttaccctgttgccgtcttaaagacaactgtgatgaagggtgaaaacgaaggatatcaaggagtcagtgagactttgaatggtggtgacaattgcatgagtaacaatagccaaagaag

SEQ ID NO: 26493 - DNA, 301 bp, Glycine max
ccttctactttccctcctattccttcaaactctgcatattttcggtgcaaacacagattctgtgttgtttgagctctctcttagaagagtgtgaaaaacaaaccaaaaaactaaaactagaacataagaaaccgttttccagtgttgagtgaaaaggttgttcttctctgtttgtcattgaagagagtgaagaaaaaaagaaggcatagagaagaaaaaaaaatgaagtacgtgctggtgactggtggagttgttagtggccttggcaaaggtgttactgcgagtagtattggtttgcttc

SEQ ID NO: 26494 - DNA, 641 bp, Glycine max
ggtcattcatttatggggtgctgtcgtctccttactcccatttttcctatgtcgagtacccagcaccacaccaatgacgaactttgtattgtggggtttgctatcagcttttagcttgttaattttgtactttatattgggttcaccaatttttgaagctgctgcatctctacatgagaaaaacaagtgggctagcttaaagtctgtaactatatcaactgcattcatcggtttgtctctcatgtctgtcattaactttgctacagcagagattggggctttacttattgtcccaatttgtctgatggctagaccattgaagcttgattttcaagctaggagttggagaaccttactaagggcctcttgcaatattgctttaggttttattgtgtttcctccagttgcatttgttttactgaaaggtgcatttgaagatttttatggtatgaattttggtgactattggaactgggtggaatccctttgggtttggaatagtgctacttacctctatgtaggtgtatttcccctaccatgctgggcactgtgtattcacattttatttcatccatgttgacatgtactattactttatcgggacaagcaatttattatcttgatgtttatgttttcttctg

SEQ ID NO: 26495 - DNA, 391 bp, Glycine max
aggattatgcgttgttggagcaggcctatgcatggttctggtgttaagaacaagaattgtttatgccaacctatatggaaaagcttcttctagcagacttcgattatgagagtttgggctgtgtattttggtgtctgtaatacttgagaaatcagtgttgctgattttaattcaagaatgattgaagaagctgagccaatcatctgatctgaatccgtctccagtgagtgtggaaagccaaagaagggataattttactcaaaacaaaaggagaaaaaaaaagtgtgttttgtcaaatctgtgtattcttttccatttttgttgtgttatattctttccttttgcaagtacaagtttgattggcattgaaattagacactcagaggtattg

SEQ ID NO: 26496 - DNA, 470 bp, Glycine max
tctaaggttgcagatgacactcaaggcagggaaatattacatgagctagaggttgatggggtagatacatcctttatggctgtctctaaggaaggcacttcaccatttacatatatcattgtggacagccaaactaagtcacgtacttgtatacataccccgggatttcctccaatgaagccagatgatcttccagagtcaaatttgctaactgcattgaacggagcaagaattgtttatttggatggcagattgcatgaaactgctctagttgttgcacatgaggcagttaagaagaatatacctatcttaatagatgcagaaaggctgagagaagggttggatgatctcataaaattagctgattatgtcgtgtgtgctgcacggtttccacaggcatggacagaggcatcaacagtttctaaacacttgtttgtatgcttttaaggttgcccaacatcaaatttgtg

SEQ ID NO: 26497 - DNA, 317 bp, Glycine max
gcaatatgcaacatttttctctgtctgagtcttccatgtgttaagaacttaaagagcaacaaagaagagaaatggagagaggagaccaaaaccaaagtgcatctcttcagtctccattgattaagcactcacactcatcatcatcagggaggggtattgagagaagggaagttatagaagaagtgaagaagcagttatggcttgcagggctttgatatcagtgacccttttgaatttttgcctcagtatcatatctgtcatgtttgttggccatcttggcgagttgtctctctctggtgcttccatggccacttctt

SEQ ID NO: 26498 - DNA, 301 bp, Glycine max
ctcgagccgcttttatttccccaaattgtgatttccttggattttcgtggggctgtggcctctcgatgcctaatcggttttcacttcacatcccggtgacgtcagcatcggtttctgcgtgcgcaaagtcgcttgcctttggtgcccccaaattcccatttgctattaacgtgatcctctctcaattccttttcagtaatcgaattcgggttttcaaaaagtcttccctttttcccttcgtgctgtggttccgtgaatcccttcaagaacaatcaccctagcatgtgagttggtgatgagc

SEQ ID NO: 26499 - DNA, 281 bp, Glycine max
cgagatacagggaagtaatgatgaatctgatgctgacctgtctgatgaagacgaggatggtggaagaccagttgatgagatggacttatcagatgctgacccaaccaagaaaaaatcacaaggtagaaggactcaatcggaactattcaaggcaattgcaaatgctcctgggttgtctgtggattctgctctacaagaagtgggttgagcatgggaaagaactaagtcggaaggagatcttgttggctgtgcgtgacttcggagacgtaaaatgtatggga

SEQ ID NO: 26500 - DNA, 387 bp, Glycine max
tcttttgctaagagaaaaattggttctaaaacaaattgaaaatatttttcctgggattgaaggagcaaatgtgcctgtaggcattcatcctttcactggattggtccatccatcaatgaaccttggaataagttaatatcttcaagatgacattgaagagcaccttcacttctatttcatgaaatgagttgaagatgctggattcagttgctagtaatttcctttattgccattatggaacttaattagcagtttagcaaactttttgtttaatgcgtatgcttgtttttttatctctttgaaattagttgttcgcaattaccattttagtattttatataattaaaagtttagatttaaatatatttttcatacttattcgatttt

SEQ ID NO: 26501 - DNA, 341 bp, Glycine max
cactcttaatgtgaagaatgttaatgacctgagccgtgatgtaataaagtctgatactgcaagtgtaaaatgtcctgaacttgacttggagctggcaagcggaacccttggaggaattgttactactgttgaaggtgtaattacaaaaattagtgaaagccttgagagggtccatggctttacttttcgagatagtctcgatgaacagagaaaaggcaagtggatagactttaaagcaaggctaaacaagcttcttagcttggaagaagcttggactctaattctcgatgatgcattagccaattcttttgtagctcctgcaactgatgatctgaaagagg

SEQ ID NO: 26502 - DNA, 304 bp, Glycine max
caagacaaagagcagaagctttggctgccttaaataatgcattcaattcatctcctgagacaacgtccagtgcggataagttgaatgggctaaatcgaggtcgaccgagacaaagggcagaagccttagcagccttaaactctgcatttaattcatcatcgggaaccaaagtttatactccaaggccatctggaagaggtcaaggatcacaaagagcagcagcagtagctgctctctcttcagttcttactgctgaaaagaagaaaacttcacctgaaacttctcctgtggctagcactagtcc

SEQ ID NO: 26503 - DNA, 263 bp, Glycine max
atctcattaacttgagtagagatctgttgtagacctgtagtttactagtgaaaaagtgaaagatgggttcgaagatagcaatagtttctatgctggccatgctccttttgatctcctcggaggtgttagagttagctactgcgggtggtgggggcaaccttggtgttggtggtggattatcaggtgctggtcgtggtggctcccctcgtggtcgtggaggcttccctggtggtggtagttttcctgctggtgatggtgctggt

SEQ ID NO: 26504 - DNA, 733 bp, Glycine max
  unsure (1)..(733): unsure at all n locations
cggctcgagcggctcgagaaagcactttattgcaaaaaagtaacaaaaagtgagcatgggaaattccttggtcttcttattgttcctcatcacattgttgtttgtgggcaatgttcaatgcaacccaaactacagagaagcattggctaaatccttattgtttttccaagggcagaggtcaggaaggcttccttctgaccaacaaatcaaatggagatccaattctggtctctttgatggtcgccttgccaatgtggatttaagtggagggtactatgatgcaggagacaatgtgaaattcaactttccaatggcctacaccaccaccatgctgtcatgggccacaattgaatatgggaagagaatgggaccccaaatcaaagaggcaagagctgcaattcgttgggccacggactacctcctcaagtgtgccacatccacacctggtaggctctatgttggtgttggagacccaaatgtggaccacaaatgctgggagaggccagaggacatggacactgtcagaactgtctattgngtctctcccagtaaccctggctctgatgtggctgctgaaaccgctgctgcacttgctgctgcatctattgttttcagaagggttgacccaacatactctaacaagttgttaagaactgcccaacaggtctaccactttgctttgcagtatcaaggttcttatagtgattcacctggatcagctgtttgcccattt

SEQ ID NO: 26505 - DNA, 339 bp, Glycine max
cagcaattgaagtagttgatggaaacttctcttgggatttatcttcccctagtccaactttgcaaaatataaatcttaaagtttttcatgggatgagggttgctgtgtgtggtactgttggatcaggctagtctactttactttcttgtgtattgggagacgtgccaaagatatcaggcatccttaaggtttgcggaatataagcttatgttgctcaatcttcatggatacaaagcggcaatatagaggataatatattgtttggtgaatgcatggatagggaaaggtatgatcaggtacttgaagcctgctccctgaagaaggatctggagattttat

SEQ ID NO: 26506 - DNA, 491 bp, Glycine max
tggggtgctggtttgtgctgctgggcaggagtttaggggggacgtggcgctttgtaccgtgccattgggggtgctaaagaagggggatattgagtttgtgccggagcttcctcagaggaagaaggatgctattcataggttggggtttgggttgttgaacaaggttgcaatattgtttccttataatttctggggtggggacattgacacgtttggtcatttgaccgaggatttgagtatgagaggggagttttttctgttctatagctactcctcggtgtctgggggcccgcttctggttgcgcctgttgctggggaggctgcgattaggtttgaaatgatgtcgccggtggagtctgtgaagagggtgttggacattctggaggatatttttaatccaaaggggattgttgttccggatccagttcaggcggtttgtactcggtgggggaaggatcactttgcatatggatcttactcttatgttgcgg

SEQ ID NO: 26507 - DNA, 651 bp, Glycine max
taaaccctaaaccacgaaattttgaactcaccacacaatagagaatctgaatcaatcgcgatcacagagcgtgtaagcaataagcaaataacaatgttcaacgcttgacattgtggtgttagtaacttaaccaccgttctggaacttgggattattctgatacagcacctccaccgttactactatgggccgtcactcttccagcaaccactctccctcctcctcacgccgccaccggagccaccgcagcagcgtctctccgcctctacgagacaagcacgagcattccggctgcagtacggccaaaccggttcggtacggttcgccggattctccacttcgctcgccctctccgtctctgcggacgaagcggctgaagaaaggtcaatccgaacgcgagcgggagcctcgagagaacgagaggaaccatggcgatggtagcagagggagaggctccgagagggaagccggtgagcggagggagaagaagagaacggagaacgatgagagtaacggaaggagtaacaaatcggagaagagaacagagtacgaagacggtggcggaaggagtagcaaatcggataagaaaatggagtacgaagacggtgggggaaggagtagcaaatcggagaagagaatggagaacgatga

SEQ ID NO: 26508 - DNA, 320 bp, Glycine max
tgttgtcaactagctgccttccggtttcatttcatttttcacatcaggaaatattattgttggcaataattttgtcagatgctaaggttgtctcatcatgtcaattttgttgatggagtaactgaagcatgttctacttttgtttcagatagaaataaagctgctccgtttatgtgagatatagttacactttttcttccttctcagacctatgtattgttacattctccaggatcctcgtactcgtatttttttcccctcaatctagattgttcggtaattgacctaaaaaaaagcaatgacaaaaacaaaaggggggg

SEQ ID NO: 26509 - DNA, 298 bp, Glycine max
gtgtgaactggctactggctgtcatcccttcattcatcttcttccagtgtctgtctacactacggatagagcttttttcacaccacagctaaaaagtgctggaatagagcccttccccttcttcttcttctcctccaaatcctccttctttttctcttctctctaccacacaaaaacccttaccaagttctttctttctaattcccttgataatgtaaaatcacagaaaaagaaaaagctactaaaaacttggctctaaacctttctttttttgaggaaaacctgaaaagttccacac

SEQ ID NO: 26510 - DNA, 708 bp, Glycine max
atttgcttatatatgtgagaagaatggaggatctctaacagacaaaatggatgaactagcatgctttgctccagggatgattgctttgggatcatttggttacagtgctgctgatgattcacagaagtttctgtcacttgcagaagagcttgcttggacatgttataacttctaccaatcaactccaacaaaattggctggggagaactatttctttcattctgggcaggacatgagtgtgggtacatcatggaacatactgaggccagagacagttgagtccctcttttacctttggcgtctaactggcaacaaaacgtaccaagaatggggttggaatatatttcaagcttttgagaagaactcccggatagagtcaggctatgttggactgaaggatgttaatagtggagtcaaagacaacatgatgcaaagcttctttcttgcggagaccctgaagtatttttatcttctcttctcaccttcttctgtcatcccattagatgaatgggtattcaacacagaagcccaccctctgaggattgtgaccagacacgaagagggacttgttaagaatttaaatgagaagcaaaaacctttttctagaataggtggcaggaaggaaggcaggtcaggttagatatccattcttctctaccattgctgatcgaaccccttttaccaaaattaaagctgagcagtttgttc

SEQ ID NO: 26511 - DNA, 434 bp, Glycine max
atttctaggagattcagtattggattatctgattacttggcatttgtacaataaataccctggcatgacacctgggcagttaactgacatgaggtcagcttcggtgaataatgattgttatgcatggtccgccattaagcatgggttgcacaaacatgtactccatgcctcacaagaactgcatatgcatgtctctgctacactcaacaaatttgataagctatcttcattgtccacttttggttacgaggcagagacatcactccctaaggtacttggagacattgtagagtctctggctggagcaattcttgttgattcaggatacaacaaggaggttgtgtggcaaagcataaggccacttttggaaccccttgtgacacagaaacattaaagctccatcccatccgagagttgaatgagctatgccaaaa

SEQ ID NO: 26512 - DNA, 467 bp, Glycine max
tccatcaatttccaaacctaccctcctaatataatctcaagaaccaacaactccactgaggatcttggcctttcccttcactccttccaagaccctggtttgattcatggccagacccaagcaggtgcaaaccagacacaaacacctttcaatgaccaaagcctcttctctggctcaactcaagtggggtttgaggccaattaccccaggattgtcacttggaacagtgatgcaagcatagatatgaacagaaccgggttcatggtcaattcaccagcacttctaggccaaggtggttctgctgcattttcccaaagggggacccttcagtccagtttctcaccatcacttcgtccttggagtgacattccaatggcttcatcagaacatcaccagtcacagccaattcaacaagcttccatctttggcagcaggtttttgtctgatgcattgccagggttctgcat

SEQ ID NO: 26513 - DNA, 319 bp, Glycine max
caattttgttaatcacactgactgtactatgaatatgataatcaattgtctaaacttccaagtgcgccgtattcctaagcttaggctttcaatctgaatttctgaattctctgctgctggaaaatgaaactgagtccaagggacatcgagaaactatacctgcataatgcaggctacctgcacagaaacgccttgctcgtggtttaaggctcaattatgttccaactgtggctctcatagcaacacagatttcggaatttgttcgtgatggtgacaagactgttgcacagctaatgtgcattaggagagaccttctggg

SEQ ID NO: 26514 - DNA, 389 bp, Glycine max
gcgcctcacgcgtcctttttgattagtacaattgttttgatgtttgtacgtttcaaaatttagaacatgtgttctatgctaggatgcacttgatacatgatttggttggttaagtctaatgtctgttctgacatttgaaggattctgaatttgaagagctggaagaagtgttgcagcattaccctcaagggtatcatggagttgacaaggatggtaggccagtttacattgaaaggcttgggaaagctcatccaagccgcttgatgcgtataaccacaatagataggtatctgaaataccatgtccaagagttcgagaggcctctgcaggagaagtttccagcatgtaccattgcagccaagagacgaatttcttcaaccacaacagta

SEQ ID NO: 26515 - DNA, 541 bp, Glycine max
gttactacaaaaattcgaggagtggatcatgaaaattgaattggatctttatccataagaaacagaatgagagaaagaaaaaggatgagaaaaccatttcagaattcataatcatacctttttccactctgacgccattttattattcattcatattaatattaggctctcaccctccattccaattgctattagattctgcttccatttttttttctctctacacctcttcttcttcacttcctctttactgtttgttacttcaattttgcgattcgttcgttctggattcagttgaggaaaaataactgcgtggtttgagcaatggatgttaaagctgcgccgaggttacaactttcagcggtggttcaacccgaaaggtttgggagaagaccaccattcagcacatgtcgtttgggtgtgtctcgggaaccgcagagccttcgggtttttgtttcgccaacgatgatgcgccgcagaacaaccgctttggaggtttactgttcttacggcaacatttcagcttcaatattggaatctg

SEQ ID NO: 26516 - DNA, 490 bp, Glycine max
attgcctattaactgtaattcagttagtttgggatcaacttcatcttcccacttaagtcaatttgttcagaatgctgcaaaagaattagcttcttgtgggaaacctggggcagttcttacttttctgcaatatgtcaagaataagttcccagctttgtcaaattctcagctcccagacacatattatcatgataaagaaaatacaccatatacttttgagactttagaacagggtatgtacttctccgtgcgtgatgaaatgcatgatcttctgctatcttcgaatttgttgaatgaggatgagaaagtttcaactgtgggagggaattcaaattttataatagacactggatctgtattgcttgggaaatatacagccgatcttgtgcaagagatgtcagaagtttcttctgtgtctgaaaatgcttctaatgagactgcttctgtagaatcaacatcacagcatccagcatatgatggatttggccct

SEQ ID NO: 26517 - DNA, 399 bp, Glycine max
agctgatattggatcaaaggggataacacagattaccaacagcagtctcagtggtgttggaatttcttctggagcactaccgacttctgagatacccaagcaagggaaacaagctccagtgcttcatggtttgccagattttgctgaagtttacggtttcattggaagtgtatttgatccagaaacaaacgaccatgtccagaagctgaaggaaatggatcctataaattttgaaactgttttgttgttaatgagaaacctcactgtcaacttgtctagccctgactttgcacccactgaaaagcctgttaatgtaaccgtagttcattgtaaccacaaccaaaatagtagttaatgttagaaagctaaagagcataatgtattttcagatgattctta

SEQ ID NO: 26518 - DNA, 365 bp, Glycine max
ctcgacgagggcatcaccggctaccgcgacgactctctggaaactgttcaccggaaccagattcagtacgggctccctctcaaagttgtatcttacaaggacctctacggatggactatggacgagatcgtgcgagtgattggtttgaaaaacaattgcactttctgcggcgtcttccgtcgacaggcccttgaccgaggtgcttctctcttgaaagtggacaaagtcgttactgggcacaatgccgatgtattgccgagaccgtcctcctcaacctcctccgaggagatgttgcccgattgagtagatgcacctctataaccaccggtgaggatggccccattccccgatgcaaacctttcaag

SEQ ID NO: 26519 - DNA, 421 bp, Glycine max
gggaccagttgaataggggcattgtgccggatgatattgatgtccactgtttagcggggctgatcaaagcctggttccgagagctaccttcgggagtgctagatggactttcccctgagcaagttcttcagtgcaacacagaagaagaatctgttgagcttgtgaagcagctaaagccaaccgagtctgccttactcagctgggctattgatctcatggctgatgttgtagaagaggaggaatttaacaaaatgaatgcaagaaatattgcaatggtttttgcaccaaacatgactcagatgtctgatcctctaactgccctgatgcatgcggttcaagtgatgaacttactcaagacacttatcatgaagacacttagagaacgcgaagaaacagcaacaggtggctattctccgatgtc

SEQ ID NO: 26520 - DNA, 426 bp, Glycine max
tcgcgatcttgtggaatttgagtgcagaaatcagagagaatatgatgtgtggactcaaggtgtttcaaggcttctctctattgccgcagaaaagaacaacaaaaacagaatttgagccttttgttttgggaatgtgtaaggagggagaagaaattttggcaatgggggaataggaggatcaatcaaggtggtgttagtagcattatagatgttttgtacattgtaaaaaggttaaaaaaactaaaggcaaagttaatgccatatggggtctcacactttactcttggggatctggatggtgttttttttttttgaatgagaaagcgaaacatttgaactgaagtgtgagcccatagtgaaccaattgaccttttgttccttcattattctggaaagaaaatgagtatcttggacttgggggggagt

SEQ ID NO: 26521 - DNA, 385 bp, Glycine max
agattcagtaactaatcattgaaagtagacttatgcatcataggctcactatataagaccatgcacccgagtcctagaatgcacagaagcacaacattgatcactataacataataactaatggagctggtgacgatgtcaagaacaagagtggtcctcatgaccctcaccctggtggtggtgacagttctgaacaacacagagagtgcagaaagtgctcgcactttctatgtgttcggggactctctagttgacagtggcaacaacaattacttgccaaccacagcacgcgctgactctcctccttacggcatcgactatcccaccggtcgccccactggtcgcttctccaatggctacaacctccctgaccttatcagccagc

SEQ ID NO: 26522 - DNA, 534 bp, Glycine max
cctcgagccgaatcggctcgagtgcccatagcaatcaacactgacacgcctaagtctcaacactatgaattaccaaccgcattcttcaagctcgtcctcggaaacaatctcaaatacagctgttgttatttctcttctgcctcaatgacgctggatgatgctgaagaagcaatgttgaaactgtactgcgagagatcaaacctgaaacatggtcatacagtgcttgatgtgggatgcggttggggatcgttggctctatacattgccaagaattacactaactgtagggttacaggaatctgcaattccacaactcaaaaggcttatattgaggagaagtgtagggatcttcagctgcaaaatttgaatattatagttgctgatattagcacatttgaaatggagacttcttatgacagaatattttccatagaaatgtttgagcatatgaagaactataaagatcttctgaagaagatatccaaatggatgaaagaggatagccttttatttgttcattacttctgccacaaa

SEQ ID NO: 26523 - DNA, 182 bp, Glycine max
aaaaatgctaatccatctaccaccaatttgtcttcttctgtattcatcttaggtgaaggtatcagggcattggacaaaaggaggagggatgttatagctgaaggtgaacgtgaggggctgaatgatgagggtggttctcttagtttgaaccttgggggtcaaggttaccctctcatgctgga

SEQ ID NO: 26524 - DNA, 321 bp, Glycine max
attttgtgtaacacacgatcatgtcagataaagaagtagtagtaaatgggttatctgaggaccaagcatggcaagagctcaagtttccagagttgttgaacagtgatgctgttagagaaatccatgcaactattgaaaaagaatgggattttcttcaaaggtcagcttgccaaaccgctgcgggaagggctctgtggaagcatgccatccatgatccactggctgacgtgctggcaggagagacttacttgagaaacctccatgaaaagatcaagaaagacattctcaacaatgctcgggaaacttccggagtcactctcg

SEQ ID NO: 26525 - DNA, 424 bp, Glycine max
aacaaaagaacaacaaacacagcaatattgcttcgcataaacgttctcacttctcacttttgtttttccctcttctccgttttcatgaatatggagcgctacacgctaccggcaccacccaatattattcccgaggaagaagaaaacattgccattgccatgggtgcccctcttatcccttcctttaaatccatgcttcaacaacaccctcaacaacttgactcttactttaactcttcaattagttctactactatcccttttgttcctaacatggactcttttctctctcttgaccctttctcaccttctttcttcaacaacagcagcagcagcagcaacatggccctcgacccgggttttgatttgggcctggacactgggcttcactcttctgctcctgctccccatcttttttcccagg

SEQ ID NO: 26526 - DNA, 595 bp, Glycine max
cttgccgccattgctgccaactgcaggagtttgagggaattggacttgcaagagagtgaagtggaggaggaccttagtgggcactggctaagccattttcctgattcctatacgtcattagtttcacttaacatctcttgcttaaaccatgaggtgagtttatctgcgctagagcgtctgcttgggaggtgtcgcaacctgcggaccctccgtctcaatcgtgccgtgccccttgatagactacccaacctacttctccggtgtcctcagctggttgagttaggcacaggagtctattcaactgagatgcgaccggaggtcttctcaaacctggaagcagcattttctggttgcaagcagttgaagagcttgtctggcttttgggatgtgctcccatcctaccttccagctgtctaccccatctgctccaggctaacatcgctaaacttgagttatgctattattcaaagctctgatcttattaagcttatcagtcaatgcccaaatttgttcgcgattatgggtgctggattacatagaagatgctggtctttatgcccttgctgcatcatgtaaggatctaagagagttaagg

SEQ ID NO: 26527 - DNA, 550 bp, Glycine max
ggtagtgatgttattatctgttctaaaaatttctgaagtgtttgtacctgtgtcccccttcactttctttcgaggttgcatttactttccctttcgacttcgaaacgatccaaaatactacaaagcaaagcaaccagctaaaaagcaatcacgcccgaaaacgaaagcatctccctctcccctaagcaaacaactgcccttaaccctcaaaaacaagccacccaaacccatccacttcaaccccccccccccaaaatcacctccctctctcaccggcattgattctccatggacgaatcagagcaatacccaaaggagtattaccctaacgaccaaaccctccccagaagagtctcctcatcctcgtcctcttccacgacgagcgtccacgtgacagccctagacggcctggtgaacgtgaactccctcttcacgatcgccgtcttcgtgggcctctccctcaccaccccgggccagcgcagcctcgagaaccgctcctcctgcgacgccggcgtcgacgtggccaagaagcttctcgtcttcgaagtcg

SEQ ID NO: 26528 - DNA, 357 bp, Glycine max
ctcgagccgctcgagccgaatcggctcgagctattctaaatttctaatgtctttgtcctgcccttccttgtccttgcaaagtagaaaacgaaagcatctccctctctcctaagcaagcaattgcccttaaccctcaaaatcttcctctttctctcacagccattgattctccatggacgaatcggagcaatacccgaaggagtattaccctaacgatcaaacaatcaccagaagagtctcctcgtcctcttcgacgaccagcgtccacgtgacagccctagacggcctggtgaacgtcaactccctcttcacaatcgcagtgttcgtgggcctctccctgaccaccccgggccagcg

SEQ ID NO: 26529 - DNA, 273 bp, Glycine max
cctcaattaggaacaagtggatatgaaagcaactatgtgactccaaatcctgcaattcggcctccactcgagcatggctggaactggcaatccagacctggtgcattgcagtccaatgcaagggatgaaatttcaccagaggaccttcaaaagaatgatgatgttgatgacgatgatggtgaggaggactctgatgcttttgaagataccgatgatgatctgatgagtgatgactatgattcagatgctagtcaaaagagtcatgagacacgt

SEQ ID NO: 26530 - DNA, 401 bp, Glycine max
actttacatcattcagtacatatcaagctcgtttaattggaaatctggcaaagttttgctcaatcagacagttgatccagtcgccgctcgggccccttacctacgagtggcatttacgttttctccatttgagaatactttgactacaaactctacattgaactttcgactcccaacttggactcatctggatggtgccaaggggatattaaatgctgaaactttatctctaccaagtccaggaaattatttgtcaatcacaagacaatggagtgctagtgacaagctgacccttcagctgccccttaccgtaaggacagaggccataaaagatgacaggcctgaatatgcatctgttcaagcaattctttatggtccttaccttcttgctggtcatacaa

SEQ ID NO: 26531 - DNA, 398 bp, Glycine max
attctggagacaaataatgatttgctgtttgatcttctaagccttcattttgtagaccttgtctgctctaaggaatgggcagaagctttggagtttgctcagaccaagttgggtccttttagtgtgaaggagcagaaatatatggaaaaaatagaaggttttatgtcccttcttgcttatgagaatccagtggaatgcccaatgtttcatctgattggcttagactatcggcaacaagttgtggatagtttgaatcaaactattctcgcacactttaaccttcccatccacactgccataggagcggcttatacaacagacctcagtagttagacaatgcttaagcctggaggatggggggcctcaccattttccttgaaggatattcttaaaagtca

SEQ ID NO: 26532 - DNA, 478 bp, Glycine max
ctttcccactctcactacactcactccctccaaaaaatggaagagaaactaaagtacccctttctctcttccttcttaaccctcttcttctgcatctccgccacttccattgccccacataactcccaaacccaaaccctcctcctccgcaccctccctaacccacccacactctcctggcccgaatcaaccatatcaggatccgacccggaacccgaccccttctccctttcggttcacctcaaccacatagacgcactctcccccaacaaaaccccttcccaactcttccacctaagactccaacgcgacggcgcaagagtcaaaacactaaactccttagccgcagccacaaatcaaacccgacccactaataccgggtcaggtttcagcagctccgtagtttcgggtctctcacagggaagcggcgagtacttcacgcgcctcggcgtgggaacccctccgaagtacctctaca

SEQ ID NO: 26533 - DNA, 302 bp, Glycine max
atggctatcatcacagaagaaccagaagcagaagcagactcacactcacagatcccaaaaccccgcaaacccaaactcaaaaccccttcttctccaccccccaacagcacccacaaccccttctccttctggttctacttcaccctctccgtctccctcctcactctcttctttgtcttgacctccagcctctccccccaagaccccaagacctggttcctcaccctccctccccccctccgccaccactactccaacggccgcaccatcaaggtccaaacacattccaacgaagcccccat

SEQ ID NO: 26534 - DNA, 523 bp, Glycine max
attaatttattaattatatatgtaactctctccatcgatcagaattcattcagagaagtgagagttaaagatggaagggatagagcaccaaacactgaacgtgaatggcataaacatgcacatagccgagaagggtgaaggcccattgatcctcttcatccatggcttccccgacctatggtactcctggcgccaccagatcacagctcttgcctccctaggttaccgctgcgtggcgccggaccttcgtgggtacggcgacactgacgtgccggccaaccccacagcctacaccagcctccacgtcgtcggcgacctcgttgggcttctcgacgcgatcgtcggcgacgaggagaaggtgtttgtggtgggtcatgactggggtgcaatgactgcatggctctttccctctatcgccccgaacgaatcagggctcttgttaacttgagcgttgttttcactccccgaaaccccaagagaaaaccccttgacactttaagagcagtgtaggaaatgactacta

SEQ ID NO: 26535 - DNA, 595 bp, Glycine max
cgcgggaattgatgctacaaagtatggtcatagtcctgtgcacaaggccttagttttgaaggatcatggtgaactcaggaggatacttgctggcctcccacggctgcgtagcacggccgagattcgcactgaagcggtttcgattttagaggaagagaaggctgatgccatcgctgctgtgattgaccggcgtgatgtgcctaaccgtgatacccctcttcacttggctgtgaaattcggggatgaagtggccaccgagttgcttatggttgctggggcagattggagtttgcagaatgagcaagggtggagtgctcttcaggaagctatttgcagtagagaagagggtattgccaagataataattaagcattaccagcctctggcttgggcaaaatggtgcagacggttgcctcgcttggtagggaccatgcggaggatgagggacttctacatggagattacattccattttgagagttctgtgattcctttcatctcaaggatcgctccttcagacacatacaaaatttggaagaggggtgcaaatttaagggcagacatgactttggctggatttgatggtttcagaatt

SEQ ID NO: 26536 - DNA, 534 bp, Glycine max
ctcagccgcacttttattacttcatcaatcaaacacaagttactgaactttggaagcattatgcatgcagggttgtgggtagattgacaatgattggaggaatggaggtctgaaacctctagtgttccttgtgttccgtaccatctcaacaatgcaacacaagcagtgataattaactgaataccaaagttgtttttggactgctctgaattccatgacatgtgatatccttctcatctttggacttgagtttaaggctagtttttgaggagtgagtgagtgagtgagtgagaaatgggttttgttggaggggaagaagccattcaagagcctacagggcatgatgagaggattcttgtttcggttcgtcttcgtcccctcaacgaaaaggagcttgcaagaaatgatgtttcagattgggaatgcatcaatgacactgccatcatatacaggagcaacctttcagcttctgacaggtcactctacccaacagcatattcctttgacagtgtgtttcgaacaaattcttctaca

SEQ ID NO: 26537 - DNA, 273 bp, Glycine max
atttccaaacaagcacatacatacattgatcactataacataaaaactgattgagctggtgaggatgtcaagaatgagagtggtcctcatgatcctcaccctggtggtggtgacacttctcatcaacacaaagagtgttgaaagtgctcgcactttctttgtgttcggggactctctggttgacagtggcaacaacaattacttgccgaccaccgcacgcgccgactctcctccctatggcatcgactatcccacccgtcgccccaccggccg

SEQ ID NO: 26538 - DNA, 427 bp, Glycine max
accagcatctgcattatgagtacccctgtcgttcgacgcatttccgaatgcttcatcaagccacatcgtccaatcgaagagtctaaccaaatatgttatttagcaccttgggatattattctattgtcttatcactatatccagaagggtctactcttcaagaagcctccaacacttgtcgatcaacagaatttcatagaaaatctgttggagaagctcaaacactctctttcgttcaccctctcccatttctatcctttggctggtcgccttgtcacccacacaacccaagaccctccctcgtatgcttttttcgttgattgcaaaaacagtgatggagctagattcatctatgcatctttggacatgaccatatctgacatactcacccctgttgacgtcccacccattcttcattcattctttg

SEQ ID NO: 26539 - DNA, 279 bp, Glycine max
tgttcatctatggcaggagcaaaagggttcgttgaagcagataatgcagaggccataattaccagaattgaacacaaatcgcgatagatcgaaactttgctcaaacagtataagcccgtggaagcccttaaaactgcccttgaaggcacatttgccatcattggggatgagcgttgcaagtcggcacactggcttgtggtgcacagagctataatggctataaaagatgtggatgggatgctttcttccttggatcctgagtactatgatatcctaatg

SEQ ID NO: 26540 - DNA, 308 bp, Glycine max
agcagctcttccagtagccttaaaggtgattctgagagagacttctttgttgaactgtgggatgtctcaggacatgaacggtacaaagattgccggtccctgttttattcgcagattaatggtgtaatttttgttcatgatctttcacaaagaagaacaaagactagcttgcagaagtgggcagctgagattgctgcaactgggacattttcagctcctttgggatctggtggtcctggtggccttcctgttccatatatttttattggtaataaagctgatattgctgcgaaagagggtacaagagg

SEQ ID NO: 26541 - DNA, 322 bp, Glycine max
ttttcggattagtcatcgaattaattaattattataattgctcatttatgcatttcattcataactcttacccaaacaaacatacacagagattcaacattcatagtttcatagtcctacctttttccttttttttttcttttttctcaacgttgttataataaattttattagtaattaccacaactcttgaaggtggtggttgatgttacgggcatgtttggggttgaattaccatggtagaatggaggagctgccaggggcgtttggaagcagcgccagtttggctctccggttgggccaaacagtcttttccacacaa

SEQ ID NO: 26542 - DNA, 265 bp, Glycine max
ttgagatagatacatggtgccaaggtgaaggaagggttgggacaaggcgtgattttatactgaaagactatgcaactgatgcagtcattggaagggcaacaagcaaatgggtaatgatgaatcaggacaccagacgactccagacggtttctgatgatgttaaagaagagtatttggttttctgtcctcgagagcccaggttagctattccagaggcagatagtaatagcttgaagaaaataccaaaattggagaccctgctcag

SEQ ID NO: 26543 - DNA, 443 bp, Glycine max
cccattcgttcgcccacgcgtccgcccacgcgtccgcttttttttttccaccgattccctcaaaagtctccatttttatcccttttatccatttgggcttttccccatttcccaatggtgccggtgcaggtccagatcatgccggaacacaattccgatcccgccgcccctccgcctcctcctccgccgccgcacaaccgccggccgacggtccgagacgtcagctcccggttcatgtccccatccgtgccgcgccgcccgcggacgacggagccggaccccgatgagaattccgaaaccccgttcccacttgggtgttctatttctcagagaaaacaaacacaaacaccacaacaacaacgttcgatgaagcttttcaaagagaacaacaacaacgagcatgttccaccgaaccctcacccttcaaagtcatgttctggaag

SEQ ID NO: 26544 - DNA, 565 bp, Glycine max
ggatactataccaacctaaagcacagttgcccttttggagacttgcgctttttctttgttatttcttctttgttccagaatcatcatcaccaatattttccagcaacacatttaccaagctacataagtagaaacaggattttccatatttgaagtgccacggtgcttccccgagaggcttggcaacttaaagtagatcaaaagtgatgaagaagagttctggttcctcccagaaacttggttcatttctaagtccaggggcaccaaactacagtgagaaaagcattgggagccaaaaggggtggagctcagagagggtgttgttgcagccttcaagcagcaacataaggaatgctagtgtagctaacttgacaccctttaacagtggaagaacaataccttcaaaatgggatgatgctgagagatggatttgtagccccgtttcaggctattctaacaacaaaaccaattcctatgcacaacttcagcagcggcgaccgaaatcgaaaagtggtccaattatgcctccaggaacaggctactactccaattactcacccacaat

SEQ ID NO: 26545 - DNA, 392 bp, Glycine max
gttctttttaggatactatatcaacctaaagcatatttacccttctgaagacttgcgctttttctttgctatttcttctttggggcggaatcatcacctccaggggtttccaacaacacatttaccaagctacacaagtagaaacaggatatttccatatttgaagtgccacggtgctaccccaagaggcttgtggcaacttaaagtagatcaaaaagtgataaagtgtgtgatgaagaaaagttctggtacctcccagaaacttggttcatttctaagtccaggggcaccaaactacagtgagaaaagcattgggagccaaaaggggtggagctcagagagggtgttgctgcagccatcatcaaacagcataaggaatgctagtgtggcta

SEQ ID NO: 26546 - DNA, 630 bp, Glycine max
cctcgaatgtccgagccagttggttctgcttctgtcctgaacagtgccagtggtgccagctcaaccgtttcataccaacaacctcatttccagtcatcaggtatgttgctggaacatctaaatccgtacatgaacttgccaaccatgccatatggcatgaaggctcaaaccccatccatcccgccttatacaggcgcttcaactgggccttatggtcctgatggtgtcccaatgggtcccagtggcaaccgtggtcaaggtggttctcttccaatttcatcagaaccacttatgccgtctggttattatgatagtggctctgcttatggtggttatggtcggcaacattattgccaaacatcttatcctcagtagattgagatatcgttttcttttgaatactgaactcctgggttggtggcttggtattagtttctctatgactttgcgcttctgacttatagttattaaaagcattgcttgctttgttgatctccatgattaaaggaaaggagctagattcagcaatgaagggttgtgagggaatgattagtttcaccctttcccttacttgaatgattttacataagagagaaacattttaggttaaaaaaaaaaaaaaagggcggc

SEQ ID NO: 26547 - DNA, 434 bp, Glycine max
tgtttcaaactcagatgtggtccaaaatgtatctcagggtgtcagagagaatgtgctattttgctcagatttcaatgatcattcagaccagtcagtattttggacattattatctcctgatcaaaatggaattcataactcagcagagacttcgttgtcattgtcattcagtccagctcaacatccgccaattggagttccacagtctgtgggattttcttttcagcctttgcagcctaacatcttaacctcaccatttttggctctctcttctcccttccagcgcggccactgcctttgaatcactctactttgaactgcagcactatgatattattgaatcttcataatgcatataacacttttatatttattttaattaatattttgtacagttctctctattatcatgaaatataatgtaattaccgagc

SEQ ID NO: 26548 - DNA, 263 bp, Glycine max
cctcgagccgaatcggctcgagatcacattattatcaaccttaacctcttcctcttagcaccaaccatgactacccagtctctcattctctcccttctcatctcatgccacgtcctcactgcaaccctagccgaagataccggctttgtaggttccctagaccgcaaggcattaggtctagataaaaaagacaaggtcagtcatttccggttctacttccacgagaggttcaccggaagcaacgccacctcggtcaccgtcgt

SEQ ID NO: 26549 - DNA, 320 bp, Glycine max
tcagttgtacaatctcatgcttgcacaatctctggatatatttcattctagtgtgattagatcgaggtgttacaagaagatatcagagtcaattgaatcagggaacaaattcaatagtaaatatttttttgggtcttgggagagagaataacagacatgttactgtaagtttgtaacaactatatagttatcatccgcacactcttttctttctttctttttcctttggtattgagggttgtaaagaagcttcttgtttgatatgtatgtaaatgatgtaaatgcccaagtcttgtacttattttcctgttaaattcaag

SEQ ID NO: 26550 - DNA, 687 bp, Glycine max
ctcactctcttctccaatcccatttcaggcaaagtttgcctttgaaggaatcaagtaagtcttgtatgtggattttctggtattgattttcaatgtccgctttatggtttgagcttctattgagaaactgagatacgagctgatcacataggaatatcctgtactctctcagatttcatgcctgccatgaaaaagaatcctgagcagactcattttggatctgtattcaacaagttagggaaggagcttggagaacctgtagactttgaacttccagattggtttaataaatcaaagccaatgcagtacacctatataaaacgcaatatatatctcactaagaaggtcaagagatcccgatttgatgatgatggcatattctgttcatgtactccttcccctggatctactagtgtatgtggtagagattgccactgtggaatgcttctgtctagctgttcatcaggctgtaaatgtgggagctcctgtctcaacaaaccatttcagaaccgtcctgtgaaaaacatgaaattggtcaagaccgagaaatgtggttctggaattgtggcggatgaagatatcaagcttggggagtttgtcattgaatatgttggagaagtcattgatgacaaaacatgcgaggaaaggctttggaacatgaaacatagtggggaaacaaacttctac

SEQ ID NO: 26551 - DNA, 266 bp, Glycine max
aggaaaggtttatcgagtggagttgaggaaaaatggagccatggtggctgtcaagcaactagggaaagtagatggtgtgaaaattttagctgcagagatggagattttggggaaaattaggcatagaaacatacttaaactctatgcttctttacttaaaggaggatccaaccttttagtgtttgagtacatgccaaatggtaatctttttcaagctcttcacagacagataaaagatgggaagccaaacttggattggaaccaga

SEQ ID NO: 26552 - DNA, 334 bp, Glycine max
tattgcaaacaaacaattgaggttcctagctagattcataatggtgtgtttggtgttgaaccgaaggaaatggtgcagcaattggttaatcagcttaaagtattagttgatgaatgcaagacaacattccaggaaagtgactttaaagaatggaagctggtggttcaggaaattctcagatttttaaaagcggacactgcttttatgaatatcaggcccttgagatacagtctagttttggactctcatcctgatactttaccccatgtagctgcagccatcacaaagagacatttgaaactacaagatgctgtattaagtagcttccatccaa

SEQ ID NO: 26553 - DNA, 1411 bp, Glycine max
  unsure (1)..(1411): unsure at all n locations
ggncatgcggttgcgagtcgctctttacatcgcccaggctttgcattattgcagctctgagggtcgtcccttgtcacatgacttgaatgcttaccgtgttctcttcgaccaggaaggcgatccccgtctctcttgctttggttttatgaagaacagcagggatggcaagagttatagcaccaatcttgcttacacacctcctgaatatttaagaaatggaagggtcacgcctgaaagtgtcatttacagctttggaaccgttcttctagacctcctcagtggcaagcacatccctcccagtcatgcacttgatatgatacaggggaaaaacaatatgctcttaatggattcacatttagagggaaagttttcaacagaagaggcaacagtagtggttaatcttgcctctaaatgtttgcaatatgaacctagggagcggcctgatacaaaggatttggtcacaacacttgccccattgcatacaaaacccgatgttcgttctcacattatgcttggaattccaaagcacgaggaggctccatcaaccccacaacgtcctctttcagcaatgggtgaggcttgttcaagaatggacctaactgcaatacatcagatcttggttgcgacacactacagagacgatgaaggaactaatgagttgtcgttccaagagtggactcaacagatgagagatatgctggaagcaaggaagcgcggagaccatgcattccgtgacaaggactttaggacagccattgataactattcccagtttattgatgttggaacgatggtctccccaactgtgtttgcaaggcgcagtctgtgctatctgttatgtgatcaaccagatcctgcgctacgagatgcaatgcaagcacagtgtgtttatccagactggcccacggctttctacatgcaatcagttgctcttgcaaaactggacatgcacaaggatgcggctgatatgttaaatgaggcagctgcattggaagagaagaggcaaagaggagcaagatgatcatagttttatgcagtgggctaatttgagggtgtcaagttctgtataaaggttgagctgggaagcaaaactaacgtttgaatctgagtataaaatgtgtcagagaaatacaacagtggtggagtagatggcacatgctctttatttcaccatcttataggaatcggttacaacttgaaaacaactgtgcttatgcactctaaattgggaaggaataccggtaatttttccattgttaatgaaattgattggttgatgcctactgggttacttactgtcaaccaggtgtttattgaggttattctaactcttcactggtcaaggccatggtgttcatgatattatgtgatgcctgcataaattcataatctacataattctgtttatttt

SEQ ID NO: 26554 - DNA, 488 bp, Glycine max
aaagataatattccatcgcaaacatacaagggggatgtcagttacttcatatgtaccagacctggaaggggacctgttttgctttctgatagcatacaagcacttctgaacgatgaaactgggcttcccaagtaagttcatgggaaacattctggtggttgatctattcttcgttgggcttcactagcaggctttttgagcccaaaatattttgcctggaggaccctttcaaggaagcccgtgctactcgtggcatgatgattcgttactcctagttcgcagtatgtgtttgtttaggtatctgtaatttttgtttcagatctagttgggctattttgttggagaaaaataagtctcgctcctttttttgaattgagcaaaataccttcaattcatttgagcttgcgagttaaacttgtcagttttttatctggacaattctccctactttgctatattaaaaaaaaaaaaaaaaaaggggggccgcc
